United States Patent Application Publication US 2026/0218238 A1 - sequence listing, part 2

SEQ ID NO: 10531 - DNA, 1386 bp, unidentified
  misc_feature 1..1386: note = Synthetic
  source 1..1386: mol_type = other DNA
atgtcatctgtattcaatgagtatcaggcgcttcaagaacaacttgtaaagccggctgtcaggagacctgatgttgcctcaacgggtttactcagagcggaaatacctgtctgtgtcacattatctcaagaccccggtgagagatggagccttgcttgcttgaatatcagatggcttgtgagtgattcatcaaccacaccaatgaagcaaggagcaatattgtcactgctgagtctacattcagacaatatgcgagctcacgcaacattagcagcaaggtctgcagatgcttcactcaccatacttgaggtagatgaagtagatattggcaactcactaatcaaattcaacgccagaagtggtgtatctgataaacgctcaaatcaattgcttgcaattgcggatgacatccccaaaagttgcagtaatgggcatccatttcttgacacagacattgagaccagagacccgctcgatctatcagagactatagaccgcctgcagggtattgcagctcagatatgggtgtcagccataaagagcatgacagcgcctgacaccgcatcagagtcagaaagtaagaggctggccaaatatcaacaacaaggccgactggttaagcaagtactcttgcattctgtagtcaggacagaatttatgagagttattcggggcagcttggtactgcgccagtttatggttagcgagtgcaagagggcttcagccatgggcggagacacatctaggtactatgctatggtgggcgacatcagtctgtacatcaagaatgcaggattgactgcatttttcctcaccctgaagttcggagttggtacccagtatccaaccttagcaatgagtgttttctccagtgaccttaaaaggcttgctgcactaatcaggctatacaaaaccaagggagacaatgcaccatacatggcattcctggaggactccgatatgggaaattttgctccagcaaattatagcacaatgtactcttatgccatgggcattgggacaattctggaagcatctgtatctcgataccagtatgccagagactttaccagtgagaattatttccgtcttggagttgagacagcccaaagccagcagggagcatttgacgagagaacagcccgagaaatgggcttgactgaggaatcaaaacagcaggttagatcactgctaatgtcagtagacatgggtcccagttcagttcatgagccatctcgccctgcatttatcagtcaagaagaaaataggcagcctgcccagaactcgtcagatactcagggtcagaccaagccagtcccgaagcagcccgcaccaagggccgactcagatgacattgatccatacgagaacgggctagaatggtaa

SEQ ID NO: 10532 - DNA, 1434 bp, unidentified; identical to SEQ ID NO: 10306
  misc_feature 1..1434: note = Synthetic
  source 1..1434: mol_type = other DNA

SEQ ID NO: 10533 - DNA, 33 bp, unidentified; identical to SEQ ID NO: 1057
  misc_feature 1..33: note = Synthetic
  source 1..33: mol_type = other DNA

SEQ ID NO: 10534 - DNA, 21 bp, unidentified
  source 1..21: mol_type = other DNA
  misc_feature 1..21: note = Synthetic
atgaagatgggatgttggtag

SEQ ID NO: 10535 - DNA, 120 bp, unidentified; identical to SEQ ID NO: 1081
  misc_feature 1..120: note = Synthetic
  source 1..120: mol_type = other DNA

SEQ ID NO: 10536 - DNA, 1650 bp, unidentified
  source 1..1650: mol_type = other DNA
  misc_feature 1..1650: note = Synthetic
atgtcgtctgtgctcaaagcatttgagcgattcacaatagaacaggaacttcaagacaggggtgaggagggttcaattccgccggagactttaaagtcagcagtcaaagtcttcgttattaacacacccaatcccaccacacgctaccatatgctaaacttttgcctaaggataatctgcagtcaaaatgctagggcatctcacagggtaggtgcattgataacattattctctcttccctcagcaggcatgcaaaatcatattagattggcagatagatcacctgaagctcagatagaacgctgtgagattgacggttttgagccaggcacatataggctaattccgaatgcacgcgccaatcttactgccaatgaaattgctgcctatgctttgcttgcagatgacctccctccaaccataaataatggaactccctatgtacatgcagatgttgaaggacagccatgtgatgagattgagcaattcctagatcgatgctacagtgtactaatccaggcttgggtgatggtctgtaaatgtatgacagcgtacgaccaacctgctggatctgctgatcggcggtttgcgaaataccagcagcaaggtcgcctggaagcaagatacatgctgcagccggaggcccaaaggttgattcaaactgccatcaggaaaagtcttgttgttagacagtaccttactttcgaactccagttggcaagacggcaggggttgctatcaaacagatactatgcaatggtgggtgacattggaaagtacattgagaattcaggccttactgccttctttctcaccctcaaatatgcactaggtaccaaatggagtcctctgtcattggccgcattcaccggtgaactcactaagctccgatccttgatgatgttatatcgagatcttggagaacaagccagataccttgctttgttggaggctccccaaataatggactttgcacccggaggctacccattgatattcagttatgctatgggagtcggtacagtcctagatgtccaaatgcgaaattacacttatgcacgacctttcctaaatggttattatttccagattggggttgagactgcacgacggcaacaaggcactgttgacaacagagtagcagatgatctaggcctgactcctgagcaaaggactgaggttactcagcttattgacaggcttgcaaggggcagaggtgcggggataccaggtgggcccgtgaatccttttgttcctccagttcaacagcaacaacctgctgccgcatatgaggacattcctgcattggaggaatcagatgacgacggtgatgaagatgggggtgcaggattccaaaatggagcacaagcaccagctgcaagacagggaggccaaaatgacttcagagtacagccactacaggatccaattcaagcacaacttttcatgccattatatcctcaagtcagcaacatcccaaatcatcagaatcatcagatcaatcgcatcggggggatggaacaccaagatttattacgatacaacgagaatggtgattctcaacaagatgcaaggggcgaacacggaaacaccttcccaaacaatcctaatcaaaacgcacagtcgcaagtgggcgactgggatgagtaa

SEQ ID NO: 10537 - DNA, 24 bp, unidentified
  source 1..24: mol_type = other DNA
  misc_feature 1..24: note = Synthetic
atggatactgatctggaaaattaa

SEQ ID NO: 10538 - DNA, 45 bp, unidentified; identical to SEQ ID NO: 213
  misc_feature 1..45: note = Synthetic
  source 1..45: mol_type = other DNA

SEQ ID NO: 10539 - DNA, 1638 bp, unidentified
  misc_feature 1..1638: note = Synthetic
  source 1..1638: mol_type = other DNA
atgtcctcggtcctcaccgcctttgagcgcttcactatcgagcaggagctccaggatagaggagccgagggtagcattccccccgaaaccctcaaaacccgcattcaagtcttcgtattgaatgacgaggacccgcacctccggtggcggatgttcaacttctgcttgcgattaatccttagccctgctacacgtacggctagaaaaattggtgccatgatcacactattctccttgcctgctgctgctatgcaaaaccatgtaaggcttgctgatagatcccccgatgcgattattgagcgcgtcgagattaatggctttgtcgatggaacttggagattgattccaaacgaccgcgccatcctaccggatgccaccatcaatgcactcaatgttgctgcagatgagctgccacccgacttggtcaacagaacaccttatgttgttcaaggtggggaggaccttccttgtgatgaagtagagatattcctccaaagagcatatagtgtgttgatccaggcatggatcatggtatgtaaatgcatgacagcatacgatcagcctgctccatctgaagaacgtaggatagccaaatataggcagcaaggtaggttggaagcccggttcattttgcagaatccagctcgaagggggatccaaaaggtcatcagagaaagcctcgtagttcggcaataccttgcttatgaattgcaaatcgctcgcaaccaaagcttggtaactaacaaatactatgctatagtaggagatattggaaagtacattgagaatgctggactaagtgcttttttcctaacagtcaagttcgcactgggtaccaagtggcaacctctggcattgtcggccttctctggagaattaacaaagctgaagtccctaatgctcttataccgagacctgggtgaacaggcacgatacttggcactcttagaggctccccaggctatggattttgctcctgcaaactaccctctgatatacagctacgccatgggcgtgggaactgtactcgatccacagatgaggaattataactttgcacgcccgttcttaaatgcaatgtacttccaattcggtgtagaaacagctcgtcgccaacaaggtgccgttgatacaaagatggccgaggagcttggtctcaccgcccaagacaagcaggagatgacagaaacgctaaacaggcttggcgctgcaggtgcacgaggggccgctccggctgcacccaatccatttaatgcagcgcccccagcacctgctcccatcccagttgcccaaccagcacaggatggcccacatgacaacgctgcagctgctccggcccccgcccccggtgccgacgcgcccggtcccgccggtcttcacatccctggaccaggagagccaggatttgaaccacaggagtactaccggcaacccggtatgatggacatggtcaagaacagactaaggatcgctagcgggggtgcaccgggagtcctaccgcatgaactcgacgcggctgcacaaatatatgttgatgaagtcgtcactgggctaagacgccccaatgactttgcaggtatcctcgaagccatgtttcagcagcttgcagaggagcaaaaaggtgacctagaggattag

SEQ ID NO: 10540 - DNA, 1659 bp, unidentified
  source 1..1659: mol_type = other DNA
  misc_feature 1..1659: note = Synthetic
attaaggatatttctagtctaaagttcaaaatgtcaagtgttttaaagacatttgaaagatttactatacaacaggagcttcaggagcaatctgatgacactccagtacctcttgagacaatcaaacctacaatcagggtatttgtcatcaataataatgatcctgtcgtaagatctagacttttattctttaatctacgaatcattatgagtaacactgcaagagagggacatagagctggtgctctcctcagtcttttatcactaccttctgcagctatgagtaatcacatcaaattagccatgcattcaccagaagccagcatagatagagtagagataacagggtttgagaataattcattccgagtcattccagatgctcgatcaactatgtccagaggagaggtgctggcttttgaagcattagctgaggacattcctgatacccttaatcaccaaactccatttgtaaataatgatgtagaagatgacatatttgatgaaacagagaaattcttagatgtttgctacagtgtgcttatgcaggcatggatagtaacatgcaagtgtatgactgctcctgatcaaccaccagtatcagtagcaaagatggctaaatatcaacaacaagggagaatcaatgctaggtatgtactacaacctgaagcacaaagactaattcagaatgccatccgcaagtcaatggtagtaaggcatttcatgacttatgagcttcaactttcacaatcaagatctttgctagcaaaccgctactatgctatggtgggagacattggcaagtacattgaacacagcggaatgggaggatttttcttaacacttaaatatggacttggaacaagatggcctacattggctcttgcagcattttctggggaactccagaaattaaaagctctcatgctacattatcagagtctaggacccatggccaagtacatggctctattagaatcaccaaaactgatggattttgtcccatctgaatatccattagattatagctatgcaatgggtattggaactgtccttgatacaaatatgagaaattatgcatacggtagatcatatttaaatcagcaatattttcagctaggagtagaaacagcaaggaaacagcagggagctgttgacaacaggacagcagaggacctcggcatgactgctgcagacaaagcagacctcactgcaaccatatcaaagctatccttgtcccaattacctaggggtagacaaccaatatctgacccatttgctggagcaaatgacagagaaatgggaggacaagcaaatgatacacctgtgtataacttcaatccaatcgatactcggaggtatgacaactatgacagtgatggtgaggacagaattgacaacgatcaagatcaagctatcagagagaatagaggagagcctggacaaccaaacaaccagacaagtgacaaccagcagagattcaacccccccataccgcaaagaacatcaggtatgagcagtgaagagttccaacattcaatgaatcagtacatccgtgctatgcatgagcaatacagaggctcccaggatgatgatgccaatgatgccacagatgggaatgacatttctcttgagctagttggagattttgattcctaa

SEQ ID NO: 10541 - DNA, 189 bp, unidentified
  source 1..189: mol_type = other DNA
  misc_feature 1..189: note = Synthetic
atggtgctgcgccggctgtcacgccaggcctccgttaaggttcgtaggtcatggactgaaagtaaaaaaacagctcaacgcctttttgtgtttgttttagagcttttgctgcaattttgtgaaggggaagatactgttgacgggaaacgcaaaaaaccagaaaggttaactgaaaaaccagaaagttaa

SEQ ID NO: 10542 - DNA, 27 bp, unidentified
  misc_feature 1..27: note = Synthetic
  source 1..27: mol_type = other DNA
atgaagaaataccgactagaacattag

SEQ ID NO: 10543 - DNA, 1335 bp, unidentified
  misc_feature 1..1335: note = Synthetic
  source 1..1335: mol_type = other DNA
atgcgctggaagagaatggagaggagacccccactcactcctcttcggagatcaaggacacaatcgtcaggtggaggcttgacgatttgcccccggtgtgccctgaaactccctaaggctacccggatttcagagagaccctgggcgtccacatggcagctgaatcagcatatacaggtgtccaagactaaaaaggccaccgcgtatcttaaagcgccccgtgaatgggggcagtgcacgcaccaggatccagactggtccaagcgtctgggtcgtggcgcctttggcataatcgtccctatctccgaggatctgtgtgtgaagcagtttgatagccgccgggagtttttctacgaggcaattgccaacgacctgatgcaggccacccgagagaggtaccccatgcattctggtggatctagactgctaggattcgtgcagccttgcataccctgtagatcgattgtgtatcctagaatgaagtgcaacctgctgcagctggactggagtcaggtcaacctgagtgtcatggcggcggagttcaccggcctaatggcggcggtgtcctttctaaacagatactgtggcatggtgcactgcgacgttagtccagacaatattttggccacaggagacctaacgcccatgaaccccgggaggctggtccttaccgatttcggttccgttgcgctacactctgggagcaagtggactaaccttgtggtgacctctaacctggggtttaagcaacactgctacgacttcagggtgccacccaaactcatttgtaagcatctctataagccgtcttgcgtcctcttccagtgttacctatccagtctcggtaagatgcacgcgcaggtattggaccaaccgtaccctatcagccctaacatgggactgaccatcgacatgtcctcgttgggctacactctgctgacatgcctggaactctatctcgatctgccgctaaacaaccctctgaagttcttgggttcagccaccagagacggacgccccgaacccatgtactacttgggcttcatgattcccagggtggtgatgactcagatcctgtccgctgtgtggaccatgacgcttgacctgggactagattgcaccggcaaagcccaggcgattcccatgcgacaggagcaccagctggcgtttcagaagcagtgctatttatataaagccaaccaaaaggcagagtcgttagcgaactgctccgataagctaaactgccccatgttaaagtctctcgttagaaagctactagagcgagactttttcaaccatggaggccacccccacacccgcggacttgttttctga

SEQ ID NO: 10544 - DNA, 1335 bp, unidentified; identical to SEQ ID NO: 10543
  source 1..1335: mol_type = other DNA
  misc_feature 1..1335: note = Synthetic

SEQ ID NO: 10545 - DNA, 39 bp, unidentified; identical to SEQ ID NO: 1092
  misc_feature 1..39: note = Synthetic
  source 1..39: mol_type = other DNA

SEQ ID NO: 10546 - DNA, 30 bp, unidentified; identical to SEQ ID NO: 1093
  misc_feature 1..30: note = Synthetic
  source 1..30: mol_type = other DNA

SEQ ID NO: 10547 - DNA, 27 bp, unidentified
  source 1..27: mol_type = other DNA
  misc_feature 1..27: note = Synthetic
atgatgaaataccgactagaacattag

SEQ ID NO: 10548 - DNA, 153 bp, unidentified; identical to SEQ ID NO: 1097
  misc_feature 1..153: note = Synthetic
  source 1..153: mol_type = other DNA

SEQ ID NO: 10549 - DNA, 69 bp, unidentified
  misc_feature 1..69: note = Synthetic
  source 1..69: mol_type = other DNA
atgctgcatccaactcagccaacagacaggatttcactcaagacccaggtaaatttactgagccagtga

SEQ ID NO: 10550 - DNA, 6558 bp, unidentified
  source 1..6558: mol_type = other DNA
  misc_feature 1..6558: note = Synthetic
atgggagctcaagtatcaacgcaaaagactggggcacatgagaccaggctgaatgctagcggcaattccatcattcactacacaaatattaattattacaaggatgccgcatccaactcagccaatcggcaggatttcactcaagacccgggcaagttcacagaaccagtaaaagatatcatgattaaatcactaccagctctcaactcccccacagtagaggagtgcggatacagtgacagggtgagatcaatcacattaggtaactccaccataacgactcaggaatgcgccaacgtggtggtgggctatggagtatggccagattatctaaaggatagtgaggcaacagcagaggaccaaccgacccaaccagacgttgccacatgtaggttctatacccttgactctgtgcaatggcagaaaacctcaccaggatggtggtggaagctgcccgatgctttgtcgaacttaggactgtttgggcagaacatgcagtaccactacttaggccgaactgggtataccgtacatgtgcagtgcaatgcatctaagttccaccaaggatgcttgctagtagtgtgtgtaccggaagctgagatgggttgcgcaacgctagacaacaccccatccagtgcagaattgctggggggcgatagcgcaaaagagtttgcggacaaaccggtcgcatccgggtccaacaagttggtacagagggtggtgtataatgcaggcatgggggtgggtgttggaaacctcaccattttcccccaccaatggatcaacctacgcaccaataatagtgctacaattgtgatgccatacaccaacagtgtacctatggataacatgtttaggcataacaacgtcaccctaatggttatcccatttgtaccgctagattactgccctgggtccaccacgtacgtcccaattacggtcacgatagccccaatgtgtgccgagtacaatgggttacgtttagcagggcaccagggcttaccaaccatgaatactccggggagctgtcaatttctgacatcagacgacttccaatcaccatccgccatgccgcaatatgacgtcacaccagagatgaggatacctggtgaggtgaaaaacttgatggaaatagctgaggttgactcagttgtcccagtccaaaatgttggagagaaggtcaactctatggaagcataccagatacctgtgagatccaatgaaggatctggaacgcaagtattcggctttccactgcaaccagggtactcgagtgtttttagtcggacgctcctaggagagatcttgaactattatacacattggtcaggcagcataaagcttacgtttatgttctgtggttcggccatggctactggaaaattccttttggcatactcaccaccaggtgctggagctcctacaaaaagggttgatgccatgcttggtactcatgtagtttgggacgtggggctacaatcaagttgcgtgctgtgtataccctggataagccaaacacactaccggtttgttgcttcagatgagtataccgcagggggttttattacgtgctggtatcaaacaaacatagtggtcccagcggatgcccaaagctcctgttacatcatgtgtttcgtgtcagcatgcaatgacttctctgtcaggctattgaaggacactcctttcatttcgcagcaaaactttttccagggcccagtggaagacgcgataacagccgctatagggagagttgcggataccgtgggtacagggccaaccaactcagaagctataccagcactcactgctgctgagacaggtcacacgtcacaagtagtgccgggtgacaccatgcagacacgccacgttaagaactaccattcaaggtctgagtcaaccatagagaacttcctatgtaggtcagcatgcgtgtactttacggagtataaaaactcaggtgccaagcggtatgctgaatgggtattaacaccacgacaagcagcacaacttaggagaaagctagaattctttacctacgtccggttcgacctggagctgacgtttgtcataacaagtactcaacagccctcaaccacacagaaccaagacgcacagatcctaacacaccaaattatgtacgtaccaccaggtggacctgtaccagataaagttgattcatacgtgtggcaaacatctacgaatcccagtgtgttttggaccgagggaaacgccccgccgcgcatgtccataccgtttttgagcattggcaacgcctattcaaatttctatgacggatggtctgaattttccaggaacggagtttacggcatcaacacgctaaacaacatgggcacgctatatgcaagacatgtcaacgctggaagcacgggtccaataaaaagcaccattagaatctacttcaaaccgaagcatgtcaaagcgtggatacctagaccacctagactctgccaatacgagaaggcaaagaacgtgaacttccgacccagcggagttaccactactaggcaaagcatcactacaatgacaaatacgggcgcatttggacaacaatcaggggcagtgtatgtggggaactacagggtagtaaatagacatctagctaccagtgctgactggcaaaactgtgtgtgggaaagttacaacagagacctcttagtgagcacgaccacaacacatggatgtgatattatagccagatgtcagtgcacaacgggagtgtacttttgtgcgtccaaaaacaagcactacccaatttcgtttgaaggaccaggtctagtagaggtccaagagagtgaatactaccccaggagataccaatcccatgtgcttttagcagctggattttccgaaccaggtgactgtggcggtatcctaaggtgtgagcatggtgtcattggcattgtgaccatggggggtgaaggcgtggtcggctttgcagacatccgtgatctcctgtggctggaagatgatgcaatggaacagggagtgaaggactatgtggaacagcttggaaatgcactcggctccggctttactaaccaaatatgtgagcaagtcaacctcctgaaagaatcactagtgggtcaagactccatcttagagaaatctctaaaagccttagttaagataatatcagccttagtaattgtggtgaggaaccacgatgacctgatcactgtgactgccacactagcccttatcggttgtacctcgtccccgtggcggtggctcaaacagaaggtgtcacaatattacggaatccctatggctgaacgccaaaacaatagctggcttaagaaatttactgaaatgacgaatgcttgcaagggtatggaatggatagctgtcaaaattcagaaattcattgaatggctcaaagtaaaaattttgccagaggtcagggaaaaacacgaattcctgaacagacttaaacaactccccttattagaaagtcagatcgccacaatcgagcagagcgcgccatcccaaagtgaccaggaacaattattttccaatgtccaatactttgcccactattgcagaaagtacgctcccctctacgcagctgaagcaaagagggtgttctcccttgagaagaagatgagcaattacatacagttcaagtccaaatgccgtattgaacctgtatgtttgctcctgcacgggagccctggtgccggcaagtcggtggcaacaaacttaattggaaggtcgcttgctgagaaactcaacagctcagtgtactcactaccgccagacccagatcacttcgacggatacaaacagcaggccgtggtgattatggacgatctatgccagaaccctgatgggaaagacgtctccttgttctgccaaatggtttccagtgtagattttgtaccacccatggctgccctagaagagaaaggcattctgttcacctcaccgtttgtcttggcatcgaccaatgcaggatctattaatgctccaaccgtgtcagatagcagagccttggcaaggagatttcactttgacatgaacatcgaggttatttccatgtacagtcagaatggcaagataaacatgcccatgtcagtcaagacttgtgacgatgagtgttgcccggtcaattttaaaaagtgctgccctcttgtgtgtgggaaggctatacaattcattgatagaagaacacaggtcagatactctctagacatgctagtcaccgagatgtttagggagtacaatcatagacatagcgtggggaccacgcttgaggcactgttccagggaccaccagtatacagagagatcaaaattagcgttgcaccagagacaccaccaccgcccgccattgcggacctgctcaaatcggtagacagtgaggctgtgagggagtactgcaaagaaaaaggatggttggttcctgagatcaactccaccctccaaattgagaaacatgtcagtcgggctttcatttgcttacaggcattgaccacatttgtgtcagtggctggaatcatatatataatatataagctctttgcgggttttcaaggtgcttatacaggagtgcccaaccagaagcccagagtgcctaccctgaggcaagcaaaagtgcaaggccctgcctttgagttcgctgtcgcaatgatgaaaaggaactcaagcagggtgaaaactgaatatggcgagtttaccatgctgggcatctatgacaggtgggccgttttgccacgccacgccaaacctgggccaaccatcttgatgaatgatcaagaggttggtgtgctagatgccaaggagctagtagacaaggacggcaccaacttagaactgacactactcaaattgaaccggaatgagaagttcagagacatcagaggcttcttagccaaggaggaagtggaggttaatgaggcagtgctagcaattaacaccagcaagtttcccaacatgtacattccagtaggacaggtcacagaatacggcttcttaaacctaggtggcacacccaccaagagaatgcttatgtacaacttccccacaagagcaggccagtgtggtggagtgctcatgtccaccggcaaggtactgggtatccatgttggtggaaatggccatcagggcttctcagcagcactcctcaaacactacttcaatgatgagcaaggtgaaatagaatttattgagagctcaaaggacgccgggtttccagtcatcaacacaccaagtaaaacaaagttggagcctagtgttttccaccaggtctttgaggggaacaaagaaccagcagtactcaggagtggggatccacgtctcaaggccaattttgaagaggctatattttccaagtatataggaaatgtcaacacacacgtggatgagtacatgctggaagcagtggaccactacgcaggccaactagccaccctagatatcagcactgaaccaatgaaactggaggacgcagtgtacggtaccgagggtcttgaggcgcttgatctaacaacgagtgccggttacccatatgttgcactgggtatcaagaagagggacatcctctctaagaagactaaggacctaacaaagttaaaggaatgtatggacaagtatggcctgaacctaccaatggtgacttatgtaaaagatgagctcaggtccatagagaaggtagcgaaaggaaagtctaggctgattgaggcgtccagtttgaatgattcagtggcgatgagacagacatttggtaatctgtacaaaactttccacctaaacccaggggttgtgactggtagtgctgttgggtgtgacccagacctcttttggagcaagataccagtgatgttagatggacatctcatagcatttgattactctgggtacgatgctagcttaagccctgtctggtttgcttgcctaaaaatgttacttgagaagcttggatacacgcacaaagagacaaactacattgactacttgtgcaactcccatcacctgtacagggataaacattactttgtgaggggtggcatgccctcgggatgttctggtaccagtattttcaactcaatgattaacaatatcataattaggacactaatgctaaaagtgtacaaagggattgacttggaccaattcaggatgatcgcatatggtgatgatgtgatcgcatcgtacccatggcctatagatgcatctttactcgctgaagctggtaagggttacgggctgatcatgacaccagcagataagggagagtgctttaacgaagttacctggaccaacgtcactttcctaaagaggtattttagagcagatgaacagtaccccttcctggtgcatcctgttatgcccatgaaagacatacacgaatcaattagatggaccaaggatccaaagaacacccaagatcacgtgcgctcactgtgtctattagcttggcataacggggagcacgaatatgaggagttcatccgtaaaattagaagcgtcccagtcggacgttgtttgaccctccccgcgttttcaactctacgcaggaagtggttggactccttttag

SEQ ID NO: 10551 - DNA, 120 bp, unidentified
  misc_feature 1..120: note = Synthetic
  source 1..120: mol_type = other DNA
atgctagcggcaattccatcattcactacacaaatattaattattacaaggatgccgcatccaactcagccaatcggcaggatttcactcaagacccgggcaagttcacagaaccagtaa

SEQ ID NO: 10552 - DNA, 72 bp, unidentified; identical to SEQ ID NO: 1108
  source 1..72: mol_type = other DNA
  misc_feature 1..72: note = Synthetic

SEQ ID NO: 10553 - DNA, 1572 bp, unidentified; identical to SEQ ID NO: 10047
  misc_feature 1..1572: note = Synthetic
  source 1..1572: mol_type = other DNA

SEQ ID NO: 10554 - DNA, 18 bp, unidentified
  source 1..18: mol_type = other DNA
  misc_feature 1..18: note = Synthetic
ataaattatcatacttag

SEQ ID NO: 10555 - DNA, 1572 bp, unidentified
  misc_feature 1..1572: note = Synthetic
  source 1..1572: mol_type = other DNA
atggcgacacttcttcggagtctagctctgttcaagaggaacaaagatagaacacccctaattgcaggttcaggaggagccataagagggattaagcatgttatcgtagtcccagtacccggtgattcatcgattgtcactaggtcaagattattggacaggttagtaagacttgctggtgacccttatataagtggacctaagctgacaggcgtcatgatcagtatactatcattgtttgttgaatcacccagtcaactaatacagcgaatcactgacgacccagatgtcagcatcagattagttgaagtaatccaaagtgagaagtccctatcagggctcacttttgcatccagaggcgctaatatggaggatgaggcggatgactatttctctattcaagcaggggaggaaggggacaccagaggaacccattggtttgagaacaaagagatagttgaaattgaggttcaagacccagaagaattcaacatactattggcatctattcttgcacaaatttggatcctattagccaaggcagtcactgctccagatactgcagctgactccgagacgaggcggtggattaaatatactcagcaacgccgtgtagtgggtgagtttcggcttgacaagggatggttggatgctgtgagaaatcggattgcggaggacctatcgttgaggagattcatggtggcattaattttagatatcaagagaacaccagggaacaaacccaggattgccgagatgatatgcgacatagacacctatatcgtcgaggcaggtcttgctagcttcatcctaactatcaaattcgggatcgaaacaatgtacccggccttagggttgcatgaattctcgggtgaattaactacagttgagtctctaatgaacctctaccaacagatgggcgagactgcaccgtacatggtaattcttgaaaactcaattcagaacaagttcagtgcaggttcatacccgctattatggagctatgcaatgggagttggagttgaacttgaaaattcaatgggtggacttaattttggtcgttcttacttcgaccctgcatatttcagactgggtcaagagatggtcaggagatcagcaggcaaggtgagctcatcgctagccgcagaactagggatcacagccgaggacgccaaacttgtctccgagattgctgcgcaggctaatgacgacagagctaatagagcaataggtcccaaacaaaaccagatatcgtttcttcatcctgacagaggcgatgccagtactccagggaacatccttcgcgcaaacgagggtgacgggtccacccggatgaaaagaggggggaacattgctacaccaaaagggacaagcatagatcagacatcaacgactctcagcaaagacactctagacattgatgaacagtccgacaacactgacgacccaattagtatccaaaaatcagctgaggcattagccaagatgagagccatggccaagctattggaaaaccaaggcccgcgtgatgtcactgcgcacgtttataatgataaagatctacttggctga

SEQ ID NO: 10556 - DNA, 48 bp, unidentified; identical to SEQ ID NO: 1119
  misc_feature 1..48: note = Synthetic
  source 1..48: mol_type = other DNA

SEQ ID NO: 10557 - DNA, 78 bp, unidentified; identical to SEQ ID NO: 1120
  source 1..78: mol_type = other DNA
  misc_feature 1..78: note = Synthetic

SEQ ID NO: 10558 - DNA, 129 bp, unidentified
  misc_feature 1..129: note = Synthetic
  source 1..129: mol_type = other DNA
ttgtggcacaaacaaaacaggcggaagccctcgtcaggccgcgagaggatggcatccaggatggcctccgcaatgtcagtgtttgaggccacaagggccttgatgacgacgggggtggacattatttaa

SEQ ID NO: 10559 - DNA, 138 bp, unidentified; identical to SEQ ID NO: 1122
  source 1..138: mol_type = other DNA
  misc_feature 1..138: note = Synthetic

SEQ ID NO: 10560 - DNA, 138 bp, unidentified; identical to SEQ ID NO: 1122
  misc_feature 1..138: note = Synthetic
  source 1..138: mol_type = other DNA

SEQ ID NO: 10561 - DNA, 141 bp, unidentified
  source 1..141: mol_type = other DNA
  misc_feature 1..141: note = Synthetic
aggggcgaggcgttgtggcacaaacaaaacaggcggaagccctcgtcaggccgcgagaggatggcatcgaggatggcctccgcaatgtcagtgtttgaggccacaagggccttgatgacgacgggggcggacattatttaa

SEQ ID NO: 10562 - DNA, 141 bp, unidentified; identical to SEQ ID NO: 10561
  misc_feature 1..141: note = Synthetic
  source 1..141: mol_type = other DNA

SEQ ID NO: 10563 - DNA, 21 bp, unidentified
  misc_feature 1..21: note = Synthetic
  source 1..21: mol_type = other DNA
acggcttcccgccacaggtaa

SEQ ID NO: 10564 - DNA, 90 bp, unidentified; identical to SEQ ID NO: 1128
  source 1..90: mol_type = other DNA
  misc_feature 1..90: note = Synthetic

SEQ ID NO: 10565 - DNA, 21 bp, unidentified
  misc_feature 1..21: note = Synthetic
  source 1..21: mol_type = other DNA
acggcttcccgccacaggtaa

SEQ ID NO: 10566 - DNA, 21 bp, unidentified
  source 1..21: mol_type = other DNA
  misc_feature 1..21: note = Synthetic
acggcttcccgccacaggtaa

SEQ ID NO: 10567 - DNA, 90 bp, unidentified; identical to SEQ ID NO: 1128
  source 1..90: mol_type = other DNA
  misc_feature 1..90: note = Synthetic

SEQ ID NO: 10568 - DNA, 90 bp, unidentified; identical to SEQ ID NO: 1128
  source 1..90: mol_type = other DNA
  misc_feature 1..90: note = Synthetic

SEQ ID NO: 10569 - DNA, 15 bp, unidentified
  source 1..15: mol_type = other DNA
  misc_feature 1..15: note = Synthetic
atggtattattataa

SEQ ID NO: 10570 - DNA, 84 bp, unidentified; identical to SEQ ID NO: 1130
  source 1..84: mol_type = other DNA
  misc_feature 1..84: note = Synthetic

SEQ ID NO: 10571 - DNA, 18 bp, unidentified
  misc_feature 1..18: note = Synthetic
  source 1..18: mol_type = other DNA
ttggctaaggatagttaa

SEQ ID NO: 10572 - DNA, 1572 bp, unidentified; identical to SEQ ID NO: 9928
  misc_feature 1..1572: note = Synthetic
  source 1..1572: mol_type = other DNA

SEQ ID NO: 10573 - DNA, 1404 bp, unidentified
  misc_feature 1..1404: note = Synthetic
  source 1..1404: mol_type = other DNA
aagaaaaaacagacagcgtcaatggcagagcaaaaatgtaacacctctacaatggatgccgacaagattgtattcaaagtcaataatcaggtggtctctttgaagcctgagattatcgtggatcaatatgagtacaagtaccctgccatcaaagatttgaaaaagccctgtataactctaggaaaggctcccgatttaaataaagcatacaagtcagttttatcatgcatgagcgccgccaaacttgatcctgacgatgtatgttcctatttggcggcggcaatgcagttttttgaggggacatgtccggaagactggaccagctatggaatcgtgattgcacgaaaaggagataagatcaccccaggttctctggtggagataaaacgtactgatgtagaagggaattgggctctgacaggaggcatggaactgacaagagaccccactgtccctgagcatgcgtccttagtcggtcttctcttgagtctgtataggttgagcaaaatatccgggcaaagcactggtaactataagacaaacattgcagacaggatagagcagatttttgagacagccccttttgttaaaatcgtggaacaccatactctaatgacaactcacaaaatgtgtgctaattggagtactataccaaacttcagatttttggccggaacctatgacatgtttttctcccggattgagcatctatattcagcaatcagagtgggcacagttgtcactgcttatgaagactgttcaggactggtgtcatttactgggttcataaaacaaatcaatctcaccgctagagaggcaatactatatttcttccacaagaactttgaggaagagataagaagaatgtttgagccagggcaggagacagctgttcctcactcttatttcatccacttccgttcactaggcttgagtgggaaatctccttattcatcaaatgctgttggtcacgtgttcaatctcattcactttgtaggatgctatatgggtcaagtcagatccctaaatgcaacggttattgctgcatgtgctcctcatgaaatgtctgttctagggggctatctgggagaggaattcttcgggaaagggacatttgaaagaagattcttcagagatgagaaagaacttcaagaatacgaggcggctgaactgacaaagactgacgtagcactggcagatgatggaactgtcaactctgacgacgaggactacttctcaggtgaaaccagaagtccggaagctgtttatactcgaatcataatgaatggaggtcgactgaagagatcgcacatacggagatatgtctcagtcagttccaatcatcaagctcgtccaaactcattcgccgagtttctaaacaagacatattcgagtgactcataa

SEQ ID NO: 10574 - DNA, 33 bp, unidentified; identical to SEQ ID NO: 1134
  misc_feature 1..33: note = Synthetic
  source 1..33: mol_type = other DNA

SEQ ID NO: 10575 - DNA, 27 bp, unidentified
  source 1..27: mol_type = other DNA
  misc_feature 1..27: note = Synthetic
aagacacagatagtatcagtgacctaa

SEQ ID NO: 10576 - DNA, 222 bp, unidentified
  source 1..222: mol_type = other DNA
  misc_feature 1..222: note = Synthetic
ctggccatggttcttcgccagctgtcacgtaaggcttctgtgaaagttagtaaaacctggagtggaactaaaaaaagagctcaaaggattttaatttttttgttagaatttttgctggacttttgcacaggtgaagacagtgtagacgggaaaaaaagacagagacacagtggtttgactgagcagacatacagtgctttgcctgaaccaaaagctacatag

SEQ ID NO: 10577 - DNA, 129 bp, unidentified; identical to SEQ ID NO: 1143
  misc_feature 1..129: note = Synthetic
  source 1..129: mol_type = other DNA

SEQ ID NO: 10578 - DNA, 756 bp, unidentified
  misc_feature 1..756: note = Synthetic
  source 1..756: mol_type = other DNA
atggccaaggctactgggaggtacaaccttatctccccaaagaaagatcttgaaaaagggctggttctgaatgacctttgcactctctcagtggcccagacggtccagggatggaaggttacctgggctgggattgaatttgatgttacacagaaagggatggccttattgcacaggctcaagaccagtgattttgctccagcctggtcaatgaccaggaacttatttccacatctctttcaaaacccgaactctacaattgagtcgccactttgggcactgcgggtcatactagcagcaggtattcaagatcagctaattgatcaatcgttgatcgaacccttggcaggagcgctaggcttaattgctgattggcttcttactactggaacaaaccactttcaaatgcgcacacaacaggctaaggagcaactaagtctaaaaatgttgtccctggtgcgatcaaacatcctaaagttcatcaaccaactagatgcactacatgttgtgaattacaatggacttctcagtagcattgaaattggcaccaaaagccatacaattataattacccggacaaatatgggttttttggtagagttgcaagagcctgacaaatcagccatgaacaccagaaaaccaggaccagtcaaattctccctcctccatgaatcaaccttgaagacacttgctaaaaaacctgcgacccagatgcaagcactaatcttagaattcaatagttctctcgctatttaa

SEQ ID NO: 10579 - DNA, 36 bp, unidentified; identical to SEQ ID NO: 1147
  source 1..36: mol_type = other DNA
  misc_feature 1..36: note = Synthetic

SEQ ID NO: 10580 - DNA, 237 bp, unidentified
  misc_feature 1..237: note = Synthetic
  source 1..237: mol_type = other DNA
ttgaaaaccacgaaaatgccaaatatggcaaagattcgatccgatgacaattctctagaaacttttacatctcccaccacacccgacgaaaaaaacatcccagattcaatgattgcaattgttgcagcggtggcagtggtgatggcactaataataatatgcatgcttttatatgcttgtcgctacaaaaagtttcatcctaaaaaacaagatctcctactaaggcttaacatttaa

SEQ ID NO: 10581 - DNA, 108 bp, unidentified
  misc_feature 1..108: note = Synthetic
  source 1..108: mol_type = other DNA
ttgccagactttttgcggactgcggttatgagaagattggaaaaatatccatgcgcttcggacggatgtcgacgttgggcatgtcggagacttatcaatcgtgcatga

SEQ ID NO: 10582 - DNA, 123 bp, unidentified
  misc_feature 1..123: note = Synthetic
  source 1..123: mol_type = other DNA
atgatcaattatttttggaatggtttggacaaaatttgttggattgccactttgcacaaaacgtttcagtgtatttgcaagatgcttcaatggttcattttaaaaccttttctgaacaaataa

SEQ ID NO: 10583 - DNA, 1158 bp, unidentified
  misc_feature 1..1158: note = Synthetic
  source 1..1158: mol_type = other DNA
acgggagcgagcccccttttttctttttgccagatgcatcccgtcctgcgccaaatgcgtcccacccccccggcgaccaccgcgaccgcggccgtagcaggcgccggcgctagccagccacagccacagacagagatggacttggaagagggcgaagggctggcgagactgggggcgccgtccccggagcgacacccccgcgtgcagctgcagaaggacgtgcgcccggcgtacgtgcctgcgcagaacctgttcagggaccgcagcggggaggagcccgaggagatgcgcgactgccggtttcgggcgggcagggagctgcgcgagggcctggaccgccagcgcgtgctgcgcgacgaggatttcgagccgaacgagcagacggggatcagccccgcgcgcgctcacgtggcggcggccaacctggtgacggcctacgagcagacggtgaagcaggagcgcaacttccaaaagagtttcaacaaccacgtgcgcaccctgatcgcgcgcgaggaggtggccctgggcctgatgcacctgtgggacctggcggaggccatcgtgcagaacccggacagcaagcctctgacggcgcagctgttcctggtggtgcagcacagcagggacaacgaggcgttcagggaggcactgctgaacatcgccgagcccgagggtcgctggctgctggagctgatcaacatcttgcagagcatcgtagtgcaggagcgcagcctgagcttggccgagaaggtggcggcgatcaactactcggtgctgagcctgggcaagttttacgcgcgcaagatttacaagacgccgtacgtgcccatagacaaggaggtgaagatagacagcttttacatgcgcatggcgctcaaggtgctgacgctgagcgacgacctgggcgtgtaccgcaacgaccgcatccacaaggccgtgagcacgagccggcggcgcgagctaagcgaccgcgagctgatgctgagcctgcgccgggcgctggtagggggcgctgccggcggcgaggagtcctacttcgacatgggggcggacctgcattggcagccgagccggcgcgccttggaggccgcctacggtccagaggacttggatgaggaagaggaagaggaggaggatgcacccgctgcggggtactga

SEQ ID NO: 10584 - DNA, 54 bp, unidentified; identical to SEQ ID NO: 1158
  source 1..54: mol_type = other DNA
  misc_feature 1..54: note = Synthetic

SEQ ID NO: 10585 - DNA, 30 bp, unidentified; identical to SEQ ID NO: 1159
  misc_feature 1..30: note = Synthetic
  source 1..30: mol_type = other DNA

SEQ ID NO: 10586 - DNA, 447 bp, unidentified
  misc_feature 1..447: note = Synthetic
  source 1..447: mol_type = other DNA
atgtatttaacagagcagattatggacaggccaaaacctagaacagtaaaggaactagcagacactcttgtgattcctttaatagatttgttgataccttgtaaattttgcaatagatttttatcttattttgagctacttaattttgatcacaagtgtttacagcttatttggacagaggaggatttggtgtatggactctgtagtagctgtgcttatgcgtctgcacagttagaatttacacatttttttcaatttgctgtagttggaaaagatatagaaactgtagaaggaacagctattggaaatatttgtattaggtgtcgctactgttttaagttattagacttagtggagaagttagctacatgctataagtttgagcagttttataaggtcagaaacagctggaaaggattgtgcagacactgtgggtcggtagaatga

SEQ ID NO: 10587 - DNA, 21 bp, unidentified
  source 1..21: mol_type = other DNA
  misc_feature 1..21: note = Synthetic
ttggagatgaacaagaaatag

SEQ ID NO: 10588 - DNA, 3729 bp, unidentified
  misc_feature 1..3729: note = Synthetic
  source 1..3729: mol_type = other DNA
atggacttcctaccaactcaagtgttctatggcagacgctggagaccacgaatgccgccacgcccttggagaccacgcatgcctacaatgcagagaccagaccaacaggcccgacaaatgcagcaattgattgcagcggttagcacgcttgccctgaggcagaatgcagccgcccctcagcgtggaaagaagaagcagccacgcagaaagaaaccaaaaccgcagcccgagaaaccaaagaagcaagaacagaagccgaagcaaaagaaggcccctaaacgaaagccagggagaagagaacgcatgtgcatgaagattgagcatgattgcatcttcgaggttaagcacgaaggtaaagtcacgggttacgcctgccttgtcggtgacaaggtaatgaagccagcacacgttcccggggtgatagacaatgcagatcttgcacgcctgtcgtacaagaaatccagtaagtacgatctggaatgtgcacaaatacccgtggctatgaagtcagatgcttcgaagtacacccatgagaaacccgagggtcattacaactggcactacggcgccgtccagtacacgggaggaagattcacggtgcccacaggagtgggtaagcctggcgacagcggtcggcccatctttgacaacaaagggccggttgtcgcaatagtgctgggaggagccaacgaaggtaccagaaccgccctttccgttgtgacatggaataaagacatggtcacgaagattacacctgaaggcactgtggagtgggcagcctcgacagtgacagccatgtgtcttttgacaaatatatccttcccatgtttccaaccgagctgtgcaccgtgctgctatgaaaaggggcctgagccgacgctgaggatgctggaggagaacgtaaattcagaaggatattacgacctgctgcacgctgccgtgtactgtagaaacagttcaaggtcgaagagaagcactgcaaatcattttaatgcgtataagttgacccgtccatatgtggcttactgcgcagactgcggtatgggtcattcttgccacagcccagccatgatcgaaaatattcaggcggatgcaacagatggcacgctaaaaattcagtttgcttcccaaattggcctgaccaaaacggacacgcacgatcacacaaagattagatatgctgaaggacacgacattgcagaggctgccagatcaacccttaaggtacacagtagcagtgagtgcacggtaaccggcacaatgggacactttatcctggccaaatgtccacctggcgaacgaatcagtgtctcatttgttgattcgaaaaacgaacaccggacctgccggatagcctaccaccatgaacagaggttaatagggcgagaaagattcacggtgcgaccgcatcatggaattgagctaccttgcaccacttatcaattgactaccgccgaaacctctgaagaaattgatatgcacatgccgccggacattccggatagaactatcctttcccaacaatcaggaaatgttaagataacggtgaatggacgaaccgtcaggtacagctcttcttgcggttcccaagccgtcgggacaacaaccacagacaagaccattaatagctgtaccgttgacaaatgtcaggcttacgtcacgagccacacaaaatggcaattcaattcaccttttgtcccacgtcggatgcaagcagagcgcaagggcaaagtgcatatcccctttccccttattaacaccacctgccgtgtaccgctggctcccgaggcccttgttaggagcggtaaacgcgaagctacactttcattgcaccctatccaccccacattgctaagttacagaacatttggagcggagcgggtctttgacgagcagtggatcaccgcccagacggaggtaacgatcccggtacctgtggagggagtggagtaccagtggggcaaccataaacctcaacgttttgtggtcgcactgacgactgaaggcaaagcacatggatggcctcatgaaattattgaatactactacggactgcatcctacgacaaccattgtcgtggtgattcgtgtctcagtggtggtgcttctgtcattcgccgcctcggtctacatgtgcgtggtagcacgaaccaaatgtctgacaccatatgcactcacgccgggagctgttgttcctgttaccattggggtgctgtgttgcgcaccgaaagcacatgcagccagtttcgcagaaggtatggcctatctgtgggataacaatcagtcgatgttctggatggagctgaccggaccattggccctccttattctggctacatgctgcgcccgatcactgctttcctgctgcaaggggtcttttttagtcgcaatgagcatcgggagtgccgttgccagtgcttacgagcacacggcaattattccgaaccaagtgggattcccgtataaggctcatgttgcgcgtgaaggttacagtcctttgaccctgcagatgcaggtgatagagaccagccttgagccaacactcaacctggagtatatcacttgcgattacaaaacaaaagttccatcaccatacgtaaagtgctgcggcacggcagaatgccgcacacaggacaagcctgagtacaaatgtgcagtgttcacaggtgtgtatccttttatgtggggaggtgcatactgtttttgtgattcggagaacacacagatgagcgaagcctacgtggagcgcgctgacgtgtgtaaacacgaccacgcagctgcctaccgtgcccacaccgcatcccttagagcaaaaattaaggtgacatacggtactgtgaaccagacagttgaggcgtatgtgaacggtgaccatgccgtaacgattgccggaacaaaatttatttttgggccagtgtcaacgccttggacaccgttcgatacaaaaattctggtttacaaaggggagttatacaatcaggacttcccacggtatggtgccgggcagcctggaagatttggggacattcagagccggacgctggatagtcgagacctatatgccaacacgggcctcaagctggcacgaccggcagccggcaacattcacgtcccctatacccagactccatctggctttaaaacatggcaaaaagacagggactcaccgcttaacgccaaggcgccttttggatgcataatccagacaaatccggtccgagccatgaactgcgccgtcggcaacatacccgtttcgatggatatcgccgacagcgccttcacaagattgaccgacgcgcctgtaatctctgagttgacgtgcactgtgtctacatgcacgcactcatcggattttggcgggatcgctgtactttcctacaaggtggaaaaatcaggcaggtgcgacatccattcacattcaaacgtcgcggtactccaggaagtttccatcgagacagaaggtcgatcagtgatccacttctcaaccgcatcagcctccccttccttcgtagtttctgtttgtagttcgcgtgctacgtgcacagcgaaatgtgaaccaccgaaagaccacgttgttacatatccagcaaatcataacggggtaactttgccagacttatctagcactgccatgacgtgggcacaacatcttgccggcggagttgggttgctgatagctctggccgtgctaattctggtaatagttacttgtgtgactttgagaaggtaa

SEQ ID NO: 10589 - DNA, 2466 bp, unidentified
  misc_feature 1..2466: note = Synthetic
  source 1..2466: mol_type = other DNA
atggacttcctaccaactcaagtgttctatggcagacgctggagaccacgaatgccgccacgcccttggagaccacgcatgcctacaatgcagagaccagaccaacaggcccgacaaatgcagcaattgattgcagcggttagcacgcttgccctgaggcagaatgcagccgcccctcagcgtggaaagaagaagcagccacgcagaaagaaaccaaaaccgcagcccgagaaaccaaagaagcaagaacagaagccgaagcaaaagaaggcccctaaacgaaagccagggagaagagaacgcatgtgcatgaagattgagcatgattgcatcttcgaggttaagcacgaaggtaaagtcacgggttacgcctgccttgtcggtgacaaggtaatgaagccagcacacgttcccggggtgatagacaatgcagatcttgcacgcctgtcgtacaagaaatccagtaagtacgatctggaatgtgcacaaatacccgtggctatgaagtcagatgcttcgaagtacacccatgagaaacccgagggtcattacaactggcactacggcgccgtccagtacacgggaggaagattcacggtgcccacaggagtgggtaagcctggcgacagcggtcggcccatctttgacaacaaagggccggttgtcgcaatagtgctgggaggagccaacgaaggtaccagaaccgccctttccgttgtgacatggaataaagacatggtcacgaagattacacctgaaggcactgtggagtgggcagcctcgacagtgacagccatgtgtcttttgacaaatatatccttcccatgtttccaaccgagctgtgcaccgtgctgctatgaaaaggggcctgagccgacgctgaggatgctggaggagaacgtaaattcagaaggatattacgacctgctgcacgctgccgtgtactgtagaaacagttcaaggtcgaagagaagcactgcaaatcattttaatgcgtataagttgacccgtccatatgtggcttactgcgcagactgcggtatgggtcattcttgccacagcccagccatgatcgaaaatattcaggcggatgcaacagatggcacgctaaaaattcagtttgcttcccaaattggcctgaccaaaacggacacgcacgatcacacaaagattagatatgctgaaggacacgacattgcagaggctgccagatcaacccttaaggtacacagtagcagtgagtgcacggtaaccggcacaatgggacactttatcctggccaaatgtccacctggcgaacgaatcagtgtctcatttgttgattcgaaaaacgaacaccggacctgccggatagcctaccaccatgaacagaggttaatagggcgagaaagattcacggtgcgaccgcatcatggaattgagctaccttgcaccacttatcaattgactaccgccgaaacctctgaagaaattgatatgcacatgccgccggacattccggatagaactatcctttcccaacaatcaggaaatgttaagataacggtgaatggacgaaccgtcaggtacagctcttcttgcggttcccaagccgtcgggacaacaaccacagacaagaccattaatagctgtaccgttgacaaatgtcaggcttacgtcacgagccacacaaaatggcaattcaattcaccttttgtcccacgtcggatgcaagcagagcgcaagggcaaagtgcatatcccctttccccttattaacaccacctgccgtgtaccgctggctcccgaggcccttgttaggagcggtaaacgcgaagctacactttcattgcaccctatccaccccacattgctaagttacagaacatttggagcggagcgggtctttgacgagcagtggatcaccgcccagacggaggtaacgatcccggtacctgtggagggagtggagtaccagtggggcaaccataaacctcaacgttttgtggtcgcactgacgactgaaggcaaagcacatggatggcctcatgaaattattgaatactactacggactgcatcctacgacaaccattgtcgtggtgattcgtgtctcagtggtggtgcttctgtcattcgccgcctcggtctacatgtgcgtggtagcacgaaccaaatgtctgacaccatatgcactcacgccgggagctgttgttcctgttaccattggggtgctgtgttgcgcaccgaaagcacatgcagccagtttcgcagaaggtatggcctatctgtgggataacaatcagtcgatgttctggatggagctgaccggaccattggccctccttattctggctacatgctgcgcccgatcactgctttcctgctgcaaggggtcttttttaagtcgcaatgagcatcgggagtgccgttgccagtgcttacgagcacacggcaattattccgaaccaagtgggattcccgtataa

SEQ ID NO: 10590 - DNA, 1842 bp, unidentified
  source 1..1842: mol_type = other DNA
  misc_feature 1..1842: note = Synthetic
aggtcaatcaccatgtccgcacaaagggaaaggatcaatgccttctacaaagacaatcctcacaataagaaccatagggtgatcctggatagagaacgcttggtcatcgaaagaccctacatcttgcttggagtcctgctggtaatgttcctgagtctaatcggactgctggccattgcagggatcaggcttcaccgggccaccgttggaacatcagagatccagagtcggctgaataccaatattgagttgaccgaatctattgatcaccaaactaaggatgtcttaactccccttttcaaaatcattggcgatgaagtcggcatcagaattccacagaaattcagtgatcttgtcaagttcatctccgataagattaaattcctcaaccctgatagagagtatgatttcagggatctccggtggtgcatgaatccccccgagagagtcaaaattaattttgatcagttttgtgagtacaaggctgcggttaagtcaattgaacatatatttgaatcaccactcaacaagtcaaaaaagctgcaatcattgactcttgggcccggaacaggctgtctaggcaggacagtaacaagagctcatttctcagaacttacactgaccttaatggacctggatctagagatgaagcacaacgtatcctcagtgtttaccgtagttgaagagggattattcggaagaacatataccgtctggagatccgatgccagggatccgagcaccgatctaggtattggccactttttaagagtcttcgagattggactggtaagagatctcgggctgggtccccctgtttttcatatgaccaactatctcacagtgaacatgagtgatgactatcggagatgtcttttagcggtaggggagttaaagttgacagccctatgcagctcatctgagactgtgacactgggcgagagaggagttccaaagagggagcctcttgtagttgtgatactcaacctagctgggcccactctagggggcgaactatacagtgtcttgcctacctctgatctcatggtggagaaactctatttatcttcacatagagggattatcaaagatgacgaggccaattgggtagtgccgtctaccgatgttcgtgatcttcaaaacaaaggagaatgtttggtggaggcatgcaagactcgacctccttcattttgcaatggcacaggatcaggcccgtggtcagaggggagaatccctgcttacggggtgatcagggtcagtcttgacttagctagtgacccgggtgtagttatcacttcagtgtttggcccactgatacctcacctatctggcatggatctttacaacaacccgttttctagagctgtatggttggctgtaccaccttatgagcagtcatttctaggaatgattaatacgattggattccctaacagagcagaggttatgccgcacattttgaccacagagatcagaggccctcggggtcgttgccatgttcccatagaattgtctcgcagggttgatgacgacatcaagattgggtccaacatggtcatattgccgacgatagacctgagatatattacagccacttatgatgtttctaggagcgagcatgctatcgtgtactatatctatgacacaggtcgctcatcatcttacttctacccagttcggctgaacttcaaaggcaatcctctctctctgaggatagagtgtttcccttggcgtcataaggtgtggtgctaccatgattgtcttatatacaacaccataacagatgaagaagtccatacgagagggctgaccggtatagaggtaacatgtaatccagtctga

SEQ ID NO: 10591 - DNA, 264 bp, unidentified
  source 1..264: mol_type = other DNA
  misc_feature 1..264: note = Synthetic
atgcatgcctgtacgccagtcaacacggagaggaattctataccagcaagatcgtaccgctcatcgagcgggcggttaaacttgaaggtctacacattgaggtcccggaattccaccaggctgtcgcagcctacaacgggtatttcaatggtactgagggccaaccaaaccaaatcgctcacgcgagtggtggacttgggctcagtggtgaggtgtttgaaaattaaccaccatggctactactcatacgcttctgtcgtttga

SEQ ID NO: 10592 - DNA, 273 bp, unidentified
  source 1..273: mol_type = other DNA
  misc_feature 1..273: note = Synthetic
atgcctcacggccatctccgacaggccctctccccgacctcctggacatgtgagggcttgttgctcctcctgggattgctggtgctcttctttcaccaccacaaccagtcggccgtggagaggcgtcgccgcgtctcgttcgtcgaggccgatcgactgccgcatgagagcgggtggtattcttccgatgacgacggagaccgggacggtgatgaggaaactggagagagccacaacagaaacagcgtgggactgtccgctgtttttagctga

SEQ ID NO: 10593 - DNA, 2013 bp, unidentified
  source 1..2013: mol_type = other DNA
  misc_feature 1..2013: note = Synthetic
atcgccatgaatccgagtacccacgtgagcagtaacggcccaacgactccccctcacgggccccacaccacgtttcttcccccgaccagcccggccccgtccaccagctccgtcgccgccgctaccttgtgcagtccgcaacgacaggccgtttcgcgttacagcggctggagcaccgagtacacccagtggcactcggacttgacaactgagctgctatggcacgcgcacccgcgtcaagtacctatggacgaagcgctggccgccgcggcggccgcctcataccaggtgaatcctcaacaccccgccaaccgttaccgtcactacgaattccagacgctcagcctcggcacctcggaggtagacgaactgctcaactgctgtgcggaagaaaccacgtgcggcggcacgcaatccaccgtactcaccaatgcgaccaacaccactagctgcggcggagccgtcgccggcagtagcaacgcaggacccgccggcgcttcggccgcctgcgacctagatgcagaactggccggcctcgaaacctcggcggccgactttgaacaactgcggcgactgtgcgcgccgctggccatcgacacgcgctgtaacctatgcgccatcatcagcatctgcctcaaacaggactgcgaccagagctggctcctcgagtacagcttgctgtgcttcaaatgcagttacgcgccccgtgcggcgctcagcacgctcatcatcatgtccgagtttacgcatctgctgcagcagcacttttccgatctgcgcatcgacgacctgttccgacaccacgttctcacggtcttcgatttccacctgcactttttcataaatcgttgctttgaaaaacaagtgggcgacgcggttgataacgagaatgtcaccctgaaccatctagccgtggtgcgggccatggtcatgggcgaagacacggtgccttacaacaagcctcggcgccacccgcaacagaagcaaaaaaacaacccttatcacgtcgaagtgccgcaagaactgatcgacaactttctagaacacagctcacctagccgcgaccgcttcgtgcagctgcttttctatatgtgggccggcaccggcgtcatgagcaccacgccactcacggaacttacgcacactaagttcgcgcgactagacgcgttatccacggcctcggaaagagaagacgcaaggatgatgatggaagaagaggaggatgaagaaggaggagaaaaaggaggagacgatccgggccgtcacaacggcggtggcaccagcggggggttcagcgagagcacgctaaaaaagaacgtgggtcccatttacctatgtcccgtacccgccttttttaccaagaaccaaactagtaccgtgtgtctgctgtgcgaactcatggcctgctcctattacgataacgtcgtcctgcgcgagctgtaccgccgcgtcgtctcgtactgtcagaacaatgtgaagatggtggaccgcattcagctggtattggccgacctgttgcgcgaatgcacgtcgccgctcggcgcggcgcacgaggacgtggcgcgctgtggactcgaagcgcccacctcgcccggaggcgactcggactatcacggcctgagcggcgtcgacggcgcactggcgcgacccgacccggtattttgccacgtcctgcgtcaggcgggcgtcacgggcatctacaagcactttttctgcgacccgcagtgcgccggcaacatccgcgtcaccaacgaggccgtgctcttcggacacctgcacccccaccacgtccaggaggtgaaactggccatctgtcacgacaattactatataagtcgacttccgcgacgtgtgtggctctgcatcacactcttcaaggcctttcagattacaaaacgcacctacaaaggcaaagtgcacctggcggactttatgcgcgatttcacgcagctgttggagaattgcgacatcaagctggtggaccccacgtacgtgatagacaagtatgtctag

SEQ ID NO: 10594 - DNA, 171 bp, unidentified
  misc_feature 1..171: note = Synthetic
  source 1..171: mol_type = other DNA
acggcccaacgactccccctcacgggccccacaccacgtttcttcccccgaccagcccggccccgtccaccagctccgtcgccgccgctaccttgtgcagtccgcaacgacaggccgtttcgcgttacagcggctggagcaccgagtacacccagtggcactcggacttga

SEQ ID NO: 10595 - DNA, 222 bp, unidentified
  misc_feature 1..222: note = Synthetic
  source 1..222: mol_type = other DNA
atgctgtccctgccgctgctcttcctgggtgaggccgggagcctggggtttgattgcacagagtctctcgttgcccgctactacccaggccccgccgcctgtctggccctgttgctcattatactatacgcctggagcttcagccattttatggactctctcaagaaccaggtgacagtcaccgccagatacttcagaagggtgcctagccagtccacctga

SEQ ID NO: 10596 - DNA, 222 bp, unidentified
  source 1..222: mol_type = other DNA
  misc_feature 1..222: note = Synthetic
atgctgtccctgccgctgctcttcctgggtgaggccgggagcctggggtttgattgcacagagtctctcgttgcccgctactacccaggccccgccgcctgtttggccctgttgctcattatactatacgcctggagcttcagccattttatggactctctcaagaaccaggtgacagtcaccgccagatacttcagaagggtgcctagccagtccacctga

SEQ ID NO: 10597 - DNA, 222 bp, unidentified; identical to SEQ ID NO: 10596
  source 1..222: mol_type = other DNA
  misc_feature 1..222: note = Synthetic

SEQ ID NO: 10598 - DNA, 1599 bp, unidentified
  source 1..1599: mol_type = other DNA
  misc_feature 1..1599: note = Synthetic
atgagtgatatatttgacgaggcggctagtttcagaagctatcaatcgaaactcggtcgagatgggcgggcaagtgcggcaacagctactttgactactaagataagaatttttgtaccagcaactaatagcccagaactgagatgggagttgactttgttcgctctcgatgtaatcagatcaccaagtgcagcagaatcaatgaagattggtgctgctttcactctgatatcaatgtactcagaaagacctggcgctttaatcaggagcctccttaacgacccagacatagaagctgtcatcatagatgtgggttccatgctcaacgggatccctgtgatggaaaggagaggggacaaagcacaagaggagatggaaggtttgatgaggattctgaagactgcacgtgaaagcagcaagggaaagaccccgtttgtagatagcagagcctatggactgaggatcaccgatatgagcactcttgtgtcagccgtcattaccatcgaagcccaaatttggatcctgattgcaaaggcagtgactgctccagatacagccgaggaaagtgagaccagaagatgggcaaagtatgttcaacaaaagagggtcaatccattctttgccttaacccagcaatggctgacagagatgaggaatctcctctcacaaagtctctcagtcagaaaattcatggtggaaattctgatggaggtaaagaaaggcggatcagctaaaggaagggccgttgagataatatctgacataggaaattatgtcgaggaaacaggaatggccggcttctttgcgactatcagattcggtcttgaaacaagataccctgcacttgccctcaatgagttccagagtgatctcaataccatcaaagggctgatgctgctctacagagaaatagggcctcgagcgccatacatggtgctccttgaggaatctattcagacaaagtttgcaccaggtggttatccactcctgtggagctttgctatgggtgttgcaaccactatcgaccgatccatgggtgctctcaacatcaatcgtggttatcttgaacctatgtatttcagacttggacagaaatcagcaagacatcatgctggcgggattgatcaaaacatggctaataaacttggattaaattctgatcaagttgcagaactggctgctgcagttcaagaaacatcagttgggagacaggacaacaacatgcaggcaagagaagccaaatttgcagctgggggagttcttgtggggggtggcgaacaagatattgatgaggaagaagagcctatcgaacatagtggtaggcagtcagtgactttcaagagagaaatgagcatgtcatctctcgcagacagtgtcccaagcagttcagtgagtacatccggaggaacgagattgacaaattctctattgaatctcagatccagattagctgcaaaggctatcaaagagagtactgcacagagctcatcggaaagaaacccacctaataaccgccctcaggcagactcaggaaggaaagatgaccaggaacccaaacctgcccaaaatgatttggactttgttagagcagacgtgtga

SEQ ID NO: 10599 - DNA, 1065 bp, unidentified
  misc_feature 1..1065: note = Synthetic
  source 1..1065: mol_type = other DNA
ctgaaacctgttctccatcacagagctggtatggcctccagtcgtgtagacaccattaatttacggatctggctggtctctataatctgtgcagccttgtcattcataaacgtcacggtctatctgatagccataaactttccaaatttaggatttccgtgcgcctactttgaaattaatgacctcaaagcggttaatctctccgctaacaatcaaatatatcagatgacgcatcaactttacataaaccccgtgcagattatatgctacgtactgataatggctatgttattcctcctgattattatttattacattgtctgctgtgcaaaagtgttctcctctaacaaaacatctaacgttaaccaaacaacgagggatattacctggatgggggacacgtcatcctgctttcaattcatcttaatcatggatacatttcaattattcgtcaccgccttgtctttcagactggtagccctaggcgcatttgcctattgcatcttcttcgtgtgtttcaccacctttaacgttacgctgataacgcaatttcaatcagcggataagtcatttttcgcctttcagaaaattcatcctaacctaaaggggaccgtacaattcaagaccgttgttatcaatctaaccgaactcatgctaggttactctacaatgtttctcggcattactacttgcctgggcgtcggaaatagtatctacatacgttccataaccgttgcttactcttccatcaatacctttcttgtcatggcttgcatatatagtatagtaatagaagctgtcctggttcgctacgttaaacccttgtttggctattacgtcggtatgttttgtggcgccgtaggcctatcttttcctattctccagtacgaaactttctttgaatccgagtggagcacaggacttattatcaatttagcggtcatcgccataatttcgatcggttttataatttgtcgacttgtacgctacctagttaaaaagaagcgtcggtacaagcaactagttaatactgaaagctcgagcctaatggatgaaaacgagtga

SEQ ID NO: 10600 - DNA, 42 bp, unidentified; identical to SEQ ID NO: 1180
  source 1..42: mol_type = other DNA
  misc_feature 1..42: note = Synthetic

SEQ ID NO: 10601 - DNA, 825 bp, unidentified
  source 1..825: mol_type = other DNA
  misc_feature 1..825: note = Synthetic
atgaaggcacttagcactttagtttttttgtccttgattggcattgtttttagtaatcctattcctagagttagctttattaaaccagttaatgttactgaagggagcaatgtgacactggtaggtgtagagggtgctaaaaacaccacctggacaaaatatcaccttaatgggtggaaagatatctgcaattggagtgtgacagtttatacatgcgagggagttaatcttaccattgtcaatgcaacctcagctcaaaatggtagaattcaagggcaaagtgttagtgattctgaggggtattatacccaacatacttttatctatgacattaaggtcataccattgccaacacccagcccacctagcactactcaaaccactacatcaactcagcccaccgccaccacaacagcagaggcatttttgttgctgccaccatctagcagtcccactgctagtaccaataagcagactactaaatttttgtccactactgaaagccacaccacagctaccttgagagccttctctagcaccgctaatcttacctcgctttcctatacattaatcagttctgttactacctctaccccagcttctcttcccactcccctgaagcaaaccgaaggcggtttgcaatggcagatcaccctactcattgtgatcggggtggtcatcctagcgatgctgctctacttcatcttctgccgccgcatccccaacgcgaaaccggtctacaagcccatcgttatcgggcagccggagccgcttcaggtggagggaggtctaaggaatcttctcttctcttttacagtatggtga

SEQ ID NO: 10602 - DNA, 117 bp, unidentified; identical to SEQ ID NO: 1183
  misc_feature 1..117: note = Synthetic
  source 1..117: mol_type = other DNA

SEQ ID NO: 10603 - DNA, 369 bp, unidentified
  source 1..369: mol_type = other DNA
  misc_feature 1..369: note = Synthetic
attctccggggaggcaagcagttggatacggcggggcggggcacgacgtgcacggagaattcgggcgggccccctccccccacccccacgcaccacgatgcgtctaatcttagcgctcgtggcctgcttgttggcggcgccgatgccgttatcgggtcgttcgacaagcaccccaaacacaccgtccgcactcggctcgacgagtgcgacaccaagctcggaagacgctgcggcttcgagcacaacgacaagcactacaagcacactcacttcgtccacaagtgtggacaccactactacctcgggcgctacgacgtccaacagcacttctgcagcaagtgtgagctcttccacatccgcaaccactga

SEQ ID NO: 10604 - DNA, 42 bp, unidentified; identical to SEQ ID NO: 1186
  source 1..42: mol_type = other DNA
  misc_feature 1..42: note = Synthetic

SEQ ID NO: 10605 - DNA, 1905 bp, unidentified
  misc_feature 1..1905: note = Synthetic
  source 1..1905: mol_type = other DNA
attttgcccgcgaattttgaacgagcagcagccatgccggggttctacgagatcgtgctgaaggtgcccagcgacctggacgagcacctgcccggcatttctgactcttttgtgagctgggtggccgagaaggaatgggagctgccgccggattctgacatggacttgaatctgattgagcaggcacccctgaccgtggccgaaaagctgcaacgcgagttcctggtcgagtggcgccgcgtgagtaaggccccggaggccctcttctttgtccagttcgagaagggggacagctacttccacctgcacatcctggtggagaccgtgggcgtcaaatccatggtggtgggccgctacgtgagccagattaaagagaagctggtgacccgcatctaccgcggggtcgagccgcagcttccgaactggttcgcggtgaccaagacgcgtaatggcgccggaggcgggaacaaggtggtggacgactgctacatccccaactacctgctccccaagacccagcccgagctccagtgggcgtggactaacatggaccagtatataagcgcctgtttgaatctcgcggagcgtaaacggctggtggcgcagcatctgacgcacgtgtcgcagacgcaggagcagaacaaggaaaaccagaaccccaattctgacgcgccggtcatcaggtcaaaaacctccgccaggtacatggagctggtcgggtggctggtggaccgcgggatcacgtcagaaaagcaatggatccaggaggaccaggcgtcctacatctccttcaacgccgcctccaactcgcggtcacaaatcaaggccgcgctggacaatgcctccaaaatcatgagcctgacaaagacggctccggactacctggtgggccagaacccgccggaggacatttccagcaaccgcatctaccgaatcctcgagatgaacgggtacgatccgcagtacgcggcctccgtcttcctgggctgggcgcaaaagaagttcgggaagaggaacaccatctggctctttgggccggccacgacgggtaaaaccaacatcgcggaagccatcgcccacgccgtgcccttctacggctgcgtgaactggaccaatgagaactttccgttcaacgattgcgtcgacaagatggtgatctggtgggaggagggcaagatgacggccaaggtcgtagagagcgccaaggccatcctgggcggaagcaaggtgcgcgtggaccaaaagtgcaagtcatcggcccagatcgacccaactcccgtgatcgtcacctccaacaccaacatgtgcgcggtcatcgacggaaactcgaccaccttcgagcaccaacaaccactccaggaccggatgttcaagttcgagctcaccaagcgcctggagcacgactttggcaaggtcaccaagcaggaagtcaaagactttttccggtgggcgtcagatcacgtgaccgaggtgactcacgagttttacgtcagaaagggtggagctagaaagaggcccgcccccaatgacgcagatataagtgagcccaagcgggcctgtccgtcagttgcgcagccatcgacgtcagacgcggaagctccggtggactacgcggacaggtaccaaaacaaatgttctcgtcacgtgggtatgaatctgatgctttttccctgccggcaatgcgagagaatgaatcagaatgtggacatttgcttcacgcacggggtcatggactgtgccgagtgcttccccgtgtcagaatctcaacccgtgtctgtcgtcagaaagcggacgtatcagaaactgtgtccgattcatcacatcatggggagggcgcccgaggtggcctgctcggcctgcgaactggccaatgtggacttggatgactgtgacatggaacaataa

SEQ ID NO: 10606 - DNA, 1005 bp, unidentified
  misc_feature 1..1005: note = Synthetic
  source 1..1005: mol_type = other DNA
atgggcgggtcggtgagcctgccctcgcgggacttgccgccgccggtgcgcacgccggagatgaacatcgtgcccgagcgcgacctcgcggacacgatggcgcgcctctccaccgcagacccgccgcagccgctgggcgtcggcgacgacgcgcgcatggccgtgctgaagacgaccttccccgagttcgcgatatcgcggcccgcgacgggcatgctcgccgcgcagcgaatcaggtacgacggcgacccgcgcgtctgctgcggcgggttcgggatctcgcattactgggagaagggggcgcgccggtcgaacgtcgcgttcgagggcgccgcgctgcacacctgcgaccccacgcgcttcgacgagggcgcgtgcgacgcgctgctcttccgcgagtgcgccgccggcagcgtcgacgcggacttctgcgcgcactggatcaacgcggccgtgacgcggcgcacgaacaaacaggcgcgagataaactaaacaacatgttcgtgagcgactgcaagaacgacgcctcgcggccgcactgcgtggcctggatccgcgcgatgcgcagcacgcacaagaccgcggacgacacgctcatcgacaacgtgctctcagtgcagagtcccgagttcaagagcaaacacatgcgctgcagctacccctcgccggccacgctcgccatggccgcaaacgtagacgagccgcgcgagtgctgggaccccgagtgcgtggccgggaacgtggacttcatgctaagcgataactacacgaacctgggcttgtgtcgactctcgcgctgctccgtcggcgtcacacacctgcggatggacgcgcggtcgcggctgcgcatgcggtgcgccggcgcgcttgccgggctcacgaaggcgcccgtgaaccagaccgtcgtcgtcggcgacaacctcgcgcgcgccttcgagccgcgcgtggaaacgctcggcgtgttggcgctgtgcgtggtgtatctgctaattgtctggctctaa

SEQ ID NO: 10607 - DNA, 192 bp, unidentified
  misc_feature 1..192: note = Synthetic
  source 1..192: mol_type = other DNA
atgattgttatcggtgttataatattggcagcgttgtttatgtactatgccaagcgtatgttgttcacatccaccaatgataaaatcaaacttattttagccaataaggaaaacgtccattggactacttacatggacacattctttagaacttctccgatggttattgctaccacggatatgcaaaactga

SEQ ID NO: 10608 - DNA, 192 bp, unidentified
  misc_feature 1..192: note = Synthetic
  source 1..192: mol_type = other DNA
atgattgttatcggtgttataatattggcagcgttgtttatgtactatgccaagcgtatgctgttcacgtccaccaatgataaaatcaaacttattttagccaataaggaaaacgtccattggactacttacatggacacattctttagaacttctccaatggttattgctaccacggatatacaaaactga

SEQ ID NO: 10609 - DNA, 192 bp, unidentified
  misc_feature 1..192: note = Synthetic
  source 1..192: mol_type = other DNA
atgattgttatcggtgttataatattggcagcgttgtttatgtactatgccaagcgtatgctgttcacatccaccaatgataaaatcaaacttattttagccaataaggaaaacgtccattggactacttacatggacacattctttagaacttctccgatgattattgctaccacggatatacaaaactga

SEQ ID NO: 10610 - DNA, 54 bp, unidentified; identical to SEQ ID NO: 1196
  source 1..54: mol_type = other DNA
  misc_feature 1..54: note = Synthetic

SEQ ID NO: 10611 - DNA, 183 bp, unidentified
  source 1..183: mol_type = other DNA
  misc_feature 1..183: note = Synthetic
atcggtgttataatattggcagcgttgtttatgtactatgccaagcgtatgctattcacatccaccaatgataaaatcaaacttattttagcaaataaggaaaacgtccattggactacttacatggacacattctttagaacttctccgatggttatcgctaccacggatatacaaaactga

SEQ ID NO: 10612 - DNA, 27 bp, unidentified
  misc_feature 1..27: note = Synthetic
  source 1..27: mol_type = other DNA
gtggccgagaaggtgactgcgcagtag

SEQ ID NO: 10613 - DNA, 12 bp, unidentified
  misc_feature 1..12: note = Synthetic
  source 1..12: mol_type = other DNA
gtgaaaatttaa

SEQ ID NO: 10614 - DNA, 2376 bp, unidentified
  misc_feature 1..2376: note = Synthetic
  source 1..2376: mol_type = other DNA
atggcgcgcgcggtcgacgggaacgaggtcatcttcgtgctgaagacgctggccgtgcccgccgactgccgccgccgcgaggacccgcgctttgtcgaggccttcgcgcccgacgagcttgacgcgtacatccgcgagcacccccgctgcacgctcttcgagacgctgcgcgacgaggaggcgtactccgtggtgcgcgtcttcttcgacgtggaccttggcgcgccgctgcccgcgcacgagctgctgcccgccttcgacggcttcatccgcgcgctctcacgcttcgtggccaacttcgcggtcgacgagtgcgccgcgcccgcgtcgcgcgccgcgctggcgcgcgcgctgcgcgcggacttctcgctcacgcgctccaccaaccctggcaagaccagcttccacctggtcttccgcaacctctataccacgctcgacacactggtggccatgaagcgcccgctgctggcgctggcgcgccgcgctgacaacccgctgctgcgagcgctggaccccgccgtcttccggcgcggtgcgtcgctgcgcgtggtgggcacgcgcaagacgcccgacagcccgcacgtgcacgcgcgcacgccgccgcacacgcgcatccaggactacctgttcaccttcgtggacttctcggagaagagttgctatttttctctgcgtccacgccgcgacgcgcccgagcccattgcctgggaccaccagcagctggtcccgttcgcggacgccatgcgcaaggtgtgccaggtgctgggcaacgagatcctgaacctgcacgagttcacggaggacaactttaccaccacgccgctgctgctggactacgtcacgccctgcgcgctctgccgcaagagcgcgcacaagcacccgcaccacctggcgctgggcaacggcgcgctgcgcatcttcaagtcgggcaacccgcacagttgccgcctcaaggtgatcccgctggagggcaaccggctcttcaccatcgcgcagcgcatcctggatgccaacgtgattaacctcacggagcgcggggactacatcgtgtggctgcgcaactgctggcgcttcagcggcgaggagtcggtcatcaccaagctggtgctgcacatgcgcgacgagctggcgcctgagttcgcactgccactgctctgcccgcgcaaccgccgcgtcatcgagcacaacctgcgcgacatgctggtggacgccgtggagaccgacgtcttccccgagaagctgccgttcgccgacggcgtgctggacatcgcggacggcagcttccacaccggcgcggacgccaaggacttcatgtgcaccgtctccaccggctaccggttggagcgcgacgcgcgcgcgcgcgacgcgctggcgccggcgcgcgccgagctggagcgcgtgctggacgacatccagccgcgcagccccggcaatgccgagaaccgcgcgctctacgagaaggtgctggccagctgcctctgcggcgcaaccaagccctgcatcttcttcttcttcggcgagacggcgaccggcaagtccaccacgaagaagttgctgcagtcggcactgcacgggctgttcctggaaaccggacagacaatcctcaccgacctcatggacaagggccccaacccgttcctggccaacatgcacctgaagcgcgccgtcttctgcagcgagctgcccgactttagctgcagcggcgccaagaagatccgtgccgacaacgtgaagcgccttaccgagccctgcctggtggggcgcccgtgctactccaaccgcatcaacaaccgcaaccatgccaccatcatcatcgacaccaactaccgcccggtctttgacaaggtagacaacgcgctcatgcgccgcgtggggctggtccgcttccgcacgcacttctccaaccgcggcgcgcccgctagccggctctacgacaccgtgaagccgctggacgccgcgctggaccgcaagatccagagtcactactttcgcttcgcgttcctggagttgctgctggagtggtaccagcggcaccacgcggccgcgctggagctggagccgacgcccgacctcatccccgacttttgcttccagcgaaggctggacgccgtgctgctgccgagcgacagcacgcaccgcaggctcatgccacagctggccaagctgggctacgtgctggcgggcgacgacgcgctgggcatgccgggcgcgctcttccagcagcggctggccgagcacttcaacgtgcgcgtcttcgggcaggagatcgagagcttcgtgcagaagaacaagaagtacgtgagcgtgagcgaggactacgtggagtacatcttcgtggcggacctggagaaggcaaaggcagagacgcagtga

SEQ ID NO: 10615 - DNA, 1833 bp, unidentified
  misc_feature 1..1833: note = Synthetic
  source 1..1833: mol_type = other DNA
atggctaccttctatgaagtcattgttcgcgtcccatttgacgtggaggaacatctgcctggaatttctgacagctttgtggactgggtaactggtcaaatttgggagctgcctccagagtcagatttaaatttgactctggttgaacagcctcagttgacggtggctgatagaattcgccgcgtgttcctgtacgagtggaacaaattttccaagcaggagtccaaattctttgtgcagtttgaaaagggatctgaatattttcatctgcacacgcttgtggagacctccggcatctcttccatggtcctcggccgctacgtgagtcagattcgcgcccagctggtgaaagtggtcttccagggaattgaaccccagatcaacgactgggtcgccatcaccaaggtaaagaagggcggagccaataaggtggtggattctgggtatattcccgcctacctgctgccgaaggtccaaccggagcttcagtgggcgtggacaaacctggacgagtataaattggccgccctgaatctggaggagcgcaaacggctcgtcgcgcagtttctggcagaatcctcgcagcgctcgcaggaggcggcttcgcagcgtgagttctcggctgacccggtcatcaaaagcaagacttcccagaaatacatggcgctcgtcaactggctcgtggagcacggcatcacttccgagaagcagtggatccaggaaaatcaggagagctacctctccttcaactccaccggcaactctcggagccagatcaaggccgcgctcgacaacgcgaccaaaattatgagtctgacaaaaagcgcggtggactacctcgtggggagctccgttcccgaggacatttcaaaaaacagaatctggcaaatttttgagatgaatggctacgacccggcctacgcgggatccatcctctacggctggtgtcagcgctccttcaacaagaggaacaccgtctggctctacggacccgccacgaccggcaagaccaacatcgcggaggccatcgcccacactgtgcccttttacggctgcgtgaactggaccaatgaaaactttccctttaatgactgtgtggacaaaatgctcatttggtgggaggagggaaagatgaccaacaaggtggttgaatccgccaaggccatcctggggggctcaaaggtgcgggtcgatcagaaatgtaaatcctctgttcaaattgattctacccctgtcattgtaacttccaatacaaacatgtgtgtggtggtggatgggaattccacgacctttgaacaccagcagccgctggaggaccgcatgttcaaatttgaactgactaagcggctcccgccagattttggcaagattactaagcaggaagtcaaggacttttttgcttgggcaaaggtcaatcaggtgccggtgactcacgagtttaaagttcccagggaattggcgggaactaaaggggcggagaaatctctaaaacgcccactgggtgacgtcaccaatactagctataaaagtctggagaagcgggccaggctctcatttgttcccgagacgcctcgcagttcagacgtgactgttgatcccgctcctctgcgaccgctcaattggaattcaaggtatgattgcaaatgtgactatcatgctcaatttgacaacatttctaacaaatgtgatgaatgtgaatatttgaatcggggcaaaaatggatgtatctgtcacaatgtaactcactgtcaaatttgtcatgggattcccccctgggaaaaggaaaacttgtcagattttggggattttgacgatgccaataaagaacagtaa

SEQ ID NO: 10616 - DNA, 18 bp, unidentified
  misc_feature 1..18: note = Synthetic
  source 1..18: mol_type = other DNA
atggaacaggatatgtaa

SEQ ID NO: 10617 - DNA, 426 bp, unidentified
  misc_feature 1..426: note = Synthetic
  source 1..426: mol_type = other DNA
atgtccggaaacagctccatcatgacacgatccagaacacgattagcgttatctcgccatcatccgtaccaaccgccggccaccttacctcgctgtgaggagaccgagagccgcgcttctctggtggaggatcatccggtgctgcctgattgcgataccctgtccatgcacaatataactgtgattccaatcaccgaggacagccctcagctgttgaactgtgaggtgcagatgcaggagtgcccggagggtttcatctccttgaccgacccgagactgtctcgctctgaaactgtgtggaatgtggagatcaaaaccatgtccattaccaatagcattcagatgtttaaggctgtgcgtggggagaggatagtgtattccatgagatgggagggtggagggaaaataactactcgaatcctgtga

SEQ ID NO: 10618 - DNA, 900 bp, unidentified
  misc_feature 1..900: note = Synthetic
  source 1..900: mol_type = other DNA
atgtccggaaacagctccatcatgacacgatccagaacacgattagcgttatctcgccatcatccgtaccaaccgccggccaccttacctcgctgtgaggagaccgagagccgcgcttctctggtggaggatcatccggtgctgcctgattgcgataccctgtccatgcacaatgtaagttccgtgcgaggattgccctgttcggccgggttcactgtcctgcaagagttccctgtgccctgggatatggtcctgacccccgaggaattgagagtgctgaagacatgcatgagcgtgtgcctgtgctgtgccaacatagacttgtttagttcccagttgatccacggtcgcgagcggtgggtgatccactgccattgccagaacccggggtccctgcgctgcatggcgggcgggacggtacttgccatctggttccgcagaattatccagggctgcatgttcaaccagcgggtgatgtggtaccgggaggtggtgaacctgcacatgcccaaggagatcatgtacatgggcagtgtgttctggaggggacgccacctgatttacatcaggatctggtacgatggacatgtgggcagcatagttccacaaatgagttttggctggagcacgttgaactatggactgttgaacaacttggtggtgctgtgctgcacgtactgctccgacctgagtgagatccgcatccgctgctgcgcccgccgtaccaggcgactgatgctcagggccattggcatcatgcgcagggagtccctggacccggaccccttgagtagcagcttgacggagcggcgcagacagcgactgctgcggggcctgatgcgccacaaccgcccgatcccgtttgcggattatgattctcatcgctcttattccagataa

SEQ ID NO: 10619 - DNA, 432 bp, unidentified
  misc_feature 1..432: note = Synthetic
  source 1..432: mol_type = other DNA
acgaaaatgtcaggaaacagctccatcatgacacgatccagaacacgattagcgtcatcccgccatcatccgtaccaaccgccggcccccttacctcgctgtgaggagaccgagacccgcgcttctctggtggaggatcatccggtgctgcctgattgcgataccctgtccatgcacaatataactgtgatcccgaccaccgaggacagccctcagctactgaactttgaggtgcagatgcaggagtgcccggagggtttcatctccctgaccgacccgagactggctcgctctgaaactgtgtggaatgtggagaccaaaaccatgtccattaccaatggcattcagatgtttaaggctgtgcgtggggagagggtggtgtattccatgagttgggagggaggagggaaaataactactcgaattctgtga

SEQ ID NO: 10620 - DNA, 906 bp, unidentified
  source 1..906: mol_type = other DNA
  misc_feature 1..906: note = Synthetic
acgaaaatgtcaggaaacagctccatcatgacacgatccagaacacgattagcgtcatcccgccatcatccgtaccaaccgccggcccccttacctcgctgtgaggagaccgagacccgcgcttctctggtggaggatcatccggtgctgcctgattgcgataccctgtccatgcacaatgtaagttgtgtgcgagggctgccctgttctgccgggttcactgtcctgcaagagttccccgtgccctgggacatggtcctgacccccgaggaactgagagtgctgaagacatgcatgagcgtgtgcctgtgctgtgccaacatagacttgttcagctcccagttaatccacggccgtgagcggtgggtgctccactgccattgccaggacccggggtccctgcgctgcatggcgggcggggcggtgctggccatctggttccgcaggattatccagggctgcatgttcaaccagcgggtgatgtggtaccgggaggtggtgaacctgcacatgcccaaggagatcatgtacatgggcagtgtgttctggagggggcgccacctgatttacatcaggatctggtacgatggacatgtgggcagcatagttccacagatgagttttggctggagcacgttgaactatggactgttgaacaacttggtagtgctgtgctgcacgtactgctccgacctgagtgagatccgcatccgctgctgcgcccgccgcaccaggcgactgatgctcagggccatcggcatcatgcgcagggagtccctggacccagaccccttgagcagcagcttgacggagcggcgcagacagcgactgctgcggggcctgatgcgccacaaccgcccgatcccgttcgcggattatgactctcaccgctcttcttccagataa

SEQ ID NO: 10621 - DNA, 78 bp, unidentified; identical to SEQ ID NO: 1217
  source 1..78: mol_type = other DNA
  misc_feature 1..78: note = Synthetic

SEQ ID NO: 10622 - DNA, 78 bp, unidentified; identical to SEQ ID NO: 1217
  misc_feature 1..78: note = Synthetic
  source 1..78: mol_type = other DNA

SEQ ID NO: 10623 - DNA, 78 bp, unidentified; identical to SEQ ID NO: 1217
  source 1..78: mol_type = other DNA
  misc_feature 1..78: note = Synthetic

SEQ ID NO: 10624 - DNA, 522 bp, unidentified
  misc_feature 1..522: note = Synthetic
  source 1..522: mol_type = other DNA
aagtcaaacatggcctcgaatctttacaagagatcaaaaacaaccctccgtcttcccaagatgtcaatcttgccagggagatttacgaatccattagacaaacaggaacatcttcagtgcaaggaggagccattgcgggagataatattacgtcagggggtaacaatgactcaatgtatagccaaggaccaagtcctcctatttcaagtgttaacaagaatatcgaaggacctactggattcgatcattcaggactatgggatccagagggtaacctctgcatgctattcgaaagcgatgatgatgaaaaccattattcagagattaatggccggtcttccgctatcgaaggactggatgaacaggataatgagaactcaattattaaacaaccaggaaatcagtgtactgagggagtgtctaagactgattcatctcttagttcccaggaaactacactatctgttgggggatctgatatacctggggcaggaatatcaacctgtgcctctttggatataa

SEQ ID NO: 10625 - DNA, 522 bp, unidentified; identical to SEQ ID NO: 10624
  misc_feature 1..522: note = Synthetic
  source 1..522: mol_type = other DNA

SEQ ID NO: 10626 - DNA, 24 bp, unidentified
  misc_feature 1..24: note = Synthetic
  source 1..24: mol_type = other DNA
atgacagacatcagagaagcttaa

SEQ ID NO: 10627 - DNA, 816 bp, unidentified
  misc_feature 1..816: note = Synthetic
  source 1..816: mol_type = other DNA
attatgaattgtttccaagaaaaacaattttcaagagaaaatttattaaaaatgccgtttagaatggttttaacgggaggatctggatctggaaaaactatctatttactatctctgttttctacactagttaaaaaatataaacatatattcttgtttacacccgtttataacccagattatgatggatacatttggccaaatcatattaatttcgttagtagtcaggaatctctagaatataatctgatacgaactaaaagtaacatagaaaaatgtattgctgtcgcacaaaatcataaaaaatcagcacactttttacttatttttgatgatgtaggtgataaactatcaaaatgcaatactctaatagaattcttaaactttggaaggcatttaaacacgtctattattctactatgccaaacttatagacacgtaccaatattaggacgggctaacattacgcatttttgtagttttaacatttccatctcagacgcggaaaatatgctacgatcgatgcctgtaaaggggaaacgaaaggatatattaaacatgttgaatatgatacagacagctagatccaataatcgattggctattattatcgaagactccgtattttgtgaaggtgaattacgtatatgtaccgataccgctgataaggacgtcatagaacaaaagttaaacatcgatattttagtaaatcaatattcgcacatgaaaaagaatctaaacgctatattagaaagtaaaaaaacaaaattgtgcaatagcgatcaatcatcgtcgtcaaaaaatgtatcatcataa

SEQ ID NO: 10628 - DNA, 816 bp, unidentified
  misc_feature 1..816: note = Synthetic
  source 1..816: mol_type = other DNA
attatgaattgtttccaagaaaaacaatttttaagagaaaatttattaaaaatgccgtttagaatggttttaacgggaggatctggatctggaaaaactatctatttactatctctgttttctacactagttaaaaaatataaacatatattcttgtttacacccgtttataacccagattatgatgggtacatttggccaaatcatattaatttcgttagtagtcaggaatctctagaatataatctaatacgaactaaaagtaacatagaaaaatgtattactgtcgcacaaaatcataaaaaatcagcacactttttacttatttttgatgatgtaggtgataaactatcaaaatgcaatactctaatagaattcttaaactttggaaggcatttgaacacgtctattattctactatgccaaacttataggcatgtaccaatattaggacgggctaacattacgcatttttgtagttttaacatttccatctcagacgcggaaaatatgctacgatcgatgcctgtaaagggtaaacgaaaggatatattaaacatgttgaatatgatacagacggttagatccaataatcgattggctattattatcgaagactccgtattttgtgaaggtgaattacgtatatgtaccgataccgccgataaggacgttatagaacaaaagttaaacatagatattttagtaaatcaatattctcatatgaaaaagaacctaaacactatattagaaagtacaaaaacaaaattgtgtaatagcgatcaatcatcatcgtcaaaaaatgtatcatcataa

SEQ ID NO: 10629 - DNA, 36 bp, unidentified; identical to SEQ ID NO: 1225
  misc_feature 1..36: note = Synthetic
  source 1..36: mol_type = other DNA

SEQ ID NO: 10630 - DNA, 1269 bp, unidentified
  source 1..1269: mol_type = other DNA
  misc_feature 1..1269: note = Synthetic
atggctcctacagttaagagaatcattaacgactcaataattcagcctaaactaccggccaatgaggatccggtagaatatccagctgattacttcaaaaataataccaacatagtattatatgtgagcactaaagtagccctaaatgatttaagggcctatgtctaccagggaatcaaatccggtaatccatcaatactccacataaatgcttatctttatgccgcactaaagggagtagagggaacattagacagagactgggttagctttggaagaacaatcggaaaaagggaggagaatgtcaaaatcttcgacctggtcaaagttgaagaactgaagacagctcttcctgacggaaaatcagatccagaccgatcagccgaagatgataaatggcttcctatttacatcctaggcctctatcgagtaggtagatccaaagtgacagattacagaaagaaactcctggatggtctagaaaatcagtgcaaagtggcatcaaccagatttgaaagcctggttgaagatggtcttgacttcttcgacatctgggaaaatgatcccaatttcactaaaatagttgctgcagtggacatgttcttccacatgttcaagaagcatgaacgtgctccgatcagatacggaaccatagtctcacgattcaaagactgtgcggcacttgctacatttggacatctcagcaaagtcagcggactttcaattgaggacctaacaacatgggttctgaatagagaagtcgcagatgaactatgccaaatgatgtacccaggccaagaaattgataaggcggattcatacatgccatatatgattgactttgggttatcccaaaaatctccgtattcatcagtgaagaatccagcctttcacttctggggtcaactggctgcactcttgctaagatcgactcgggcaaaaaatgctaggcaacctgatgacattgagtacacttcactgacctgtgcaagtttactcctgtcatttgcagttggatcttctgcagacattgagcaacaattctacatcggggaagacaaatacacaacagagaaggatgacggtctcaagaaatccgaagtcccaccgaaaggaagaaatgttgtagactggcttggttggtacgatgacaacggaggaaaacccacacctgatatgctcaacttcgcacgaagagcagtcagctctttgcagtcacttcgtgagaaaacaatcggcaaatacgctaaagcagaatttgataaatga

SEQ ID NO: 10631 - DNA, 1293 bp, unidentified
  source 1..1293: mol_type = other DNA
  misc_feature 1..1293: note = Synthetic
acgaacactttaacagaaatcaaaatgagttctcaagtattctgcatttctacaggtcaaacagtctccgtatgccttccagcaaatgaagacccagtagagtttccaggggcgttcttcactccaaatgctaggaaaccgacggtgtacataaagaaggagacagatctgagtcttttgaggagtcatgtttatgacgggattaaggatggttctgtgacagtgtcccagataaattcttatctatacatggttttgaaagatatccgggagaaaccagataaaaattggacttctttcggagtcgaattgggaaaaaagaatgagccaatgggaattttcgatctgttgaatgttgaagatgttaaggggaaagaattggacaaaaaagggcaagacacccgactgcccggagatgatctatggcttccaacgctgatcctcggtctttatcgcgtgtccagggcgacacaggtcgaatacaagaagactctgatgaccaatctatatgctcagtgtaaattgcgcacgaaggatgcagaggagattgtggatgaaacagcagaattcttcaatgcttgggcaaatgactccaacttcacaaaaatcgtagctgctgtggatatgtacttccaccacttcaagaagagtgatcatgctcctattcgtttcggaacaattgtgtctagattcaaagactgtgcagcattgtccactctgtcgcacctccaaaaggtcacagggctccccattgaggaggtcttcacctgggttttcaataaatcagtacaggatgatttgttgcggatgatgactcctggccaggaaattgaccaagctgattcctatatgccctatctgatcgacatgggcttgtccacgaagtctccttactcttcaacaaaaaatcccagtttccatttctgggggcaactgaccgcattcttggtaaaatccgcaagagcaaagaatgcgttagtcccagttgacatcgcataccatgaactgaccactgctgcactgctttttgcctatgcaattggcagatcgtctgagctggagcagagattcgtgcttaacgggaagaagttcaccaaggagaaggactctcgagatgacaatgacactactccgccatcggagagaaatgttgttgtttggctggcctggtgggaggacattaagcatgaaattactccggacatgaaggcctttgccaagagagcagtggaaagggtaggagatattcgagtgaactcagttgcagagtatgccaggaaactctttgcatga

SEQ ID NO: 10632 - DNA, 1332 bp, unidentified
  source 1..1332: mol_type = other DNA
  misc_feature 1..1332: note = Synthetic
acgaagacaaacaaaccattattatcattaaaaggctcaggagaaactttaacagtaatcaaaatgtctgttacagtcaagagaatcattgacaacacagtcatagttccaaaacttcctgcaaatgaggatccagtggaatacccggcagattacttcagaaaatcaaaggagattcctctttacatcaatactacaaaaagtttgtcagatctaagaggatatgtctaccaaggcctcaaatccggaaatgtatcaatcatacatgtcaacagctacttgtatggagcattaaaggacatccggggtaagttggataaagattggtcaagtttcggaataaacatcgggaaagcaggggatacaatcggaatatttgaccttgtatccttgaaagccctggacggcgtacttccagatggagtatcggatgcttccagaaccagcgcagatgacaaatggttgcctttgtatctacttggcttatacagagtgggcagaacacaaatgcctgaatacagaaaaaagctcatggatgggctgacaaatcaatgcaaaatgatcaatgaacagtttgaacctcttgtgccagaaggtcgtgacatttttgatgtgtggggaaatgacagtaattacacaaaaattgtcgctgcagtggacatgttcttccacatgttcaaaaaacatgaatgtgcctcgttcagatacggaactattgtttccagattcaaagattgtgctgcattggcaacatttggacacctctgcaaaataaccggaatgtctacagaagatgtaacgacctggatcttgaaccgagaagttgcagatgaaatggtccaaatgatgcttccaggccaagaaattgacaaggccgattcatacatgccttatttgatcgactttggattgtcttctaagtctccatattcttccgtcaaaaaccctgccttccacttctgggggcaattgacagctcttctgctcagatccaccagagcaaggaatgcccgacagcctgatgacattgagtatacatctcttactacagcaggtttgttgtacgcttatgcagtaggatcctctgccgacttggcacaacagttttgtgttggagataacaaatacactccagatgatagtaccggaggattgacgactaatgcaccgccacaaggcagagatgtggtcgaatggctcggatggtttgaagatcaaaacagaaaaccgactcctgatatgatgcagtatgcgaaaagagcagtcatgtcactgcaaggcctaagagagaagacaattggcaagtatgctaagtcagaatttgacaaatga

SEQ ID NO: 10633 - DNA, 42 bp, unidentified; identical to SEQ ID NO: 1230
  misc_feature 1..42: note = Synthetic
  source 1..42: mol_type = other DNA

SEQ ID NO: 10634 - DNA, 24 bp, unidentified
  source 1..24: mol_type = other DNA
  misc_feature 1..24: note = Synthetic
atgtcaacactaatatgggcctaa

SEQ ID NO: 10635 - DNA, 288 bp, unidentified
  source 1..288: mol_type = other DNA
  misc_feature 1..288: note = Synthetic
attcgaccccatcggagagacgacggcgggcagcagccgtcgaccacgcgcggcctcccccgtctgcccccggtcgtcttgccgggcccccgttcctgccggtcgccgatctcccgaaagccatggacaccaagcccaaaacgacgaccaccgtcaaggttcctccggggccgatggggtacgtgtatggccgcgcctgtccggccgaaggcctggagctgctgtcgctactgtcggcgcgcagcggcgacgcggacgtcgccgtcgcgcccctcatcgtcggcctga

SEQ ID NO: 10636 - DNA, 1446 bp, unidentified
  misc_feature 1..1446: note = Synthetic
  source 1..1446: mol_type = other DNA
ctgggctgtcgtaggtgtgggaaggttgtattccgagtgcgcctccgaggcatctactctacacctatcacaatggctggtgtcttttcccagtatgagaggtttgtggacaatcaatctcaggtgtcaaggaaggatcatcggtccttagcaggagggtgccttaaagtgaacatccctatgcttgtcactgcatccgaagaccccaccacgcgttggcaactagcatgcttatctctgaggctcttgatttccaattcatcaaccagtgctatccgccagggagcaatactgaccctcatgtcattgccatcgcaaaacatgagagcaacagcagctattgctgggtccacgaatgcggctgttatcaacactatggaagtcttaagtgtcaatgactggaccccatcttttgacccaagaagtggtctatctgaggaggacgctcaggtgttcagagacatggcaagagatctgcctcctcagttcacttctggatcaccctttacatcagcattggcggaggggtttactcccgaggacactcatgacctgatggaggcactgactagtgtactgatacagatctggattctggtggccaaggccatgaccaatattgatggatctggggaggctaacgaaagacgccttgcaaaatacatccaaaagggacagctcaatcgtcagtttgcaattggcaatcctgcccgtctgataatccaacagacaatcaaaagctcattaactgtccgcaggttcttggtctctgagctccgcgcatcacgtggtgcagtaaaggagggttccccttactatgcagccgttggggatatccacgcttacatcttcaatgcaggattgacaccattcttgaccaccctgagatatggcattggcaccaagtacgccgctgtcgcactcagtgtgtttgctgcagacattgcaaaattgaagagtctactcaccctgtatcaagacaaaggtgtagaagctggatacatggcactccttgaagatccagattccatgcactttgcacctggaaacttcccacacatgtattcctatgcgatgggagtggcctcctatcacgaccctagcatgcgccaataccagtatgccaggaggtttctcagtcgtcccttctacctgctaggaagagacatggctgctaagaacacaggaactctggatgagcagctggcgaaagaactgcaagtgtcagagagggaccgcgctgcactgtctgccgcgattcaatcagcaatggaggggggagagtcagatgacttcccattgtcaggatccatgccggccctctctgagagcacacaaccggtcacccccaggactcaacagtcccagctctctcctcctcaatcatcaaacatgtcccaatcggcgcctaggaccccggactatcaacccgactttgagctgtag

SEQ ID NO: 10637 - DNA, 69 bp, unidentified
  source 1..69: mol_type = other DNA
  misc_feature 1..69: note = Synthetic
ctgccgaactacacactgaaaacgcagtttttaccgcttcggaaaaaatctccttatcctgctctgtga

SEQ ID NO: 10638 - DNA, 153 bp, unidentified
  source 1..153: mol_type = other DNA
  misc_feature 1..153: note = Synthetic
ataacgctcgtcacaaacataaaattctgtgtaggcgtttcgatcatcctcaacctagcgctcggggctgccgaactacacactgaaaacgcagtttttaccgcttcggcaaaaatctccttatcttgctctgtgaggttcgccgccgcctga

SEQ ID NO: 10639 - DNA, 705 bp, unidentified
  misc_feature 1..705: note = Synthetic
  source 1..705: mol_type = other DNA
atgcagacctacagcacccccctcacgcttatcatagtcacgtcgctgtttttgttcacaactcagggaagttcatcgaacgccgtcgaaccaaccaaaaaacccctaaagctcgccaactaccgcgccacctgcgaggaccgtacacgtactctggttaccaggcttaacactagccatcacagcgtagtctggcaacgttatgatatctacagcagatacatgcgtcgtatgccgccactttgcatcattacagacgcctataaagaaaccacgcatcagggtggcgcaactttcacgtgcacgcgccaaaatctcacgctgtacaatcttacggttaaagatacgggagtctacctcctgcaggatcagtataccggcgatgtcgaggctttctacctcatcatccacccacgcagcttctgccgagctttggaaacgcgtcgatgcttttatccgggaccagggagagttgtggttacggattcccaagaggcagaccgagcaattatctcggatttaaaacgccagtggtccggcctctcactccattgcgcctgggtttcgggactgatgatctttgttggtgcactggtcatctgctttctgcggtcgcaacgaatcggggaacaggacgctgaacagctgcggacggacctggatacggaacctctgttgttgacggtggacggagatttggaataa

SEQ ID NO: 10640 - DNA, 36 bp, unidentified; identical to SEQ ID NO: 1242
  misc_feature 1..36: note = Synthetic
  source 1..36: mol_type = other DNA

SEQ ID NO: 10641 - DNA, 84 bp, unidentified; identical to SEQ ID NO: 1243
  misc_feature 1..84: note = Synthetic
  source 1..84: mol_type = other DNA

SEQ ID NO: 10642 - DNA, 75 bp, unidentified; identical to SEQ ID NO: 1244
  source 1..75: mol_type = other DNA
  misc_feature 1..75: note = Synthetic

SEQ ID NO: 10643 - DNA, 57 bp, unidentified; identical to SEQ ID NO: 1249
  misc_feature 1..57: note = Synthetic
  source 1..57: mol_type = other DNA

SEQ ID NO: 10644 - DNA, 351 bp, unidentified
  source 1..351: mol_type = other DNA
  misc_feature 1..351: note = Synthetic
atgatggtgtgtctacgcatggctatagagggcgccctttcggagctttttaatatgcacggcatgaaccttcagactatttgccgcgacatcattcgcgagtggagaaatgaaaattacttgggcattgtacagtcctgcagcttgatgatcgaagagtttgataataacgcttttgctttgctggtgtttgtggaagtgcgggtccaggctcttttggaggccgcgattgatagcctggaaaatcgcataatgtttgatctggctgttaaattccatcagggctccggaggcgaccgttgtcatcttcgggatcttcatttcgacccgttggtgaatcgcttggaataa

SEQ ID NO: 10645 - DNA, 39 bp, unidentified; identical to SEQ ID NO: 3496
  source 1..39: mol_type = other DNA
  misc_feature 1..39: note = Synthetic

SEQ ID NO: 10646 - DNA, 96 bp, unidentified; identical to SEQ ID NO: 1254
  misc_feature 1..96: note = Synthetic
  source 1..96: mol_type = other DNA

SEQ ID NO: 10647 - DNA, 111 bp, unidentified; identical to SEQ ID NO: 1255
  misc_feature 1..111: note = Synthetic
  source 1..111: mol_type = other DNA

SEQ ID NO: 10648 - DNA, 111 bp, unidentified; identical to SEQ ID NO: 1255
  misc_feature 1..111: note = Synthetic
  source 1..111: mol_type = other DNA

SEQ ID NO: 10649 - DNA, 153 bp, unidentified
  source 1..153: mol_type = other DNA
  misc_feature 1..153: note = Synthetic
atgcaattcttgaagactctcagtatacaattagaagggatgttggtgctaccactgcgatcacaccttccgaactgcagccgcaagtatccacattatgcggtatggtgttgtttgcaaaacacaccgactatgagcctgcagcagaggtag

SEQ ID NO: 10650 - DNA, 1581 bp, unidentified
  misc_feature 1..1581: note = Synthetic
  source 1..1581: mol_type = other DNA
atgaacaaggttctcattttcgacagaaacatgtatccacgcggggttaaaaagaatgtattagggcggcaacgatatggtttgaaaaccattaaacgaactcttgttcataaacctgctaacaagtatgtcagccgctttacgaaacaatttcacagacgcatcattcctattaagcagcttgatgaatcaaaattagacgctttgagtctcagagaactagaacagctgaaactcatcattgaagaaaagcaggaagaaaagcgtgcacagacgcatgcattgacttttttcgccaatttaccaacagcaccttttggctctagctacaccgcggaagcccttggtttacgcaagtattccggtgaagcacgagatccagctcataggattcgagatcgatttccccggaatcatgaaaaaatctatttggaaaaagaagaactaatgacaacagacttgttactacgatataagaactgcttaaactccctcaatagagaacaacatcaacagatactcggagaccgagttttttcattgacgaattctccatcgttagcattttctcttgcgattattgaggaagcttgcatttactataaatatcattttgtgcacaacttacctattgaccctcaagatctgtttatgtatactattaccataatgaagtttgaatacttcaacaagttgaatatggcaaaactttgttgtgtttttaatgacaatggacatggtgacatagaataccgtattttcagacaactttgtggaaaaccggtatatgaccgtgatatgcctaacacggaatatgaagtacagcaacagactcctggatcttttcaatatccagcacagcaagctttatcatttatagtaacttttgcaaggattttacgtcaaataaaggaacgtattcttcaaactaaacaacctcagttcatacgcgattttgaccaagatcgtgtaagtgaacaatatcaatgtggcatgatttccagattagtcggagaccaatttaacaatcatcaatgtgatgacatcggttgtcaaactagaatccaacgcatgatgtcaccttggaaaccaagcttatatttctgtacctatcttcccaaagaatttgtggagtttggtctgcatcctaacatgcctgaagagtacaacagctttaatgttgcatgttctacaactccgtcttgcagctttgcttcacagcaatctaagcaaaccgtccaattgaatttacaaaccaaaaagcaagccaaatgtaaaaagcttcttactgcggataaaacgaataaaggacagaaaacaaatgagctacgcgaaaacagactgaaaaaagactggagtaaagaagttgattctatagattttgaaacaaacacgactctacaggaagatgaaactcgctttgtatttattgaaaatgatacttctatgaaatcagcgaaaattaaagaaaacaatggagaggaaaactctgataatgaaatggaactggatttagattatgaagatgtagaaacttgtgagaccgacattaatgacactgattctgatgattcggattaa

SEQ ID NO: 10651 - DNA, 72 bp, unidentified
  misc_feature 1..72: note = Synthetic
  source 1..72: mol_type = other DNA
atgtcagccgctttacgaaacaatttcacagacgcatcattcctattaagcagcttgatgaatcaaaattag

SEQ ID NO: 10652 - DNA, 333 bp, unidentified
  misc_feature 1..333: note = Synthetic
  source 1..333: mol_type = other DNA
atgattaaagaaaacctaggatcaaagatccatgatcagaacacgcatctacaaaccgacctacacaacaaccacaccacccacatgtcacacccccatcaagatggaagaagacccgagagagaagatgcatccccaatcaatgtggagactggtgagactgagagcacagagacttctatcatacagcgaatcaacagatctttcgaccagggagttcctggaagacgtcagcaagtcggtggtcgtccttttcaacagagatgggatgagttctatatcacagtggcgtacagaagactgtgctgcgaggagactggggaatttatctaa

SEQ ID NO: 10653 - DNA, 240 bp, unidentified
  source 1..240: mol_type = other DNA
  misc_feature 1..240: note = Synthetic
atggaaacagatagagaaaacgctattattatacagcgaaatgatgaaataccgactagaacattagatacagctatatttaccgatgcatcaactgtcgcaagtgcgcaaatatacctatattataattccaatattggtaaaattataatgtcacttaatggtaaaaaacacacctttaatttatacgatgataacgatatacgaacattacttcctattttactccttagtaaatga

SEQ ID NO: 10654 - DNA, 1173 bp, unidentified
  source 1..1173: mol_type = other DNA
  misc_feature 1..1173: note = Synthetic
atgccgtgccgcccgttgcagggcctggtgctcgtgggcctctgggtctgtgccaccagcctggttgtccgtggccccacggtcagtctggtatcaaactcatttgtggacgccggggccttggggcccgacggcgtagtggaggaagacctgcttattctcggggagcttcgctttgtgggggaccaggtcccccacaccacctactacgatgggggcgtagagctgtggcactaccccatgggacacaaatgcccacgggtcgtgcatgtcgtcacggtgaccgcgtgcccacgtcgccccgccgtggcattcgccctgtgtcgcgcgaccgacagcactcacagccccgcatatcccaccctggagctcaatctggcccaacagccgcttttgcgggtccagagggcaacgcgggactatgccggggtgtacgtgttacgcgtatgggtcggtgacgcgccaaacgccagcctgtttgtcctggggatggccatagccgccgaagggactctggcgtacaacggctcggcctatggctcctgcgacccgaaactgcttccgtcttcggccccgcgtctggccccggcgagcgtataccaacccgcccctaaccaggcctccaccccctcgaccaccacctccaccccctcgaccaccatccccgctccctcgaccaccatccccgctccccaagcatcgaccacgcccttccccacgggagatccaaaaccacaacctcccggggtcaaccacgaacccccatctaatgccacgcgagcgacccgcgactcgcgatacgcgctaacggtgacccagataatccagatagccatccccgcgtccatcatagccctggtgtttctggggagctgtatttgctttatacacagatgtcaacgccgctaccgacgctcccgtcgcccgatttacagcccccagatgcccacgggcatctcatgcgcggtgaacgaagcggccatggcccgcctcggagccgagctcaaatcgcatccgagcaccccccccaaatcccggcgccggtcgtcacgcacgccaatgccctccctgacggccatcgccgaagagtcggagcccgctggggcggctgggcttccgacgccccccgtggaccccacgacacccaccccaacgcctcccctgttggtatag

SEQ ID NO: 10655 - DNA, 18 bp, unidentified
  misc_feature 1..18: note = Synthetic
  source 1..18: mol_type = other DNA
atgaggcggattccgtga

SEQ ID NO: 10656 - DNA, 27 bp, unidentified
  source 1..27: mol_type = other DNA
  misc_feature 1..27: note = Synthetic
atactaaatcagatatcgatgttataa

SEQ ID NO: 10657 - DNA, 2169 bp, unidentified
  source 1..2169: mol_type = other DNA
  misc_feature 1..2169: note = Synthetic
acgcaccccccacccacgccccttccggcaccgggaagggctcgcaccgccggccgggccatgaacgcgcactttgccaacgaggtccaatacgatctcacccgggacccgagcagccccgcctcgctgattcacgtcatcatctccagcgagtgcctggcggcggcgggggtcccgctgtccgccctcgtgcgcggccgccccgacggtggggcggccgcgaacttccgggtcgaaacccagacccgggcccacgcgaccggcgactgcaccccgtggcgttcggcgtttgccgcctacgtgccggcggatgcggtgggggcgatcctagcccccgtcatcccggcgcacccggacctcctgccgcgcgtccccagcgcgggcgggctgttcgtctccctgccggtcgcgtgcgacgcccaaggcgtgtacgacccgtacacggtcgcggcgctgcgcctggcgtggggcccgtgggcgacctgcgcccgcgtgctcctgttcagttacgacgagctcgtcccgccaaacacgcgatacgcggccgacggcgcgcgcctcatgcgcctctgtcgccacttttgtcgctacgtcgcgcggctgggggccgcggctcccgccgccgcgacggaggcggcggcccacctgtccctggggatgggggaaagcggcacccccactccccaggcgtcctcggtctcgggcggggccgggccggccgttgtcggcaccccagacccccccatctccccggaggagcagctcacggccccgggaggcgacacggccaccgcggaggacgtgtccatcacgcaagagaacgaggagatcctcgcgctggtccagcgggccgtgcaggacgtcacccgccgccacccggtccgcgcgcgccccaagcacgcggcctccggcgtcgcctcggggctccgccagggcgccctggtccaccaggccgtcagcgggggagccctgggcgcgtcggacgcggaggcggtgctggcgggcctggagccgcccggcggggggcgctttgccaccccggggggcccccgggccgcgggcgaggacgtcctcaacgacgtgctcaccctcgtgccggggaccgccaagccgcgatcgctggtcgagtggctggaccgcgggtgggaagctctggccggcggcgaccggcccgactggctgtggagccgtcgctccatctccgtggtcctgcgccatcactacgggaccaagcagcgcttcgtcgtcgtctcctacgagaattcggtggcgtggggcgggcgacgcgcccgccccccgcggctgtcctccgagctggccacggccctgacggaggcctgtgccgccgagcgcgtcgtgcgcccccaccagctgtcccccgcggcccagacggcgctgctgcgtcgctttcccgcgctcgagggacccctgcgccacccgcgccccgtgctgcagccctttgacatcgcggccgaggtggccttcgtcgcgcgcatccagatcgcgtgtctgcgggccctgggccactctatccgggccgcgctccaaggcggcccgcgcatcttccagcgcctgcgctacgactttggcccccaccagagcgagtggctaggggaggtgacgcggcgcttccccgtgctcctggagaacctgatgcgcgccctcgaggggaccgcccccgacgcgttctttcacaccgcgtacgccctggccgtgctggcgcatctgggcggccagggcggtcgggggcggcggcggcggctcgtccctctcagcgacgacatccccgcccgcttcgccgactccgacgcccactacgcgtttgactactacagcaccagcggagacacgctgcgcctcaccaaccgtccaatcgcagtggtgattgacggtgacgtcaatggacgcgagcagagtaaatgtcgcttcatggagggcagcccctccactgccccacacagggtctgcgagcaataccttccgggagagagctacgcgtacctctgccttgggttcaatcgccgcctctgcgggctagtggtctttccgggaggctttgcgtttaccattaacaccgcggcgtacctcagcctcgcagaccccgtcgcgcgtgccgtcggactccggttctgtcgcggggcggctacgggacccggccttgtccgctga

SEQ ID NO: 10658 - DNA, 1980 bp, unidentified
  source 1..1980: mol_type = other DNA
  misc_feature 1..1980: note = Synthetic
atacaacaacagagaagaaacgaacgcacgctggtcgccatggccttgagcatccacgactgcgcgcgcctcacgggccagaccgtgcccaccatgaactacttcctgccgctgcgcaacatctggaaccgcgtccgcgagttcccgcgcgcctccaccaccgccgccggcatcacctggatgtccaggtacatctacggctaccaccgcaccatgctcgaggacctcgcgcccggcgcccccgccaccgagcgatggccgctctaccgccagccgccgccgcacttcctcatcggctaccagtacctggtgcgcacctgcaacgactacatcttcgacacgcgcgcctactcgcgcctcaagtaccacgagctcgtgcgtccgggccaccagaccgtcaactggtccgtcatggccaactgctcctacaccatcaacaccggagcctaccaccgcttcgtcgactttgacgacttccagaccaccctcacccagatccagcaggccatcctcgccgagcgcgtcgtcgccgacctggcgctcgtccagccccagcgcggcttcgggctcacgcgcatgcacggccgcgcgggcgaggaggaggtgcccgtggagcggctcatgcaggactactacaaggacctggccaggtgtcaggaccacgcctggggcatggccgaccgtctgcgcatccagcaagccgggcccaaagacctggtgctcctcgccaccatccgccgtctcagaaccgcctatttcaacttcatcaccagcagcatcgcccgccccgctccccaacatgacccggcagaagaaaccgtgctcagcctaccttgcgactgcgactggctcgaagccttcgttcaacggttttcagatcccgtggatctcgagacgctcaggtccttgcgcggagtccctacggggcaattgataagatgcatcgtcagcgccctctccctgcccaacggggacccccccggccacctggagatgcgcggcggcgtcttcacgctgcggccccgcgaggacgggcgcgccgtcaccgagaccatgcgacgccggcgcggcgagaccatcgagcgcttcatcgaccgtctgcccgtgcgccgccggcgacgcaggccccctcccccgccaccaccaccgcctgaggaggaagtagaagagatgttagtggaggaggaagaagaggaggaagtggaggaactcccgggggccttcgagcgcgaggtgcgcgccaccatcgccgagctcatccgtcttctggaggaggagttgaccgtctcggcgcgcaactcccagtttttcaacttcgccgtggacttttacgaggccatggaacgcttggaggcgctgggcgacgtcagcgagatgccgctccgccgctggatcatgtatttcttcgtcaccgagcacatcgccaccacgctcaactacctctaccagcgcctctgcaactacgcggtcttcacgcgccacgtggagctcaacctcgcccaggtggtcatgcgcgcccgcgatcccgagggcgtcgtggtctacagccgcgtctggaacgaggcgggcatgaacgccttctcgcagctcatgggccgcatctccaacgacctcgcggccaccgtggagcgcgccggtcgcggagaccttcaggaggaggagatcgagcagttcatgaccgagatcgcctaccaggacaactcgggcgacgtgcaagagatcctgcggcaggccgccgtcaacgataccgagattgattctgtcgaactctctttcaggttcaaactcacgggtcccgtggccttcacccagaggcgtcagatccaggacgtcaaccgtcgcgtcgtcgctcacgccagtcttctccgggcgcagtaccagaacctacccgcgcgcggcgccgacgtgcccctgccgcccctgcctccgggccccgagccgcctctgccgcccggcgcgcgtcctcgccgccgcttctaa

SEQ ID NO: 10659 - DNA, 240 bp, unidentified
  source 1..240: mol_type = other DNA
  misc_feature 1..240: note = Synthetic
atggaaacagatagagaaaacgctatcattagacagcgaaatgaagaaataccgactagaacattagatacagctatatttaccgatgcatcgaccgtttctagtgctcaaatacacctatattataattccaatattggtaaaattataatgtctcttaatggcaaaaaacacacctttaatttatacgacgataacgatatacgaacgttacttcctattttactccttagtaaatga

SEQ ID NO: 10660 - DNA, 240 bp, unidentified
  source 1..240: mol_type = other DNA
  misc_feature 1..240: note = Synthetic
atggaaacagatagagaaaacgctattattagacagcgaaatgatgaaataccgactagaacattagatacagctatatttaccgatgcatcaaccgtcgcgagtgcgcaaatacacctatattataattccaatattggtaaaattataatgtcacttaatggtaaaaaacacacctttaatttatacgatgataacgacatacgaacattacttcctattttactccttagtaaatga

SEQ ID NO: 10661 - DNA, 240 bp, unidentified
  misc_feature 1..240: note = Synthetic
  source 1..240: mol_type = other DNA
ctggaaacagatagagaaaacgctattattagacagcgaaatgatgaaataccgactagaacattaaatacagctatatttaccgatgcatcgaccgtttctagtgctcaaatacacctatattataattccaatattggtaaaattataatgtcacttaatggcaaaaaacacacctttaatttatacgacgataacgatatacgaacattacttcctattttactccttagtaaatga

SEQ ID NO: 10662 - DNA, 66 bp, unidentified; identical to SEQ ID NO: 1286
  source 1..66: mol_type = other DNA
  misc_feature 1..66: note = Synthetic

SEQ ID NO: 10663 - DNA, 699 bp, unidentified
  misc_feature 1..699: note = Synthetic
  source 1..699: mol_type = other DNA
acgactctcaacgagcgcatcagcaacaagctcgaacagagcgccagcgcctccgcgaccgcgaactgcaacgtgagtatcggcaacatttacttcgggcgcaatcacggctgtaatgtgctggtcaagaacatgtgctccgccaacgcggacgcgcagctcgacgccattgtgaaggcggcgacggaggtctacaacgagctctccgaagagcagaaggcgtatgcgccaagcctgctcacggcggcgctcaacatccaaaccaacgtgagtaccgtgaccaaggacttcgagacctacgtcaagcaggcatgcaaggcggacgccgtcgtcaacaacacgatcaaggtgcagaacctgcgggtggacgagtgctctgcgccctcgggcatgctcatgaccttcgaatttatcaacaccgggaccagcgtaggcaactgcgccatgaaggccttactcgacgtgctcaccaagtccagcgaccgcatctccggcgtgcaaaacaccgggactgacatccgctggtacgtcatcgtggccgcggttgtcgcgtgcgtgctgctggtgctctggtacgccaagcgcatgctcttcacgtccacgcaggacaagatcaagctcatcctggcgagcaagcccgacgtgcactggaccactttcctcgacactttctttagctcggcaccgacggtactctaa

SEQ ID NO: 10664 - DNA, 7605 bp, unidentified
  source 1..7605: mol_type = other DNA
  misc_feature 1..7605: note = Synthetic
acgcagcttacgggtttcatactgctctactctgcattgcaagagattaaagtacccatcatggattcagtgtatgtagacatagatgctgacagcgcgtttctgaaggcgttgcagcaagcataccccatgtttgaggtggaaccaaagcaggtcacgccaaatgaccatgcaaacgctagagcattttcgcatctagcaataaaactgatagagcaggaaattgatccagactcaaccattctagacattggtagcgcaccagctaggaggatgatgtctgatagaaaataccactgcgtctgcccgatgcgcagcgcagaagaccctgagaggctcgcgaattacgcgagaaaacttgcgtcagccgctggaaaggtgacagataaaaacatctccggaaaaattaatgatctacaagctgtgatggccgtaccgaatatggaaacatccacattctgcctacacactgatgctacatgcaaacaaagaggagacgtcgccatttatcaagacgtctacgccgtccatgcacctacctcgctgtaccatcaggcgattaaaggagtccgcgtggcatactggatagggttcgatacgacacctttcatgtacaatgcaatggctggcgcatacccatcatattcaacaaactgggctgatgagcaggtactgaaagctaagaacatagggctgtgttcaacagacctatctgagggtagacgaggcaaactatccatcatgagaggcaaaaaattgaagccatgcgaccgagtgctattctcggtcggctcaacactctaccctgaaagtcgtaaacttctacaaagctggcatttaccatcggtatttcatctgaagggtaaactcagcttcacctgccgctgtgacacgatcgtctcatgcgaaggatacgttgtcaagagagtgaccatgagtccaggcatctacggaaagacatcggggtatgctgtaactcatcatgccggcggcttcctgatgtgcaagacgacagatacagtagacggcgaaagggtatcattctccgtgtgtacttacgtaccagctactatctgcgaccagatgactggaatccttgccactgaggtaaccccagaagacgcacagaaactactggttgggctaaaccaacggatagtggtcaatggcaggacgcaacgtaatacaaacaccatgaaaaactacctgctcccaatagttgctcaggccttcagcaagtgggccaaagaatgtcgaaaggacatggaggacgaaaaactcttgggtgtccgagagaggaccttaacgtgctgttgcctatgggcatttagaaagcacaagacgcatacggtgtacaaaagaccggatacccagtcaatccaaaaggtccctgccgaatttgacagctttgtgataccaagtctgtggtcgtcaggtttatcaattccgctgagaaccagaatcaagtggctcttgagcaaagctccaaaatacgagcaactaccgcacagcggaaacgccgaggaagcagcccaggctgaaacagatgcggtagaagaacaggaggcagagctaacccgagaagctatgccaccattgcaggcgacacaggatgacattcaggtagaaattgatgtagagcaacttgaagaccgagcaggagcgggcatagtcgaaacaccaagaggagcaatcaaagtcacagcccaaccgtcagaccttgttgtcggagagtacttagtactgacaccgcaggcggtcctgcgcagccaaaaactcagtctgattcacgcgcttgcagagcaggtaaaaacgtgcacacatagtgggcgagcaggcaggtacgcggttgaagcatacgatgggcgtgttctagtgccctcgggctacgcgataccccaggaagacttccagagcttaagcgaaagtgccaccatggtatttaacgagcgagagtttgtgaaccggaagttacaccacatcgccatgcacggcccagcgctgaacactgatgaagagtcatatgaactggtaagggtagagaaaacagaacacgagtacgtctatgacgttgatcagaagaaatgttgtaagagggaggaagcaacaggactagtgctagtaggcgacttaactagcccaccataccatgagttcgcctacgaaggactaaaaatccgcccagcatgtccatacaaaacggcagttataggtgtcttcggagtaccgggttctggcaagtcggctataatcaaaaacctggtaaccaggcaagacttggtgactagtggaaaaaaagaaaactgccaagaaatctccaatgacgtaatgcggcaaaggaaattggagatatctgcacgtacagtcgactcactactcctgaatggatgtaacaagccagtggaagtactgtacgtggacgaggcattcgcttgtcattcgggaaccctgttggcactgatagccatggttagaccgcgtcagaaggtcgtactttgtggcgacccaaagcagtgcggattcttcaatatgatgcaaatgaaggtcaactataatcacaacatctgcacacaggtgtaccataaaagcatatcaaggcggtgtacactgcctgtaacagccatcgtgtcctcgttgcattacgagagcaagatgcgcactacaaatgagtacaaccagccaatcgtagtggatactacgggcataacaaaaccagaacccggggacttagtgttaacgtgtttccggggatgggttaagcagctgcaaatagactaccgtggaaacgaagtcatgacagcagctgcttctcaggggctgaccagaaaaggtgtttatgcagtaaggcagaaagtcaacgaaaaccctctgtatgcaccaacatcagaacacgttaacgtgctattgacacgcacagagggcaagttgacatggaagacactctcaggcgacccatggataaagatactgcagaaccccccaaaaggggactttaaggcaacaatcaaggagtgggaagcagaacacgcctccatcatggcaggaatatgcaatcaccagatggcttttgacacatttcagaacaaagctaatgtatgctgggctaaatgcctggtccctattcttgacactgctggaatcaaattaagtgacaggcagtggtctcagatagtgcaagcttttaaagaagatagggcctactctccagaagttgcactgaatgaaatatgcactcgcatatatggggtagacctggacagcggactattctcaaagccactgatatccgtctactatgcagacaaccactgggacaatagaccaggaggaaaaatgttcgggttcaaccctgaggtggcacttatgcttgaaaagaaatatccctttacaaaaggtaagtggaacattaacaagcagatatgtataactaccagaaaggttgacgaatttaaccccgaaaccaacataataccggccaaccgcagactgccgcactcactcgtggctgaacaccactcagtgagaggggaaagaatggaatggctggtaaacaaaatcagcggtcaccacatgttgttggttagcggtcataatcttatattaccaacaaaaagagtcacctgggtagcaccgttaggcacccgaggtgcagactacacatataacctggaacttggtctaccagccacactaggcagatatgacctggtagttatcaatatccatactccattccgcatacatcattaccagcagtgtgtagatcacgcaatgaagctccagatgctagggggggactctctacggctgttaaagccgggaggttcacttctgattagagcttacgggtacgccgaccgaaccagtgaaagggtcattagcgtattgggacgcaagttcagatcgtccagggctctgaaacctcagtgcatcacgagcaatacagaaatgttcttcctatttagccgattcgacaatggaagaaggaacttcaccacacatgttatgaacaaccagctgaacgcagtgtatgcaggactggccactagagcgggctgtgccccgtcataccgagtgaaacggatggacatcgcaaagaacactgaggaatgcgtggtaaacgccgccaatccgcgcggagtaccaggcgatggagtatgtaaagccgtgtatagaaaatggccagaatcattcagaaacagtgcaacaccagtggggactgcaaagacaatcatgtgcggtcaataccccgtcatccacgcagtaggccctaacttctcaaactattctgaggctgaaggggatagggaattggcttcagtgtatagagaagtggcgaaagaagtgtctaggctaggagtgagcagtgtagccatccctttgctctcaaccggtgtgtactcaggaggcaaagacagactgctgcaatcactaaaccatcttttcgcagcgatggattcgacagatgcagacgttgtcatctactgcagggacaaggaatgggagaagaagatcactgaagccatatcactaagatcccaggtagaattactagatgatcacatctcagtggattgcgacattgtacgcgttcatccagacagcagcttggcaggccgaaaggggtacagcacagtagagggagcactctactcgtacctagagggaacaagattccaccaaactgcagtagatatggcagagatatataccatgtggccgaaacaaactgaagccaacgaacaggtctgcctatatgctctgggggagagtatagagtccgtcaggcaaaaatgtcccgtagacgacgccgacgcctcattccctccgaaaacagtcccgtgcctatgccgttatgctatgacgcctgaacgagttgcacgtctacgcatgaatcataccaccagcatcatagtgtgctcgtcttttccgctgccgaaatacaaaatcgagggcgtgcaaaaagtaaaatgttcgaaagcactcttgtttgatcacaacgtaccgtctcgagtgagcccgagaacgtacaggcctgcggacgaaatcatacagacacctcaaacaccaactgaagcgtgtcaggacgcacaactcgtgcagtcaataaatgatgaagcagtgccagttccctcagacttagaggcttgtgacgcaactatggactggccctctatcggcaccgtatcaacaagacaaagacacgactcatctgacagcgagtatagtggctccagaagtaacatacaactagtgacggcggacgtgcatgcaccaatgtacgcacattcgctggcgtccagcggaggttcaatgctgtcgctgtccagtgaaccagctcagaacggcacaatgatactacttgactcagaagacacagacagtataagcagagtaagcacaccgatcgccccgcccagaagacgtttgggaaggaccataaatgtgacctgcgacgagcgggaagggaaaatactccctatggccagcgacaggttcttcactgctaagccatacactgtcgcactgagcgtatcaacagcagatatgactgtgtatcccatccaggcaccgctaggattgataccaccacctaccctcgaaccgatcactttcggagacttcgccgaaggtgaaatagacaacctcctgacaggggcattgacatttggggacttcgagccaggtgaagtggaagagctgacggatagcgagtggtcaacgtgctcggacacagacgaagagttacgactagacagagcagggggttacatattctcctctgacactggtcaaggtcatctacagcaaaaatcagtacgtcaaacgacgctaccggtaaacattgttgaagaggtccacgaagagaaatgctatccacctaaattggatgagatcaaagagcaactactacttaagagacttcaggagagtgcttccacggctaaccggagtaggtaccaatctagaaaagtggaaaacatgaaagccacgattatccacagactgaaagagggttgcagactctatttggcgtcagaaacaccgagggtcccatcttaccgagtcacatacccggcgcccatctactcgccttcaatcaatatcaaactgactaacccagagactgcagtagcagtgtgtaacgagtttttggccagaaactatccaactgtggcatcctaccaagtcactgacgagtacgacgcgtacttggatatggtagacgggtccgaaagttgcctagacagagctacattcaacccgtctaaactcaggagttacccaaaacaacactcttaccacgcacccaccatcagaagtgcagtgccatcaccattccaaaatacgttgcagaatgtcttggcagcggccacaaaaagaaactgcaacgtaacgcagatgagggaactacccactatggactccgcagtgtttaacgtggagtgttttaagaagtacgcttgcaaccaagagtactggagagagttcgcctcaagccctataagggtaacgacagagaatctgacaatgtatgtgacgaaactaaaggggcctaaagcggcggcactcttcgcaaaaacacacaacttgctgccgctacaagaggtaccgatggacaggttcacaatggacatgaaacgtgatgtgaaagtgacaccaggtacaaagcacaccgaggaaaggccgaaagtacaggtcatacaggcggcagaaccactggcaacagcatacctgtgtggcatacacagagagttggtgagaagactaaatgcagttctgctaccgaatgtccacacactgttcgatatgtcagccgaagacttcgatgcaattatagccacccatttcaaaccgggcgatgctgtactagaaactgacatagcctcatttgataagagtcaagacgactcgcttgcgtcgaccgccatgatgttgctagaagaccttggggtagatcaacctatcctggatctgatagaagcagcattcggcgaaatatccagttgtcatctaccgacgggtacgcggttcaagttcggcgcaatgatgaaatcaggcatgtttctaaccctgtttgtcaataccctcctgaacatcaccattgccagtcgggtgttagaggagcgattgactacttcagcctgtgcagctttcattggggacgacaacataatacatggggttgtctctgacgcactaatggctgcacgttgtgctacgtggatgaacatggaagtgaaaatcatcgatgcagtagtgtcagagaaggcgccatacttctgtgggggatttattttacacgacacggtgacaggcacgtcgtgcagagtagcagaccctttaaagagactgttcaagctaggcaaacctctggcagctggagacgaacaggatgaggacagaagacgtgctctggcagatgaggttactagatggcaaagaaccggcttagtcacagaattggaaaaagcagtatattcaaggtatgaagtacaaggaataacagccgtaataacatcaatggctacctttgcgaatagcaaagaaaactttaagaaactaagagggcccgtcgtaaccttgtacggcggacctaaatag

SEQ ID NO: 10665 - DNA, 1230 bp, unidentified
  source 1..1230: mol_type = other DNA
  misc_feature 1..1230: note = Synthetic
ctgtccgccccgcgaacccccgcatcgtgccctgtttcgtctatgcttaggactgtgggtctcgagctacctggttcgacggcccatgacgatttagaatacaccgagccattcctttatttccccccatccccggtcgcttatgcgtgtcaaacactaccaataaagataatctgccaatcgcaccttatatataatatgtggtcgcgtgtggtctttttaaggagctctgaaacacagacaggtatggggggtggccggctgccgccgctgtggctgccgctgctgatcgcctggagcgagtggggcaactgctgtctcgatgcgcctccggtggtgcgttcgccctgtctgcagccggtgcgcgaccgcaaccgcgagcggaacccgggctcaccgcagttgctgccttacggcgaccgtctggaggtggcctgcatcttccccgcgcacgactggccagaggtctctatccgagtccacctctgctactggcccgagatcgtgcgttcgctggtggtggacgcacgcagcggtcaggtgttacacaacgacgccagctgttacatcgccggcgggcgctggcgtttcgaggacggcggcgcggcgcagcggctgagcctctcgtttcgtctcatcaccgagaccgcgggcacctacacctgcgtgctgggcaacgagacccacagcctggcgaccgagaccacggcgctggtggccgacgtgcacgacctgcgccactcggaccgctcctgcgacctggctttcggatcgcgctcacagacgcggtacctgtggacgcccgatccctccaggttgcgcagtataaactgcggttgggagggtgaacggcaccgcgtagtccactacatccccggcacctcgggtctgctgccctcgtgcgaggaggacgagcgcgaactgtgcgtgcccttcatcagccagagcatcgcggacaacaactgcagccgccggcatcgggtagacggcgctaggcggcgctatcatctgcggagggattactggctgacggatccgaagatcgggctgctggccgcgggatcggtggccctgacctccctctgccacctgctgtgctactggtgttccgaatcgtaccggcgtctgaacaccgaagaggaaaacgaggcggcggaggaaactgccgcgggagaagcctctgcggtagcggcggcggccgtctctgaggaagagcagcagcgggagtaa

SEQ ID NO: 10666 - DNA, 144 bp, unidentified; identical to SEQ ID NO: 1294
  misc_feature 1..144: note = Synthetic
  source 1..144: mol_type = other DNA

SEQ ID NO: 10667 - DNA, 27 bp, unidentified
  misc_feature 1..27: note = Synthetic
  source 1..27: mol_type = other DNA
aagacacagatagtatcagtgacctaa

SEQ ID NO: 10668 - DNA, 27 bp, unidentified
  source 1..27: mol_type = other DNA
  misc_feature 1..27: note = Synthetic
aggttcacaatcagatcgtatctttaa

SEQ ID NO: 10669 - DNA, 72 bp, unidentified
  source 1..72: mol_type = other DNA
  misc_feature 1..72: note = Synthetic
atgaatataagtatccagctatcacagatgggaagaagccgggcatcactctcgggaaggccccagacctga

SEQ ID NO: 10670 - DNA, 48 bp, unidentified; identical to SEQ ID NO: 792
  source 1..48: mol_type = other DNA
  misc_feature 1..48: note = Synthetic

SEQ ID NO: 10671 - DNA, 1356 bp, unidentified; identical to SEQ ID NO: 10390
  misc_feature 1..1356: note = Synthetic
  source 1..1356: mol_type = other DNA

SEQ ID NO: 10672 - DNA, 48 bp, unidentified; identical to SEQ ID NO: 810
  misc_feature 1..48: note = Synthetic
  source 1..48: mol_type = other DNA

SEQ ID NO: 10673 - DNA, 1482 bp, unidentified
  source 1..1482: mol_type = other DNA
  misc_feature 1..1482: note = Synthetic
atggcgtccatatttgcagaatatgacaagctgcttgactctcaaaccaagtgtaacaagggggcttcccctgcagaacgaggcgggaccattaaagttgaaatcccggtattcatctgtaacaccaacgacccagagaccagatggtcttttgttagttttgcagtaagacttgcagtcagtgactcagctaacaagcctcttcggcagggtgcaatggtatcattgctgtgtgctcattctgagactatgaggacgcatgtggccatggcaagcaggaatggcgagaccacgatcgcattactagaaattgatgcctttaacaatgggacgccggtcttcaatgctagaagcggaataagtgacgagaaagcccagagattcactatgatagcaaatgatctaccaagatcatgcgggaatggcacccccttcatcaatggggaagctgagaatgaccctcctgaggacattacagacacgcttgagcggatcctttctgtgcagggacagatctgggtgacactagctaaggcaatgactgcttatgagactgctgaagagtcagaatcccgtagaatcactaaatatgttcaacaaggccgtattagcaagaggtttcttctgtatcctgtggtgagaagcagcatccagctgacgatcaggtcgtcactagcagttcgtgcgtttatggtatcagaactcagacgtgccaaaaatacacccagtgggaccagcacatattacagccttgttggtgatattgacgcatatgtcaggaatgccgggttgacaccattctttctgaccctgaaatacgggatcaacaccagaactccggccctggcattgagcagattggcaggagagattaaaaagcttggaagtctgatgaggctctaccgagaaaagggagataatggaccatatatgacactgctaggggaccctgaccagatgcaattcgcacctgcagagtattcactgatgtattccttctccatggggattgcatctgtattagacaaaggaaccagcaaatatcagttctcgcgagacttcatgaatccaggatactggcggcttggagttgaatgtgcccagcagcaagcagccagtataaatgaagaaatggctgatgagctaagactgtcaccgagtgcaagaaaggcgctgtcgaatgtggtgagtaagatgactgagagtagtgctaatgaaggattcgatgctggcaatgccagtgtaacatctggccttgctcaaccatcaggggacagttcacttaagaaaataagtcaaccagctgatggggcctctcaagagatcagctcagacgaccagcggtttattgacttaatgcgcagcatagccagcaacatgagatcatcagataacgacattccccctacccctggacttacacctagacgggatccagcagaggacgaaggaacagatcaagctgaccaatgggacatgtag

SEQ ID NO: 10674 - DNA, 48 bp, unidentified; identical to SEQ ID NO: 1304
  misc_feature 1..48: note = Synthetic
  source 1..48: mol_type = other DNA

SEQ ID NO: 10675 - DNA, 516 bp, unidentified
  source 1..516: mol_type = other DNA
  misc_feature 1..516: note = Synthetic
atggataagaaaagtttgtataaatacttactactacgttcaactggagatatgcacagagccaaatctcccactataatgacaagagtaacaaataatgtgtatttgggaaattataaaaatgctatggatgcaccatcatctgaagttaagttcaaatatgttttaaatttgacgatggataaatatacattacctaactctaatattaatattattcatataccgttggtagatgatacaactactgatattagtaaatattttgacgacgtgaccgccttcttatctaaatgtgatcaacgaaacgagcccgtgttggttcattgtgttgcgggagtaaatagaagcggggctatgattttggcatatctaatgtctaaaaataaggagtcatcacctatgctatattttttatacgtgtatcattctatgagggacttgagaggcgcatttgtggaaaatccatcgtttaaaagacagatcatagaaaaatatgttattgataagaattaa

SEQ ID NO: 10676 - DNA, 66 bp, unidentified; identical to SEQ ID NO: 1306
  source 1..66: mol_type = other DNA
  misc_feature 1..66: note = Synthetic

SEQ ID NO: 10677 - DNA, 6762 bp, unidentified
  source 1..6762: mol_type = other DNA
  misc_feature 1..6762: note = Synthetic
atggctgcatccaaaatgaatcccgttggcaacctgctctccacagtctcctcaaccgttggatctcttctacaaaacccctctgttgaagaaaaggaaatggattctgaccgtgttgctgcctctactacaaccaatgctggtaatttggtacaagcttctgtggccccaactatgcctgtcaagccagattttaaaaacacagatgatttcttgtccatgagctaccgttcaacaacagccccaaccaaccccacaaaaatggttcacttggcacatggcacttggacaactaatcagcacagacaggcattggtcgcatcaattactctaccgcaggcattttggcccaatcaagattttccagcatgggggcagtctcgttattttgcagcagtgcgctgtggctttcatattcaagtacagttgaatgttaacatcggttctgctggttgcttgattgccgcgtacatgccaaagacggcccatgatcatatgaacacctatacttttggttcttacaccaacctgccacatgttttgatgaatgcggcaacgacatcccaggctgatctctatataccctatgtttttaatcataactatgcaagaactgattcagatgatttaggaggcatttacatttgggtttggtcagctctcacagttccatcaggttcacctacaacagtggatgtgaccatttttggttcattactcgacttggattttcagtgtcctcgtcctcctggtgcagacacagtaatttacacacaagggaaaagaactgttcgaaagaccaagacatcaaagttcaaatgggtcaggaataaaattgacatagctgaaggtccaggagcaatgaacatcgctaatgttctctccacaactggtggtcaaactattgccttggttggtgaaagagcattctatgacccaagaacagctggtgctgcagtgaggtgcaaggacctcatggagatcgccagaatgccaagtgtgttcttaggagagagtactgaaccagatggtcgaaggggctatttcacctggtcacatacaatctcacctgttaattgggtttttgatgaccacatttatttggaaaacatgcccaatctgagattattctcctcctgttacaactattggaggggctcctttgttattaaactgacagtttatgcgtcaactttcaacaaaggacgcttgaggatggcatttttcccaaacagagaaggcgcctacacacaggatgaagctcagaacgcaatctttgttgtgtgtgatataggcttgaataatacctttgagatgaccatcccctacacttggggcaactggatgagaccaacaagaggaaactccttgggacatctgaggattgatgtgttgaaccgtcttacatacaacagttcttccccaaatgcagtcaactgcattcttcagattaagatgggggatgatgcaatgttcatggtgcctaccacatctaatctagtttggcaaggtctgcactcatggggttcagaaatggacttggtggactctctcgacaatccagacgagatacaagacaatgaggaaatacaaacccaaaatgtggaggctgcacaaggggaagaagctgcgactgaagttggtcttagggcaacagaaaatgatggcagtctttcagaacaattgaatatgagtcaacccatgttcctgaattttaagaagcataaagtcaacatctatgcagcatcccataccaaagttgatcatatttttggaagagcttgggcagtgggggtttttaacacagaaacagctgccatacaaaaatttgatttgcactttccaacttctactcatggtgcattgtctagatttttctgcttctggactggagagttaaatattcacattttgaatgtgtcaaccacaaatgcctttttgaaagttgctcacacatggtttggcactgattctggaattgcccggacagctactttggaatcaaatggaacaatgattataccaccaaacgagcaaatgacactttgtgtaccctattattctgaggttccattaagatgtgttaaaggttcagacaggaattcagccggacttggttctctcttcacacaggctgtgggcagaacaatctctaatcgggtacaaatctttgtgagcttccgctgtcctaattttttcttcccactacctgcgcccagggaagccacgtctcgaagcatattggaacgagtggatgaagcaaatgcggaagaacttgaagctgtcttggaagctagaacaccagatgcaccgctccgcctcaagtttaatccagaagatcctttgaaacaattgcgggaggcggccaaggcttactttaatataatgcacagtgatgaaatggattttgccggggggaaatttttgaaccaatgtggtgacgtggaaaccaacccaggccctgacattgagttggtctataaaaacagaggcttctataagcattatggagttagatttggtggtcatatctaccacttgaattcacaagacattctgtcaaccgcaattacaggcaagtctgacttcattaaggaagaagatgatggcaaatgggttcatgctatgacagcaccattggactactttactgaaaagtacatcaattcaatggttggctccaaacacatcttttccgccacctccaattgtgagaccattgccagagatcttttcccagggagaaaggaaataactcagtccaaagccttggggattattggggtcatcttgttgtcagcctctcttctttcattgcttgctgtaccctgggattattcctcacttcaaactgtttataaccaatccattgaaggtgatgcttctggcctcacactcctaagtcaaagatgcatgacttttttttccaatacaatgtgtgaaacttttaataatgatcttgttaagtttattattaagattttggtgcggcttttgtgctacatcgttctttattgccatgcaccaaatatgctgacaaccatgtgtctgggaactcttcttgttttggacattacaacttgtgaaatcttgtctgctaacaccaaagcactctttcaggcattggttgatggtgatgtgaagagtcttgtctggaaaattgctgagaatatgcaatttgcccaatccaaggatgaacaagctgaggacatggcagcaaccttcaactttgcctctgacatggttaattttgtgccaatggaacagatgagacaagaaggctggagagaatttaatgatgtttctatgtcctttcggcatgttgaatggtggctgactatgttcaaaaaggtgtacaatgttctgaaaagtatttttgctcctagtattgaacagaaggctgttgattggatagatcgcaatcaagagtacattgccgatgttttggaccatgcttccaacatcatcataaaaatgaaggatccaaaagaacagcggagagcatcaaccattagtgaatactttgaggttttgaaacaactaaagccaattgtgtccctttgcatgaaggttgccccctccactaagttttcctctcaagtgtttagaatctattctgaaatgatgagggtcaatgttagagtgcctgcgaatactgacttgactagactggaacccattggcatttgggtttctagtgagccaggacagggtaaatcattctttacacatatgttgagtacctgtcttctgaagtcctgcaatttagaaggaatttataccaaccccacaggttcagaatttatggatggctatattgggcaggacattcatatcatagatgatgcagggcaaaatagagaggaaaaagatttggccttgttgtgtcagtgtatttcttctgtgccttttactgttccaatggcagatttgacagagaagggcactttttatacaagcaaaattgtgattgccaccaccaataaatttgattttacctcaatggttttgacagatccagcagcccttgaaaggagatttccgttccacttgcgcattagagctgtagccagctattcgcgcaacaacaaactagatgtggcccgttcaatggcggccatggcagatggttcttgctgggaatattccacagatggtggtagggcttggaagaccctctccatggatgaacttgtgaaacaaatcacggcagtttacacacagaggtcagatgcccttatggtttggaaaaggaagttgaataccatcaggaacgaaatgagccctggatcatccaccggcaggatttttgaacccttagaggaaacactctgtgctttggaacgtcgctttggtcaacttgctgatagtcttaaagacaactatcataaaacagctgatgagttgattgaagctatagaagatatgatggcaccgtcacagagtccttttgcatgctttgctgaatcctatcgacccaccattaaatatactgccagtgataaagttaaatcatgggttaaaaatcatatgaatagatggaaagaatttgtaatgagaaataaaggctggtttacacttttttctgtgctctcatcatttctctcgattcttactcttgtctatttacactataaaaaggagaagaaagaggaagagagacaggagcgggcttacaaccctcaaactgcaatttctaagaaggggggtaagcctaagctctcattagtgaaaaccacaaactttgttaatgaagcaccctatatgcaagatcttgaacattgctttgcacaaacggcctacatttcttctccagaaacccaagatataatacattgtgctgccttgagtgaagacaccattttggtttatggacattctcagttttattttaaccgctatgaggacctgcggttacattttaaaggggccatttttcccatagaagggggaaaaatttctcaagttaccgtgaatggacagcctatggatttgatacttgtgaagatagataaacttccaataacatttaaaaattatacaaaatattatacaactgaggttggcaaggaaactcttttaatttggaattcagaaaagggcaggttggccatgcctgttcaatgtgtggctccggctggtccggtggagacaatggaaggaacaattactcataagacctattcatataaagtggcatcaaaaaaaggaatgtgtgggggccttttggtcactagagtgcatggcacattcaaggttctgggaatgcacattgcaggcaatgggcaagttgcacgagctgcagcagttcactttatatccaatggtgcagctggctttatggatcaaggtgttgttgtggccaaagaaaagttacaaaagcccatttatttgccatctaagacagctttgaatcccagtcccttgaatggtgtagtccccgtgaaaatggaaccagctgtgcttagtcctcatgacaccaggcttgaagtcatcatgcccagcgttgtgaaaacagcggcagctaagtatagagttaatatttttaatcctgattttgagatttgggagagagtggtggatgagttaaaatcaaagtttagaaccaaacttggaattcataaacatgtctcttttcagaaagcagttcagggtttctcctccctttcatctcttgatctttccacatccccaggacaaaagtatgttgaaaagggtatgaagaagagagatcttttgtccactgagccattttggatgcatcctcaattggaaggtgatgttaaagatatacttggggccgtttactctggtaaaaagccccatacattttttgctgcacatttgaaagatgagttgcgcaaaaaagaaaagattgcgcaaggaaagacccgctgcattgaagcctgttcaattgactatgtgattgcctacagagttgtaatgtcctcactctatgaggcaatctatcaaactccggctcaggagttgggcctggcagtgggaatgaatccctggacagattgggatccaatgatcaatgttttgcagccatataactatggcctggattactcatcttatgatggcagcctttctgaacaactgatgagatatggagtggaaatacttgcctactgtcatgaacaaccagaggctgtaatgattcttcatgaacctgttataaactctcaacaccttgtgatggatgaaatctggcatgtgaatggtggaatgccctcaggggccccatgtacaactgtgctaaattccatatgcaatctgctagtttgtacatatttggcctatgagcagagcttggatattgaggtgttacccattgtttatggagatgatgtaattttttctgtttcatcccctttggatgctgaatacttggttcagagtgcagcccaaaattttggaatggaagtgacctcatcagataaatctggtccccctaaacttttgaaaatggatgagattgaatttttaaagaggacaacaaaattttttcctggctccacctacaaggtgggggccttgagcctggataccatggaacaacatattatgtggatgaagaatttggaaacctttccagaacaacttgttagttttgagaatgaattggtgttgcatgggaaagaaatttatgatgattataaaaataggtttaatcctattttgaatcaatggcgagtgtgcatgcaggactatgaagtggccctgcatcgcatgctacgctatgtttttgattga

SEQ ID NO: 10678 - DNA, 297 bp, unidentified
  misc_feature 1..297: note = Synthetic
  source 1..297: mol_type = other DNA
agggagacgtttgagtccaaacagctaatttctacctatcagagggtggtcaccgcgaccaagactcaatttccaaaaatcaactacaagcagctagagcgggtggaggagctccgtgagcaggagcttgaggccagagacgagctgcgacaggccctcgagccatttgaggaacatggatgtgaatatggctgcggagttgagcccgacgaactcctccagcagtggcgagttgagtgtctccccagaaccccctcgagagacccaggcctttttggggaaggtgactgtcattga

SEQ ID NO: 10679 - DNA, 27 bp, unidentified
  misc_feature 1..27: note = Synthetic
  source 1..27: mol_type = other DNA
atactaaatcagatatcgatgttataa

SEQ ID NO: 10680 - DNA, 69 bp, unidentified; identical to SEQ ID NO: 1312
  misc_feature 1..69: note = Synthetic
  source 1..69: mol_type = other DNA

SEQ ID NO: 10681 - DNA, 2196 bp, unidentified
  source 1..2196: mol_type = other DNA
  misc_feature 1..2196: note = Synthetic
atgaaggttatccaaggaatatataatggagtaacaacggtagaattggacactctgacagccgaaatagcagccacttgtactacacaacatccggattatgccattctagccgctagaatagccgtatcaaatctacacaaagaaacaaaaaaactatttagtgaagtgatgaaggatttatttaactatgtcaatcctaaaaatgggaaacattctccgattatttcaagtattaccatggatgtagttaacaaatataaggataaactcaactcagttattatttacgaacgagacttttcatacaactattttggttttaaaactttggaaaaatcctacttgctgaaaataaacaacaagatcgttgaaagacctcagcacatgttaatgcgtgtcgcagtaggaattcatcaatgggatatagactcagctatcgagacgtacaatctactttctgaaaaatggtttacgcacgcttctcctaccttatttaatgcgggaactagtcgtcaccaaatgtctagctgttttctacttaacatgatggatgatagtatagagggcatctatgatacgttaaaacgatgcgcattaatctctaaaatggcaggggggataggtctatcaattagtaatattcgtgccagtggaagctatatctccgggaccaatggtgcatccaatggtattattccaatgttgagagtttataataacaccgctagatacatagatcagggaggaaacaaacggcctggagttatgaccatatacttggaaccgtggcattctgatattatggcgttcctcgatcttaaaaagaatacaggaaacgaggaacatagaaccagagatctatttatagctctttggattcctgatctctttatgaaacgagtgaaggatgacggagagtggtcgttgatgtgtccggatgaatgtcctggattggacaatgtttggggagacgagtttgaacgattgtatacactatacgaaagagaaaagagatacaaatctataataaaggctcgtgtcgtctggaaagcgattatagaatcccagattgaaactggtacgccattcattctttataaggatgcgtgtaacaaaaagagtaatcaacaaaatttaggaaccatcaagtgtagtaatctttgcactgagataatacaatatgcggatgctaatgaggtagccgtttgtaatctggcatctattgcattgaacatgtttgtaatagatggacaatttgattttctcaaactgaaggatgtggtcaaagtaattgtcagaaacctcaataaaattatagatattaattattatcctattccagaagctgaaatctctaataagagacatagacctatcggtattggtgttcaaggattagcagacgcgtttattctcttaaattatccatttgatagcctggaagcacaagatctaaataagaagatcttcgaaaccatttattacggtgcattagaggcgagttgtgaactagctgagaaggaaggaccatacgatacatatgtaggatcgtacgccagtaacggtattctacaatatgatctttggaatgttgtaccgtcggatctttggaattgggaacctctaaaagataaaatcagaacatacggtcttagaaatagtttattggtggcacctatgccgactgcatcaactgctcaaattttgggaaataatgagtctgtggaaccgtataccagtaatatttacactcggagagtattgtctggagaatttcaagtagttaatccgcatctccttagagttttaaccgagagaaaattatggaatgatgagatcaagaataggattatggtagatggtggatctattcagaatacaaaccttccagaagatattaagcgagtttataaaactatttgggaaattccacaaaagacgatcataaaaatggctgcagacaggggagccttcatcgatcaaagtcaatctatgaatatccatatagcagatccgagttattccaaactaacaagtatgcatttttacggatggagtctcggtctaaaaacgggaatgtactatctacgtacgaaacccgcatccgctcccattcaattcacattggacaaggataaaataaaaccactggtggtttgtgattccgaaatctgtacatcatgcagcggttaa

SEQ ID NO: 10682 - DNA, 90 bp, unidentified; identical to SEQ ID NO: 1313
  source 1..90: mol_type = other DNA
  misc_feature 1..90: note = Synthetic

SEQ ID NO: 10683 - DNA, 516 bp, unidentified
  misc_feature 1..516: note = Synthetic
  source 1..516: mol_type = other DNA
atggataagaaaagtttgtataaatacttactactacgttcaactggagatatgcacagagccaaatctcccactataatgacaagggtaaccaataatgtatatttgggaaattataaaaatgctatggatgcgccatcatctgaagttaagttcaaatatgttttgaatttgacgatggataaatatacatttcctaactctaatattaatattattcatataccgttggtagatgatacaactaccgacattagtaaatattttgacgacgtgaccgccttcttatctaaatgtgatcaacgaaacgagcccgtgttggttcattgtgctgcgggagtaaatagaagtggtgctatgattttggcatatctaatgtctaaaaataaggagtcatcgcctatgctatattttttatacgtgtatcattctatgagggacttgagaggcgcatttgtggaaaatccatcgtttaaaagacagataatagaaaaatatgttattgataagaattaa

SEQ ID NO: 10684 - DNA, 516 bp, unidentified
  source 1..516: mol_type = other DNA
  misc_feature 1..516: note = Synthetic
atggataagaaaagtttgtataaatacttactactacgttcaactggagatatgcacagagccaaatctcccactataatgacaagggtaaccaataatgtgtatttgggaaattataaaaatgctatggatgcaccatcatctgaagttaagttcaaatatgttttaaatttgacgatggataaatatacattacctaactctaatattaatattattcatataccgttggtagatgatacaactaccgatattagtaaatattttgacgacgtaaccgcctttttatctaaatgtgatcaacgaaacgagcccgtgttggttcattgtgctgcgggagtaaatagaagcggggctatgattttggcatatctaatgtctaaaaataaggagtcattgcctatgctatattttttatacgtgtatcattctatgagggacttgagaggcgcatttgtggaaaatccatcgtttaaaagacagatcatagaaaaatatgttattgataagaattaa

SEQ ID NO: 10685 - DNA, 516 bp, unidentified
  source 1..516: mol_type = other DNA
  misc_feature 1..516: note = Synthetic
atggataagaaaagtttgtataaatacttactactacgttcaactggagatatgcgcagagccaaatctcccactataatgacaagagtaaccaataatgtgtatttgggaaattataaaaatgctatgaatgcaccatcatctgaagttaagttcaaatatgttttaaatttgacgatggataaatatacattacctaactctaatattaatattattcatataccgttggtagatgatacaactaccgatattagtaaatattttgacgacgtaaccgccttcttatctaaatgtgatcaacgaaacgagcccgtgttggttcattgtgttgcgggagtaaatagaagcggggctatgattttggcatatctaatgtctaaaaataaggagtcatcacctatgttatattttttatacgtgtatcattctatgagggacttgagaggcgcatttgtggaaaatccatcgtttaaaagacagatcatagaaaaatatgttattgataagaattaa

SEQ ID NO: 10686 - DNA, 270 bp, unidentified
  source 1..270: mol_type = other DNA
  misc_feature 1..270: note = Synthetic
atttctacctatcagagggtggtcaccgcgaccaagactcaatttccaaaaatcaactacaagcagctagagcgggtggaggagctccgtgagcaggagcttgaggccagagacgagctgcgacaggccctcgagccatttgaggaacatggatgtgaatatggctgcggagttgagcccgacgaactcctccagcagtggcgagttgagtgtctccccagaaccccctcgagagacccaggcctttttggggaaggtgactgtcattga

SEQ ID NO: 10687 - DNA, 270 bp, unidentified; identical to SEQ ID NO: 10686
  source 1..270: mol_type = other DNA
  misc_feature 1..270: note = Synthetic

SEQ ID NO: 10688 - DNA, 36 bp, unidentified; identical to SEQ ID NO: 1318
  misc_feature 1..36: note = Synthetic
  source 1..36: mol_type = other DNA

SEQ ID NO: 10689 - DNA, 36 bp, unidentified; identical to SEQ ID NO: 1319
  source 1..36: mol_type = other DNA
  misc_feature 1..36: note = Synthetic

SEQ ID NO: 10690 - DNA, 75 bp, unidentified; identical to SEQ ID NO: 1320
  misc_feature 1..75: note = Synthetic
  source 1..75: mol_type = other DNA

SEQ ID NO: 10691 - DNA, 75 bp, unidentified; identical to SEQ ID NO: 1320
  source 1..75: mol_type = other DNA
  misc_feature 1..75: note = Synthetic

SEQ ID NO: 10692 - DNA, 1134 bp, unidentified
  source 1..1134: mol_type = other DNA
  misc_feature 1..1134: note = Synthetic
atgggtcacgtttatcttcaggctagcaccggatatggacttgctcggataaccaacgttaatggggtggagtctaaattacccaacgcgggtgttataaacgccacattccaccccggcgggcccatatacgatctcgcgttgggtgttggggaatcaaatgaagattgtgaaaagactgttccgcatttaaaggttacgcagttgtgtaggaacgacagcgatatggcttctgtagcaggtaacgctagtaatatctcaccacagcccccgtcgggcgttccaaccggaggggaatttgtactgatacctaccgcgtattattcacagctgttaaccgggcagactaaaaatccgcaggtatcaattggagctccaaataacggacagtatatcgtcgggccatatggatctccacacccgcctgccttcccacctaatacagggggttatggttgccctccgggacacttcgggggaccgtacgggtttccgggatatccaccacccaatcgtttggaaatgcaaatgtccgcatttatgaacgcattggccgccgaacggggtattgacttgcagaccccgtgtgtaaattttccagacaaaaccgatgtccgtcgtccaggaaaacgggatttcaagagcatggatcaaagggaattggattctttttatagtggggagtctcaaatggacggagagtttccctcaaatatatattttcccggtgaaccaacgtatataacgcatcggagacgtcgagtttctccatcatattggcagaggagacacagagtttctaatggtcagcacgaagagcttgctggggttgtggcaaaactgcaacaggaggttacagagctaaaatcacaaaatgggacacaaatgcctttgtcgcaccatacaaatataccagaggggacacgggatcctcgaatatcgattttattaaaacagcttcaaagcgtttcgggtctatgctcatcccaaaatacaacaagcaccccacatacagatacagttggacaagatgtaaatgcagtggaggcgagttccaaggcccctttaatacaggggtccacggcagacgacgccgatatgtttgcaaatcagatgatggtggggcggtgttaa

SEQ ID NO: 10693 - DNA, 54 bp, unidentified; identical to SEQ ID NO: 1322
  source 1..54: mol_type = other DNA
  misc_feature 1..54: note = Synthetic

SEQ ID NO: 10694 - DNA, 1656 bp, unidentified
  misc_feature 1..1656: note = Synthetic
  source 1..1656: mol_type = other DNA
ataactatgtttaataataattcatcaacgaatatcgataacatgtgtcatttatactttaaatacattgaagtctgtccatcttctctattgtttagactgtttgtagaatgctgtgatataaacaaactagtagaaggtacgactccgttacactgttatctaatgaatgaaagatttgaatcatctgttttaaaaaacctattaaaggagtatggcatgaatacgtttaatgttcgtgacagtgatggccatattccgttacacaaatatctaactcatgataaagttgagaatgatatctttgatatgctttctgatagtatagatagctttagcgaatataaaaatatattaatacactatatatattctaaacttgattcaaaaccgataacctactacgtgctatataagttgttaagaaaaggagcagaccctaattatgcagatgatgaaggtaatacttttcttcattacttctgcatctatatgtccgcttatgagaaaatgtcattgatgcatcgtgaaaagaaatttattaaagagttggtaaaatatggagccgatattaataaagtaaataatataggaaatacgcctctacataactacgtatctcaatatgatcacagtcctagtataatatttactcttttgtcattgggagctgacttgacaatacaaaacaatgatcgtctaactcccataatggaatatataaaatgtgaagatatagaatacaatattcttttaatgttaattaattggtatgaatcaaaatacaaaaaactagaaaaggaagaaggccagcatctcttatatctattcataaggcataatgatagtaatgaccttaatatactatcctatttactaaagaagtttgacatgaaaaacgatgaatactataatgacattacacctctacataatgcttgtatagcgtgcaacattgatataatgtcttatctcgtatatattggatgtaatatcaatctcccaactaaagacaacaagagtatatttgatatcatatcaacacaaccaaataatataatatatagaaattgtatcatctatcatattatcagaaacggactagatatatctttatccgtaatcaaatcattacttagtattattccatatcttccaactgatcactacgtaagatatataataacttattgcatcttaatgaacaacaatttcataaaagaatacaataatcaatgtttaaatcataattacagagaattatttgttaatttcataacattcgattatatagataatatcgtttcagattgcgtcaatgatataaataggcttaaacaagaaaactattataatatattaagatatgaagatataaaatattaccacctagttaatgatatctatgttacaaacaagacttttcccatgtacacggacattatagagaattgtaacttacgcatgagacgtaaatataaactcataaatacggtcattgacaaaatatatagtatctcttcagttgataatcgcgaactctcactattgcctccagaaatcatacgcgagataatatcaaagttaagtgaatacgatttaaatactattttgtatggtcgtaaccatctaaaacattattataaatttaactag

SEQ ID NO: 10695 - DNA, 156 bp, unidentified
  misc_feature 1..156: note = Synthetic
  source 1..156: mol_type = other DNA
atgaagattgagggacaggaggaatttgacatccccttcagagtgtggaggaagtttgcagcccgccggggcctgcagtaccagagctgggaagaggggagcgaagtgctgctgacagaaaacatggacagagacctggtttcagatttcaagtaa

SEQ ID NO: 10696 - DNA, 1278 bp, unidentified
  misc_feature 1..1278: note = Synthetic
  source 1..1278: mol_type = other DNA
atggtcatgttctcccaggaccacgtccagatcgtctacggctccacacgcatctgcaagtccctggccccggccaacaagagaaagacccatcgcaccatcgtggtagcgccgcggcggggttttttgcgtattcccccggacgggcaggacgttaaccacgtcaagatcgtacccaccaccacctcctcctccctcgcgccgccccgtgacgacgaacggcggccgaccccgccgttgcggccgccgctcacagtctatccctatggcacgtcgctgatccgcaggtcagctagggacgcaaaactccgctccaagctaatcgtcttccatataactcggcccgcactcggtcagcacccgcagaatcccgggatctcgggccctgcggccatggatcatagtgagttcctcaccagctttcgtcgcgaggtcgatcggcaaaccgtactgaccgccgagagcgcgcccgccactgtggaagtctgtctgggcgacgctctgcccggcggcgtcatgggtggcggaggactgccggcaggtgtgggctcggccagcgccgccgtggccgccgctgccgccgctgtggccggagtgcccgtcgccgcaaaccccgtcatgcccgccaccgccacggtcaccacgccgcccatgatcgaccttaccagccaccaccggccgctgacgctgtttacgccggcctccgcggccgctgcgcccgccgtggccaccaacggcggcaacgccacctacattttgccggccgactgtcggtacgcgccactctttgccagtaagtataagtacgtcttcgaagaggtgtcacgtctcatgcggctgcacgactccacggccgtgcagctgcaaatcagcgcctcgtgcggcaacgctttccaggccctcaagagtgccctgctcaagttgcacaacgtcaccgtgttagcgggccagcagctcatcacgcagacgatgccgcacacgccacaggccgtagccacgttcaaattctttcaccaggatcccaaccgcgttctggactgcatccgtccggtggtgccgcgctctacttcgtaccacgagacgggtgtataccagatgtgggtctcgggcgccaccaagaaagacctgttcgacgccgtaaccctgtgcgcttccatcgtagaaaagcagccagacgtatttaatatcaacgtcagcttgttgacgtacccttcgatcgcggcgccccacttgccgctgtacaacgaattcaccagctttcgcctgcccacctcatga

SEQ ID NO: 10697 - DNA, 27 bp, unidentified
  source 1..27: mol_type = other DNA
  misc_feature 1..27: note = Synthetic
atactaaatcagatatcgatgttataa

SEQ ID NO: 10698 - DNA, 12 bp, unidentified
  misc_feature 1..12: note = Synthetic
  source 1..12: mol_type = other DNA
gtgaaaagctag

SEQ ID NO: 10699 - DNA, 267 bp, unidentified
  misc_feature 1..267: note = Synthetic
  source 1..267: mol_type = other DNA
gtggcttgctgcagtatgaatctacggctgttgtactggagacctgtcgtgcaatggcaggtgcgcaactgcgataacatctgctatatctgtcgccgcgggctgggaaagggctgcttgcgaccccagtgcgagatcgactgcgccttctgcctgcccgtgtgcgggcacggctaccacgagcactgcctgccgcctcggacggaggtctgctttgtctgcaggcagaagctcattttttactccttcaatatacgcaaaggatga

SEQ ID NO: 10700 - DNA, 2835 bp, unidentified
  source 1..2835: mol_type = other DNA
  misc_feature 1..2835: note = Synthetic
atggccaccccatcgatgatgccccaatgggcatacatgcacatcgccggacaggatgcttcggagtacctcagtccgggtctggtgcagttcgcccgtgcaacagacacctacttcagtatggggaacaaatttagaaaccccacagtggcgcccacccacgatgtgaccaccgaccgtagccagcgcctgatgctgcgcttcgtgcccgttgaccgggaagacaatacctactcttacaaagttcgctacacgctggctgtaggcgacaacagagtgcttgacatggccagcacattctttgacattcggggggtgcttgatagaggtcctagcttcaagccatattccggcacagcttacaattcactcgctcctaagggcgcgcccaatacatctcagtggatagttacaacaaatggggacaatgcagtaactaccaccacaaacacatttggcattgcttccatgaagggagacaatattactaaagaaggtttgcaaattgggaaagacattaccactactgaaggagaagaaaagcccatttatgccgataaaacatatcagccagagcctcaagttggagaagaatcatggactgatactgatggaacaaatgaaaagtttggtggaagagcccttaaaccagctaccaacatgaagccatgctacgggtcttttgcaagacctacaaacataaaagggggccaagctaaaaacagaaaagtaaaaccaacaaccgaaggaggggttgaaactgaggaaccagatattgatatggaatttttcgatggtagagatgctgttgcaggagctttagcgcctgaaattgtgctttatacggaaaatgtaaatttggaaactccagacagtcatgtggtatataaaccagaaacgtctaataactctcatgcaaatttgggtcaacaagccatgcctaacagacccaattacattggcttcagggataacttcgtaggcctaatgtactacaacagtactggaaatatgggagttttggctggccaagcatcacaactgaatgcagtggttgacttgcaggacagaaatactgaactgtcatatcagcttttgcttgattctctgggagacagaaccagatacttcagcatgtggaatcaggctgtggacagttacgatcccgatgttcgcattattgaaaatcatggcatcgaggatgaactgcctaattactgttttcctctgaatggcataggaccagggcacacatatcaaggcattaaagttaaaaccgatgacactaatggatgggaaaaagatgctaatgttgctccagctaatgaaataaccataggcaacaacctggctatggaaattaatatccaagctaacctttggagaagttttctgtactctaatgtggctttgtaccttccagatgtttacaagtacacgccacctaacattactttgcccactaacaccaacacctatgagtacatgaacgggcgagtggtatccccatccctggttgattcatacatcaacattggcgccaggtggtctcttgacccaatggacaatgtgaatccattcaaccaccaccgcaatgctggtctgcgctacaggtccatgcttctgggaaatggtcgttatgtgcctttccacatacaagtgcctcagaaattctttgctgtcaagaacctacttcttctacctggctcctacacctacgagtggaacttccgaaaggatgtgaacatggtcctgcaaagttcccttggaaatgacctcagaacggatggtgctaccataagtttcaccagcatcaatctctatgccaccttcttccccatggctcacaacacagcttccacccttgaagccatgctgcgcaacgataccaatgatcagtcatttaacgactacctctctgcagctaacatgctttaccccattcctgccaatgcaaccaacattccaatttccatcccatctcgcaactgggcagccttcaggggctggtccttcaccagactcaaaaccaaggagactccatctcttggatcagggttcgatccctacttcgtatattctggatctattccctacctggatggcaccttttaccttaaccacactttcaagaaggtctccatcatgtttgactcctcagtcagctggcctggcaatgacaggctgttgagtccaaatgagtttgaaatcaagcgcactgtggacggggaaggatacaacgtggcacaatgcaacatgaccaaagactggttcctggttcagatgcttgccaattacaacattggctaccagggcttttacatccctgagggatacaaggatcgcatgtactcctttttcagaaacttccagcctatgagcaggcaggtggttgatgaggttaattacactgactacaaagccgtcaccttaccataccaacacaacaactctggctttgtagggtaccttgcacctactatgagacaaggggaaccttacccagccaattatccatacccgctcatcggaactactgccgttaagagtgtcacccagaaaaagttcctgtgcgacaggaccatgtggcgcattcccttctccagcaacttcatgtccatgggggcccttaccgacctgggacagaacatgctctatgccaactcagcccatgcgctggacatgacttttgaggtggatcccatggatgagcccaccctgctttatcttcttttcgaagtcttcgacgtggtcagagtgcaccagccacaccgcggcgtcatcgaggccgtctacctgcgcacaccgttctcggccggcaacgccaccacataa

SEQ ID NO: 10701 - DNA, 27 bp, unidentified
  source 1..27: mol_type = other DNA
  misc_feature 1..27: note = Synthetic
atgttcatctgtagaacagaaatgtaa

SEQ ID NO: 10702 - DNA, 60 bp, unidentified; identical to SEQ ID NO: 1336
  misc_feature 1..60: note = Synthetic
  source 1..60: mol_type = other DNA

SEQ ID NO: 10703 - DNA, 1404 bp, unidentified; identical to SEQ ID NO: 10573
  misc_feature 1..1404: note = Synthetic
  source 1..1404: mol_type = other DNA

SEQ ID NO: 10704 - DNA, 33 bp, unidentified; identical to SEQ ID NO: 1134
  source 1..33: mol_type = other DNA
  misc_feature 1..33: note = Synthetic

SEQ ID NO: 10705 - DNA, 279 bp, unidentified
  source 1..279: mol_type = other DNA
  misc_feature 1..279: note = Synthetic
atgatgtcgactcggttaatgccaatgagtttgaccctgatacaggatacctggattttaaaaataactatccaggggcactcaatacaaataccgctaggacattcttcctcaatgccgcaaaggccaagaatgtgctccgcaataaacctgacaagaaggtcaatcctaaatttggaaactgggaggtggaggttgtcaataatcattttcctggaaacaggaacaacccaattggtaaagatgatcttaccctccacagaatttcaggatatttag

SEQ ID NO: 10706 - DNA, 15 bp, unidentified
  source 1..15: mol_type = other DNA
  misc_feature 1..15: note = Synthetic
atgattacagcatga

SEQ ID NO: 10707 - DNA, 477 bp, unidentified
  source 1..477: mol_type = other DNA
  misc_feature 1..477: note = Synthetic
atgcaccaaaagagaactgcaatgtttcaggacccacaggagcgacccagaaagttaccacagttatgcacagagctgcaaacaactatacatgatataatattagaatgtgtgtactgcaagcaacagttactgcgacgtgaggtatatgactttgcttttcgggatttatgcatagtatatagagatgggaatccatatgctgtatgtgataaatgtttaaagttttattctaaaattagtgagtatagacattattgttatagtttgtatggaacaacattagaacagcaatacaacaaaccgttgtgtgatttgttaattaggtgtattaactgtcaaaagccactgtgtcctgaagaaaagcaaagacatctggacaaaaagcaaagattccataatataaggggtcggtggaccggtcgatgtatgtcttgttgcagatcatcaagaacacgtagagaaacccagctgtaa

SEQ ID NO: 10708 - DNA, 153 bp, unidentified
  source 1..153: mol_type = other DNA
  misc_feature 1..153: note = Synthetic
atgcaccaaaagagaactgcaatgtttcaggacccacaggagcgacccagaaagttaccacagttatgcacagagctgcaaacaactatacatgatataatattagaatgtgtgtactgcaagcaacagttactgcgacgtgaggtgtattaa

SEQ ID NO: 10709 - DNA, 48 bp, unidentified; identical to SEQ ID NO: 1342
  misc_feature 1..48: note = Synthetic
  source 1..48: mol_type = other DNA

SEQ ID NO: 10710 - DNA, 315 bp, unidentified
  source 1..315: mol_type = other DNA
  misc_feature 1..315: note = Synthetic
atggctgttagaaagttatggaagacagtcgtacagctgttttctaaatcgaaatccgaggagtgcaatacagaagccggaacgatggaggtctcctgcttaaagtacggggtgcaaggtttgaatgcggattgcagctatgtcaaatcgcaatgcataaaactttcggaatgcgagtgtttatatacttttgcttctgatgtatgtaaggaagattttcataattccgaggaaatgaaggtgtttgttgtccaacattcgcaggaaatcgttggtggaacggatttttctgtacatgcggaggaaagcgtgtga

SEQ ID NO: 10711 - DNA, 657 bp, unidentified
  misc_feature 1..657: note = Synthetic
  source 1..657: mol_type = other DNA
atgtactcgttagtatttgttattttgatgtgtataccatttagttttcaaacagtgtatgatgataaatcggtatgcgattctgataataaagaatatatgggaatagaagtttatgtagaagcaacgctagacgaacccctcagacaaacaacgtgtgaatccgaaatccataaatatggtgcatctgtatcaaacggaggattaaatatttctgttgatctattaaactgttttcttaattttcatacagttggtgtatacactaatcgcgatactgtatacgcgaagtttactagtttggatccatggactatggaacctataaattctatgacatatgacgatctagtaaaattaacagaagaatgtatagtggacatttatttaaaatgtgaagtggataaaacaaaggatttcataaaaactaacggtaatagattaaaaccaagagactttaaaactgttcctcctaatgtaggaagcataatagaactacagtctgactattgcgtaaacgatgtaactgcatacgtcaaaatatacgatgagtgtggaaacattaaacagcattccattccaacactaagagattattttaccaccacgaatggtcaaccacgtaaaatattaaagaaaaaatttgataattgttaa

SEQ ID NO: 10712 - DNA, 660 bp, unidentified
  misc_feature 1..660: note = Synthetic
  source 1..660: mol_type = other DNA
atgtactcgttagtatttgttattttgatgtgtataccatttagttttcaaacagtgtatgatgataaatcggtatgcgattctgacaataaagaatatatgggaatagaagtttatgtagaagcaacgctagacgaacccctcagacaaacaacgtgtgaatccaaaatccataaatatggtgcatctgtatcaaacggaggattaaatatttctgttgatctattaaactgttttcttaattttcatacagttggtgtatacactaatcgcgataccgtatacgcgaagtttgctagtttggatccatggactacggaacctataaattctatgacccatgacgatctagtaaaattaacagaagaatgtatagtggacatttatttaaaatgtgaagtggataaaacaaaggatttcatgaaaactaacggtaatagattaaaaccaagagactttaaaactgttcctccttctaatgtaggaagcatgatagaactacagtctgactattgcgtaaacgatgtgactacatacgtcaaaatatacgatgagtgtggaaacattaaacagcattccattccaacactaagagattattttaccaccaagaatggtcaaccacgtaaaatattaaagaaaaaatttgataattgttaa

SEQ ID NO: 10713 - DNA, 42 bp, unidentified; identical to SEQ ID NO: 1349
  source 1..42: mol_type = other DNA
  misc_feature 1..42: note = Synthetic

SEQ ID NO: 10714 - DNA, 66 bp, unidentified; identical to SEQ ID NO: 1350
  source 1..66: mol_type = other DNA
  misc_feature 1..66: note = Synthetic

SEQ ID NO: 10715 - DNA, 3663 bp, unidentified
  source 1..3663: mol_type = other DNA
  misc_feature 1..3663: note = Synthetic
ctgttcgagatgcagctggcccatatcctgcagcccattcggcaagctttttcccaatgcactattcttcagtacatggatgacatcctcctagcaagcccctcccataaggacctacaactactctcggaggtcacaatggcttccctgatctcccatgggttgcccgtgtccgaaaacaaaacccagcagacccctggaacaattaagttcctggggcagataatttcgcccaatcacctcacttatgatgcagtccccacggtgcctatacggtcccgctgggcgctacctgaacttcaggccctacttggcgaaattcaatgggtctccaaaggaactcctaccttacgccagccccttcacagtctctactgtgccttgcaaaggcatactgatccccgtgaccaaatatgtttaaatccttctcaagttcaatcattagtgcagctgcggcaggccctgtcacagaactgccgcagtagattggtccaaaccgtgcccctcctggggctagttatgttgaccctcactggcaccactactgtagtgttccagtccaaacagcagtggccacttgtctggcttcatgcccccctaccccacactagccaatgcccctggggacagctacttgcctcagctgtgttactactcgacaaatacaccttgcaatcctatgggctcctctgccaaaccatacatcataacatctccacccaaaccttcgaccaatttattcaaacatctgaccaccccagtgtccctatcttgtaccaccacagtcaccgattcaaaaatttaggtgcccaaactggagaactttggaacacttttcttaaaacagctgccccattggctcctgtgaaagccctcatgccgatgtttactctttccccggtgatcataaacgccgccccctgcctgttttcagacggatctacctctcgggcggcctatattctctgggacaagcatatattgtcacaaaaatcatttccccttccaccaccgcataagtcggcccaacgggccgaacttctcggactgttacatggcctctccagcgcccattcgtggcgttgcctcaacatatttctagactctaaatatctttatcattaccttcggacccttgccctaggcaccttccaaggcaggtcctctcaggccccctttcaggaccccctgccccgcttgctatcgcgtaaggtcgtctatttgcaccacgttcgcagccataccaatctgcctgatcccatcaccaggctcaacgccctcacagatgccctattaatcacccctgtcctgcagctctctcctgcagaattacacagtctcacccattgcggacaggcagccctcacgttgcaaggggcaaccacaactgaagcctccaatatcctgcgctcctgccacgcctgccgcaaaaataacccacagcatcagatgcctcggggacacatccgccgtggcttacttcctaaccacatctggcaaggcgacattacccatttcaaatataaaaatacactgtatcgccttcatgtatgggtagacaccttttcaggagccatctcagctacccaaaagaaaaaagaaacaagctcagaagctatctcctctttgctccaggccattgcttatctaggcaagcctaactacataaacacagacaatggccctgcctatatttcccaagacttccttgatatgtgtaccccccttgctattcgccatactacccatgtcccctacaatccaaccagttcaggacttgtagaacgctctaatggcattcttaaaaccttactatataagtactttactgacaaacctgacctgcctatggataacgctctatccatagccctatggactatcaaccacctaaatgtgttaacccattgccacaaaacccgatggcagcttcaccactccccccgactccagccgatcccagagacacgttccctcagcaataaacaaacccattggtattatttcaagcttcctggtcttaatagccgccagtggaaaggaccacaggaggctctccaagaagccgccggtcctgctctcatcccagtaatcgctagttctgcccagtggatcccgtggaggctcctcaagcgagctgcatgcccaagacccgtcggggccccgccgatcccaaagaaaaagaccaccaacaccatgggtaagtttctcaccactttgattctattcttccagttctgcccccttattcttggtgattacagtcccagctgttgtaccctcacaattggagtctcctcataccactctaaaccctgcaatcccgcccagccagtttgttcatggaccctcgacctactcgccctttcagcagatcaagccctacagcccccctgccctaatctagtaagttactccagctaccacgccacctattccctatatctatttcctcattggattaaaaagccaaaccgaaatggcggaggctattattcagcctcttactcagacccttgttccttaaagtgcccatacctggggtgccaatcatggacctgcccctatacaggagccatctccagcccttactggaaatttcagcaagatgtcaattttactcaggaagtttcacgcctcactattaatctccatttttcaaaatgcggttttcccttctcccttctaatcgacgctccaggatatgaccccatctggttccttaataccgaacccagccaactgcctcccaccgcccctcctctactcccccactctaacctagaccacatcctcgagccttctataccatggaaatcaaaacttctgacccctgtccagctaaccctgcaaagcactaattatacttgcattgtctgtatagatcgtgccagcctatccacttggcacgtcctgtactttcccaacgtctctgttccatcctctccctctacccctctcctttacccatcattagcgcttccagccccccacctgacgttaccatttaactggacacactgcttcaacccccagattcaagctatagtctcctccccctgtcataattccctcatcctgccccctttttccttgtcgccagttcccaccctaggatcccgttcccgccgagcggtaccggtggcggtctggcttgtctccgccctggccatgggagccggaatggctggcgggatcactggctccatgtccctcgcctcgggaaggagcctcctacatgaggtggacaaagatatttcccaattaactcaggcaatagtcaaaaaccacaaaaatctactcaaaattgcgcaatatgctgcccagaacagacgaggccttgatctcctgttctgggaacaaggaggattatgcaaagcactacaagaacagtgctgttttctaaatattactaattcccatgtctcaatactacaagaaaggcccccccttgaaaaccgagtcctcactggctggggccttaactgggaccttggcctctcacaatgggctcgagaggccttacaaactggaataacccttgttgcgctactccctcttgttatccttgcagggccatgcatcctccgtcagctacgacacctcccctcgcgcgtcagacacccccattattctcttataaaccctgagtcatgcctgtaa

SEQ ID NO: 10716 - DNA, 2949 bp, unidentified
  source 1..2949: mol_type = other DNA
  misc_feature 1..2949: note = Synthetic
atggcgaggcgcacggtagatttcaaaaagttgatagagcagctgcgggcacgggccacggacaaagcggaggcgttaaataccgtgagccaattggagatcggcgcggtggatgcccaggacgtgaccgcgagcgccgtgcgcgccttcgtgggtgcgttgccgagctcgggctaccactttggcttcgtgcgtcagaacgtggtcttttacctcctaagccacgccacggtacagacggcgcgcgacccgctgtacgccgccgagcagttgcacgaacagctggaccgcttcctgcgacaccagcacgacggcggcggagacgaggaccggttgccgttctaccacaacggggccacgctgacggctttccagaagctgttgcagaccctgcgcgagatccagaccgtaatagccgaacagagcggcggcaccgcggcggcggcggacttgatcgccagtaacaacgcgtcgaccgagcgccgcggcaagaagggcggttcgagttccgggggccagcagccgctggtccgccgggtgatcacgcagctggaaacggctgccacggaggcgcggccctacgtcaattgtcgcgccgtggccgaactcctggacctgacctaccagcggctcatctactgggcctgcacgctcatgccctacgtgttgtttcggcgcgacaccgacaccgaactggacacggtgcttctgatgcattttttttacacacactaccgttcggttaacggcgatttggccgtggagtttcaaaactacgtcaagaacagcgtgcggcacatgagctctttcgtcagttccgatatcgacggcgaccagaagcccggtgccgaacacatgcgtgacgtcagctacaagctgttcgtgggtaatctgcaagcgcgtgacgccagcggcctcatgtttcccatcattagcacgcgcatctccaccgtgaacctttacctgtcgcccgaacgtatgtttttccacccgggtctgatctcgcgtctgttgagtgaggaagtttcgccgcgcgccaacctagacgcttacgcgcgcgtgtgcgatcgcgtgctggaagaccacttgcatacgccgcgacgcgtgcaacggctactagatctgacgcagatggtaatgcgactggtggaactgggtttcaatcacgatacctgcgcggcctacgcacaaatggcgctgatccagccggccagtcagaagagctcgctctttgtcagcgagattcgcgagaaactcatacagatcatctacaatttttacacgtttttcatgtgcctctatgtgtacagccccacgttcctgttcgaccaccggcggcggttgattttggagcagcatcgatccacgttgatcggctccaaggaggaactacagcacgtctggagcaacgtgacactgaacgtcaatacgcactttgcggttcagtacacggaagaagactttgaggcacatacgaagggtgccacggaggcggagcgcgagtacctgtatcgggacctgcacagcaagtggggcgtgcacctgtttaccttgcgtccgtctcgcggcgcggccggcgcggcctcgcctttgcctccgcttgacggcgtcacacgctccgacatcttacgcgaatgcgcgctcgttaatctgaacgaaggccgcgtcaactacgcctccctgctagccttcagccatcatcccgagttccccagcatcttcgcgcagttggtggtggtaactgagttctcggagatctttggtatcccgcagggcctgtttcaagccgtgggttcgccgcgtcttttcgcactcattcagctgtgccgtgtattgttgcccgagcaggtgacgctgtaccagaacctggtctccatctacaacctgaccaccttcgtcaagcacatcgacgccgcggtttttaagacggtacgcgattgcgtcttcgacatcgccacgactctcgagcacctcagcggtgtacccgtcacgcccaatgtggacctgctggccgagctcatggcgcgctccgtagcgcataacctgtacaccaccgtcaacccgctgatcgaggacgtgatgcgcagcagcgccggcagtctgagaaactatctgcgacatacgcgactctgtttcggtctggcgcgtggccgggcgcgcctctcggaggacggcgtgacggtgtacgtggaggtacaaggtcaatacggactacgcgtacccaccacgcgtttcgtagaacagttgcgcgagctggttcgccgcgatcggctgttggccgagaatctgcgcggcttgaacgagcgcctgctgagtgttcgcgtgcgcgtacgtcagatcagcagcgacacagaggaagtaagccgacacgccaagggtcaccgcacggtggcccagatgagcaaggcgctcaaaaagacggcctccaaaatcaaaatgttggaaacacgcgtgacattggcgctcgagcaggcgcaacgttccaatggcgccgtcgttaccgcggtgcaacgcgcgctagccgtctttgacgtactaagtcgcgagaacttggaacgccgcggcgcacagctctgtctgacggaagcgacgagcctactgcaccgacatcgcgcgctagcgccgatgacctggcccgcgggcacgggcgttgcggcggcggccgaagcggatggcgccttacgcgagttcttggaggcgccctgggaatcggcgccccaaccgccgcgactccgcatgacgcccgacaccgatcacgaagaatcaacggcaggcgcgacgtccgtaccggaggtcctgggtgcgcgctacgaacccgcacacctggccgcgagcgacctattaaactggtacatcgtccccgtaagccaggcgcagcaggacatcttgtcttcgatcgacccgcccgccggctcgacatcggtgtccctgccgccggcctcgccatga

SEQ ID NO: 10717 - DNA, 45 bp, unidentified; identical to SEQ ID NO: 1356
  misc_feature 1..45: note = Synthetic
  source 1..45: mol_type = other DNA

SEQ ID NO: 10718 - DNA, 72 bp, unidentified; identical to SEQ ID NO: 1357
  source 1..72: mol_type = other DNA
  misc_feature 1..72: note = Synthetic

SEQ ID NO: 10719 - DNA, 30 bp, unidentified
  source 1..30: mol_type = other DNA
  misc_feature 1..30: note = Synthetic
atgcgatcctgttcaaatttcacaaactaa

SEQ ID NO: 10720 - DNA, 1476 bp, unidentified
  misc_feature 1..1476: note = Synthetic
  source 1..1476: mol_type = other DNA
atggccaggttctggaggagatggagaaaaagacccagaatctggagaaggagatacaggtcctacagacctttccgccgttggagccacaggaggtgggggaggaggcaccggagacatttcagacatcgctatgctgcggtaagatactgtccatctcgaagacataaaaaattagtagtgagcgggtgggaaccgctaggaaatgtctgtgctacgaccacagtctgttcagaagctaaaccctataagatattagaatgtaaggaatctgagatacaacaagtagcaaatcaaatgaataaggacggagaatggaatggttcctggggacaccactggttctctttcgcaggcctattagccagatctcaatactttttcaacacattctccacagactggagatcatatgactatctacagtttctagggggatatgtttggttgcctagacagatgtatctggactggatgttttacatagactatgacttacaagacaaagtaacaggtgaaaaaatggatatgtacaagaactcaaagacgtggttccacccagccatcctactaaatagacgggggggtatcatagtgggtagtccacatagatttggtataaagacaatgttcaggagactcaaagtaaaacctcctgctaactgggagggcctatataacctccctgacgcgctccattatatattttttcactgggtctggacatggattgatttggaacagtcttttatggacagtgactgggttaaacatataagatctggagacattggaagccaaaaaccctgtgaagacgttccatggtttctcggaggaatagagactaaacaacccactgtacaacaaggttttgacaaaagagcatcttgggttgatagagagaaatactgttgtaaaaagcagagaaacttctcagacccaatggataattatggcagatggggacccttctgtccatatgtgtatgggatgccatataatcaaagcagatctctgtggttcaaatataaatttttcttcaagctctctggagactctgtctaccgaagaccccccacctccgaagccgaggaactggtgcccgaagccccaggacaacaacaaaatggccctaagcaacaaataccgtctagctccatactcaaaaggccccttacgccttccgacatccttccgggagacctcgactcagacggatgcatcaaagaaagccctcttcgaagaattattagctctcatagaacaggacagccaaccttgttggtgccaaagagagtcagatttagacttggaaagcgagacagacagcgaaagatccatagaattcttaggcagctcatgggaggacgaagagaatccggggggggaaggcccccccctggtcccccccgaaggaggggcccaatggccctccagcttccgcttttagctcatttgcatatacttcctcaataa

SEQ ID NO: 10721 - DNA, 30 bp, unidentified; identical to SEQ ID NO: 1360
  misc_feature 1..30: note = Synthetic
  source 1..30: mol_type = other DNA

SEQ ID NO: 10722 - DNA, 60 bp, unidentified; identical to SEQ ID NO: 1361
  source 1..60: mol_type = other DNA
  misc_feature 1..60: note = Synthetic

SEQ ID NO: 10723 - DNA, 6582 bp, unidentified
  misc_feature 1..6582: note = Synthetic
  source 1..6582: mol_type = other DNA
atggggtcacaagtctcaacccaacgatcgggttcccacgaaaattcgaactcagcatcagaaggatctactataaactacaccaccatcaactattacaaggatgcatatgctgccagcgcgggtcgccaagatatgtctcaggaccctaagaaatttacagaccctgtgatggatgtcatacacgagatggctcctcccttgaaatcacccagtgctgaagcttgtggttatagtgatcgagttgcccaactcacaattggaaactccacaatcactacacaagaagctgcaaacattataatagcatatggggaatggcccgagtattgcaaggacgctgatgccacagctgttgacaagcccaccagacccgatgtgtcggtaaataggttcttcacccttgatactaaatcgtgggctaaagactcgaagggatggtactggaaattcccggacgttttgacggaggtgggcgtgtttgggcagaatgcgcaattccattatctgtatagatccggattctgtgtgcacgtgcagtgcaatgccagcaaattccaccagggtgctctcttggttgccatactgcctgagtacgtgctgggcaccattgccgggggcgatggtaacgagaactcacatcccccgtacgtcaccacccagccaggacaggtgggtgctgtacttacaaatccttatgttttggatgctggggtaccccttagtcaattgacggtgtgtccgcatcagtggattaacctacgaaccaacaactgtgcgaccatcatagtaccatacatgaatactgtaccattcgattcggccctaaaccattgcaactttggcttaattgtagtgcccgtagtaccactcgactttaacgctggagctacatcagaaataccaataactgtcaccatcgcacccatgtgcgctgaatttgcaggtttgcgacaggcaatcaaacaggggatacctaccgagttgaagcccggtactaatcagtttctcactactgatgatggtgtctcagctcccattttgcccggattccaccctactccagccatacacatacctggtgaagtgcgcaatctgttggagatttgcagggtagagaccatattggaggtgaacaatctacagagtaatgagacaacccccatgcaacgactatgcttccctgtctcggtgcagagtaagacgggggaattgtgtgctgtttttagggccgaccctggtaggaatggaccgtggcagtcgactattttaggacagttgtgtaggtactatactcaatggtctggatctctggaagtcactttcatgtttgctggatcgttcatggcaacaggaaagatgctaatcgcatacacacctccggggggtggggtcccagcagatcggctcactgcaatgctgggaacccatgtgatatgggattttggcctccaatcctcagtcacgctagttataccatggataagcaacacacactatagggcgcacgccaaggacggttattttgattattacaccactggcacgatcactatatggtatcagacaaattatgtcgtacctattggagcccccacaacagcctatattgtggccctcgcagccgctcaggacaactttaccatgaaactgtgcaaagacactgaggatattgagcaatctgcaaacatccagggtgatggaattgcagacatgattgaccaggctgtcacttcccgagttggtcgtgcgctgacatccttacaggtagaacctaccgccgccaacaccaatgctagtgagcacagattgggcaccgggctcgtccccgccttgcaggctgcagagaccggcgcctcttctaatgcacaggatgagaatcttatagaaacccggtgtgtgttgaaccatcactccactcaagagaccacgattggcaactttttcagtcgagcaggactagtgagtattattaccatgcccaccacaggtacccaaaacaccgatgggtatgtgaactgggatattgacttgatgggttatgctcaaatgaggcgtaagtgtgagctattcacatacatgcgctttgatgcagagtttacatttgtagctgccaaaccaaacggtgagctagtaccacaattgttgcagtacatgtatgtgcctcccggagctccaaaacctacgtcccgggattcctttgcctggcagactgctaccaatccttccatcttcgtcaagttgactgaccccccggcacaagtgtcagtacccttcatgtctcccgccagcgcctaccagtggttttacgatggctatccaacgtttggagcccatccacaatcgaatgacgcagactatggccaatgtccaaacaacatgatgggcacctttagcatcagaactgtaggcactgagaaatccccccattctatcacccttcgggtgtatatgagaatcaagcatgtcagggcctggataccccggccactcagaaaccaaccgtacctttttaagacaaatccaaattataaaggcaacgacatcaaatgcaccagcacaagtagggacaaaataacaacactaggaaaatttggccagcaatctggtgctatttacgtgggtaactatagagtggtcaatcgtcacttggccacgcacaatgactgggccaatttagtatgggaagacagctcaagggatcttttagtctcctccaccactgcacagggatgtgacactattgctcgatgcgattgtcaaacgggggtgtattattgcagctcaagaagaaagcactacccagtcagtttctcaaagcccagtctaatctttgtggaagctagtgagtactacccagccaggtaccaatcgcacctcatgctcgctgtagggcattccgagcctggagattgcggaggtattctcaggtgccagcatggtgttgttggtatagtgtctacaggtggaaatgggcttgttggttttgctgatgttagagacctcctgtggctggatgaagaggctatggaacaaggagtgtctgattacatcaaagggcttggtgatgcgtttgggacaggtttcactgacgctgtttccagagaggttgaggctcttaaaaatcacctcataggatctgagggtgcagttgagaagattcttaaaaacttaattaagctcatttctgcactagtgattgtgatcaggagtgattacgatatggtcactctcacagcaactctggctctaattgggtgtcatggcagcccttgggcttggatcaaggctaagacagcatctattctgggcatccccattgctcagaaacagagcgcatcatggctaaaaaaattcaacgacatggctaatgctgccaaagggctagaatggatatctaacaaaattagtaagttcattgattggctcaaggagaagattataccagcagctaaggaaaaggttgaattcttgaacaacctgaaacagctaccattattagagaaccagatctcaaacctagaacaatctgctgcttcacaagaggaccttgaagcaatgtttggaaatgtgtcataccttgcccatttctgccgcaaatttcagccactgtacgctacagaagccaagagggtctacgccctggagaaaaggatgaataactacatgcagttcaagagcaaacaccgtattgaacctgtatgtctcatcatcaggggctcaccaggtactgggaaatctttggcaaccggtatcattgcccgggcaatagccgacaagtaccactccagtgtgtattcacttcccccagacccagatcactttgatgggtacaaacaacaagtagttacagttatggatgatttgtgtcaaaatcctgatggtaaggatatgtcattattttgtcaaatggtatccactgtggactttatcccaccaatggcctccctagaagaaaaaggagtttctttcacatccaaattcgtcattgcgtccaccaatgccagcaacatcatagtgccaacggtgtccgactctgatgccatccgccgcagattctatatggactgtgacattgaggtgacagactcatacaagacagatttgggcagattggatgcaggacgggccgccagattatgttctgaaaacaacactgcaaacttcaagcgctgcagcccactggtgtgtgggaaagccattcaactcagagataggaaatccaaggtcagatacagtgtggacacggtggtctccgaactcattagagagtacaataacagatatgctattggtaatacaatcgaagccttgtttcagggtccacctaagtttaggcccattagaatcagtcttgaggaaaagccagccccagatgccattagtgatctcctcgctagtgtggacagtgaggaagtgcgtcaatactgcagagaccaaggctggatcatcccagaaactcccaccaatgtcgagcggcaccttaatagggcggtgttgatcatgcagtccattgccactgtggtagcagttgtttcactggtgtatgttatctacaaattgtttgcagggttccaaggtgcatactctggtgcccctaagcaaacactcaagaaacctatactccgcacagcgacagtgcaaggcccaagtcttgattttgctctctcattgcttaggaggaacatcagacaagtccagacagaccaaggccacttcactatgctaggtgttagagatcgcttggctgtcctcccgcgacactcgcagcctgggaagacaatatgggtagaacacaagcttataaacatcttagatgctgttgagttggtggatgaacaaggggtcaacttagaactgaccctggttactcttgataccaatgagaagttcagagacatcaccaagttcatcccagaaaacattagcgctgccagtgatgccaccctagtgatcaacacagagcacatgccctccatgttcgtgccagtgggtgacgttgtgcaatacggtttcctaaacctcagcggaaaacccacccatcgtaccatgatgtacaactttcccactaaggctggacaatgtggtggagtggtgacatctgttggaaaggttatcggcatacatattggtggcaatggcaggcagggcttttgtgcaggactcaagaggagttattttgccagtgagcaaggagagatccagtgggtcaagcccaataaagagacaggcagactcaacatcaatgggccgactcgcactaagctcgaacccagtgtgttccatgatgtctttgaggggaacaaagaaccagcagtcttgcatagcagagacccacgccttgaagtggactttgagcaggctttattctccaagtatgtagggaacacactgcatgagcctgacgagtacatcaaagaggcggccctccactatgcaaatcagttgaagcaactggacatcaacacttctcaaatgagtatggaggaagcttgctatggtactgagaaccttgaggccattgatctccacaccagcgcgggctacccctacagtgctctgggaataaagaagagagatattttagatcccactaccagagatgtgagtaagatgaaattctatatggacaagtatggccttgaccttccttactctacctatgtcaaggatgagctccgctcgatagataagattaagaaaggaaaatcccgcctgatcgaggctagtagtctaaatgactcagtgtacctcagaatggcctttggtcacttgtacgagactttccacgcaaatccaggaaccataactggctcagctgtgggatgcaacccggatacattctggagtaaactaccaatcctgcttccaggttcactctttgcatttgattactcaggctatgatgctagtctcagtccagtctggtttagagcactggagctggtcctcagggaggtgggctatagtgaggaggcagtctcccttatagaggggattaaccatacacaccatgtataccgcaataaaacttactgtgtacttggtggaatgccctcaggctgttcaggaacatccattttcaactcaatgatcaacaacatcataattaggacattgctcataaaaacattcaagggcattgatttggacgagcttaacatggtcgcctacggggatgatgtgcttgctagttatcctttcccaatcgattgcctggaattggcaagaacaggcaaagagtatggtttgactatgactcctgcagacaaatctccttgcttcaatgaggtaaattggggcaatgcaacctttctcaaaagaggcttcttgcccgatgagcaattccctttcttgatccatcctaccatgccaatgaaggagattcacgaatctattcgatggaccaaggacgcacgaaacactcaagatcacgtacgatccctgtgtcttttggcgtggcacaatggtaagcaggagtatgaaaaatttgtgagcacaattaggtctgtcccagtaggaaaagctttggctataccgaattatgaaaatctgagacgcaattggctcgaattattttag

SEQ ID NO: 10724 - DNA, 468 bp, unidentified
  misc_feature 1..468: note = Synthetic
  source 1..468: mol_type = other DNA
atcaggttctacgaggaccaatcccagccgcccaaggccgagctgtcggcctgcgtcatcacccagggggcgatcctggcccaattgcaagctatccagaaatcccgccaagaattcttgctgaaaaagggccgcggggtctaccttgatccccagaccggtgaggagcttaaccccggcttcccccaggatgccccgaggaagcagcaagaagctgaaagtggagctgccgcccgtggaggatttggaggaagactgggagagcagtcaggcagaggaggaggagatggaagactgggacagcactcaggcagaggacagcctgcaagacagtctggaagacgaggaggaggcagaggaggtggaagaagtagccgccgccgccagaccgtcgtcctcggcggagaaagcaagcagcacggataccatctccgctccgggtcggggtcccgctcgaccccacagtag

SEQ ID NO: 10725 - DNA, 468 bp, unidentified; identical to SEQ ID NO: 10724
  source 1..468: mol_type = other DNA
  misc_feature 1..468: note = Synthetic

SEQ ID NO: 10726 - DNA, 513 bp, unidentified
  source 1..513: mol_type = other DNA
  misc_feature 1..513: note = Synthetic
ttgcgcaagttcgtgcccgaggattaccatcccttcgagatcaggttctacgaggaccaatcccagccgcccaaggccgagctgtcggcctgcgtcatcacccagggggcgatcctggcccaattgcaagccatccagaaatcccgccaagaattcttgctgaaaaagggccgcggggtctacctcgacccccagaccggtgaggagctcaaccccggcttcccccaggatgccccgaggaaacaagaagctgaaagtggagctgccgcccgtggaggatttggaggaagactgggagaacagcagtcaggcagaggagatggaggaagactgggacagcactcaggcagaggaggacagcctgcaagacagtctggaggaagacgaggaggaggcagaggaggaggtggaagaagcagccgccgccagaccgtcgtcctcggcgggggagaaagcaagcagcacggataccatctccgctccgggtcggggtcccgctcggccccacagtag

SEQ ID NO: 10727 - DNA, 513 bp, unidentified; identical to SEQ ID NO: 10726
  misc_feature 1..513: note = Synthetic
  source 1..513: mol_type = other DNA

SEQ ID NO: 10728 - DNA, 15 bp, unidentified
  source 1..15: mol_type = other DNA
  misc_feature 1..15: note = Synthetic
atgctatataattga

SEQ ID NO: 10729 - DNA, 78 bp, unidentified; identical to SEQ ID NO: 1370
  misc_feature 1..78: note = Synthetic
  source 1..78: mol_type = other DNA

SEQ ID NO: 10730 - DNA, 78 bp, unidentified; identical to SEQ ID NO: 1370
  misc_feature 1..78: note = Synthetic
  source 1..78: mol_type = other DNA

SEQ ID NO: 10731 - DNA, 78 bp, unidentified; identical to SEQ ID NO: 1370
  misc_feature 1..78: note = Synthetic
  source 1..78: mol_type = other DNA

SEQ ID NO: 10732 - DNA, 33 bp, unidentified
  source 1..33: mol_type = other DNA
  misc_feature 1..33: note = Synthetic
atgaataaacagtgggtgttgcgtgatgagtaa

SEQ ID NO: 10733 - DNA, 33 bp, unidentified; identical to SEQ ID NO: 10732
  source 1..33: mol_type = other DNA
  misc_feature 1..33: note = Synthetic

SEQ ID NO: 10734 - DNA, 33 bp, unidentified; identical to SEQ ID NO: 10732
  source 1..33: mol_type = other DNA
  misc_feature 1..33: note = Synthetic

SEQ ID NO: 10735 - DNA, 1485 bp, unidentified
  misc_feature 1..1485: note = Synthetic
  source 1..1485: mol_type = other DNA
atatctgttttggcattgtcgttagacatggcttataagggatggaactccgattccttttctatgaactcagaactttttaatgaaattcttttatatgcacacttagattcaagtggaatagattctgatgatcttaacacaaatcccaatacacttgaaaatgaaattaactccgttgaaaaaactttaaatattgaagaactgaaaaaaattacaactgctttaaatattgacaaccgatgcaatatatgttcaattataaacatctgtttacgacatgaaaccgataaaatgtggatctatgactatgctcttttgtgttacaaatgtaatgctgcacctagaactcccttggctgtcgtaataatcgccaccgaatttatgcagttgattcaaaagcatttcttaaacataaatttcgatgggttatttttaaacaacattttgtcaatactcgattttcatgtacactttttcataaacaggtgtttctcaaacaccaacgatgatctattacataatgaaaacataaccttatatcacatggccatattaaaatcacttctattggaagacgaatctataccaaatataagaataaagaaatttaaattaaaaggaaaaccaacgaaaaaacagcatggaaatgctatccttgaaaaacaaactcttccacttaacacgcattttacacatttaattttttatatgtgggctgggacaaacatattcgatcgcatttcactaactgatctagccatcaagaaacgccaaattttaaaagccatttactctactaaaaatgagctcaattgttctgcgggaccaatcctactatctcaaataccgatctccatcactaagaacgccaccagtagcgtatgcttattatgtgaactaatgacatcttctcagaaaaatttcgacttgctacagttcatctacaccagtgtcattaattactgtcaaaataatttgaagatgattgacagaattcaattcgtactcgcaaatcttttagatttagctagaatatatactaacgttaaaaccacatcagattgctcaaaaattgtattagccaatgaacaagaattttcaaactctgattttgtaattgattgtcatagttttttaattctaaagcaggttggacctgtgggattatacaaacatttcttttgtgatccactgtgcatagcaaacattaagacaataaaaccccatattttattctatacaacagaaagctgtatactacaagacttcaaagttgcaatttgttatcagaatgagtatttaaacagtgttgaaaaacatgtttggttagccattcatttttttaaagcatttcaggtttcaaaattaaaccacaaaaataaaacgcttatatctgatttcttaaaggatttcacacagctcttagcagatcaaaactttgaaattgtcgatcctacatttaccattcattattacgtttag

SEQ ID NO: 10736 - DNA, 48 bp, unidentified
  source 1..48: mol_type = other DNA
  misc_feature 1..48: note = Synthetic
atggcggctgccacagatacgaatatgactaaaccgatgaccatttaa

SEQ ID NO: 10737 - DNA, 36 bp, unidentified; identical to SEQ ID NO: 1378
  misc_feature 1..36: note = Synthetic
  source 1..36: mol_type = other DNA

SEQ ID NO: 10738 - DNA, 21 bp, unidentified
  source 1..21: mol_type = other DNA
  misc_feature 1..21: note = Synthetic
atgacaaagagattagattag

SEQ ID NO: 10739 - DNA, 93 bp, unidentified; identical to SEQ ID NO: 1380
  misc_feature 1..93: note = Synthetic
  source 1..93: mol_type = other DNA

SEQ ID NO: 10740 - DNA, 33 bp, unidentified; identical to SEQ ID NO: 1381
  source 1..33: mol_type = other DNA
  misc_feature 1..33: note = Synthetic

SEQ ID NO: 10741 - DNA, 33 bp, unidentified; identical to SEQ ID NO: 1381
  misc_feature 1..33: note = Synthetic
  source 1..33: mol_type = other DNA

SEQ ID NO: 10742 - DNA, 7908 bp, unidentified
  source 1..7908: mol_type = other DNA
  misc_feature 1..7908: note = Synthetic
atggcagcccagcctctgtacatggagggaatggcctccacccaccaagctaactgtatattcggagaacatgctggatcccagtgcctcagcaactgcgtcatgtacctggcgtccagctattataacagcgaaacccccctcgtcgacagagccagcctggacgatgtacttgaacagggcatgaggctggacctcctcctacgaaaatctggcatgctgggatttagacaatatgcccaacttcatcacatccccggattcctccgcacagacgactgggccaccaagatcttccagtctccagagttttatgggctcatcggacaggacgcggccatccgcgagccattcatcgagtccttgaggtcggttttgagtcgaaactacgcgggcacggtacagtacctgatcattatctgccagtccaaagccggagcaatcgtcgtcaaggacaaaacgtattacatgtttgacccccactgcataccaaacatccccaacagtcctgcacacgtcataaagactaacgacgttggcgttttattaccgtacatagccacacatgacactgaatacaccgggtgcttcctttactttatcccacatgactacatcagcccagagcactacatcgcaaaccactaccgcaccattgtgttcgaagaactccacgggcccagaatggatatctcccgcggggtggaatcatgctccatcaccgaaatcacgtccccttctgtatcccccgcgcctagtgaggcaccattgcgcagggactccacccaatcacaagacgaaacgcgcccgcgcagacctcgcgtcgtcattcctccttacgatccgacagaccgcccacgaccgcctcaccaagaccgcccgccagagcaggcagcgggatacggtggaaacaaaggacgcggcggtaacaaaggacgcggcggaaagacgggacgtggcggaaatgaaggacgcggtggccaccagccaccagacgagcaccagcccccacacatcaccgcggaacacatggaccagtccgacggacaaggcgccgatggagacatggatagtacacccgcaaatggtgagacatccgttacggaaaccccgggccccgaacccaatcccccagcacggcctgacagagagccaccgcccactcccccggcgaccccaggcgccacagcgctgctctctgacctaactgccacaagagggcagaaacgcaaattttcctcgcttaaagaatcttatcccatcgacagcccaccctctgacgacgatgatgtgtcccagccctcccaacaaacggctccggatactgaagatatttggattgacgacccactcacacccttgtacccactaacggatacaccatctttcgacataacggcggacgtcacacccgacaacacccaccccgagaaagcagcggacggggactttaccaacaagaccacaagcacggatgcggacaggtatgccagcgccagtcaggaatcgctgggcaccctggtctcgccatacgattttacaaacttggatacactgctggcagagctgggccggttgggaacggcacagcctatccctgtaatcgtggacagactgacatcgcgaccttttcgagaagccagcgctctacaggctatggataggatactaacacacgtggtcctagaatacggtctggtttcgggttacagcacagctgccccatccaaatgcacccacgtcctccagtttttcattttgtggggcgaaaaactcggcataccaacggaggacgcaaagacgctcctggaaagcgcactggagatccccgcaatgtgcgagatcgtccaacagggccggttgaaggagcccacgttctcccgccacattataagcaagctaaacccctgcttggaatccctacacgccactagtcgtcaggacttcaagtccctgatacaggcattcaacgccgaagggattaggatcgcctcgcgtgagagggagacgtccatggccgaactgatagaaacgataaccgcccgccttaaaccaaattttaacattgtctgtgcccgccaggacgcacaaaccattcaagacggcgtcggtctcctcagggccgaggttaacaagagaaacgcacagatagcccaggaggctgcgtattttgagaatataatcacggccctctccacattccaaccacctccccaatcgcaacagacgttcgaagtgctgccggacctcaaactgcgcacgctcgtggagcacctgaccctggttgaggcgcaggtgacaacgcaaacggtggaaagtctacaggcatacctacagagcgctgccactgctgagcatcaccttaccaacgtgcccaacgtccacagtatactgtctaacatatccaacactctaaaagttatagattatgtaattccaaaatttataataaacaccgatacactggccccatataaacagcagttttcatatctggggggtgaactggcatctatgttctcccttgactggcctcacgcacctgcagaggcggtagagccactacccgtgctgacttctctgcgaggtaaaatcgcagaggcgctgacgcgtcaagaaaacaaaaacgctgtagatcaaattctaaccgacgccgaaggcctccttaagaacattaccgatccaaacggcgcacacttccacgcccaggccgtatcaattccagtgttagaaaactacgtacataacgcgggggtccttctcaagggcgaaaagagcgagaggttctcccggctgaagaccgccatccaaaacctggtatcctccgaatcatttatcaccgtgaccctacacagtacaaaccttggaaacctagttaccaacgtaccaaaacttggtgaggcgttcaccgggggcccgcacctcctgacaagcccgtccgtgagacagtccctttccaccctgtgcacaaccctgctgcgagatgccctggacgccctggaaaaaaaggatccggcccttcttggtgaggggaccacgttggcgctggagacactcctaggatacgggtcggtgcaggactacaaggagacggtacagataatatccagccttgtgggcatccaaaaattagtcagggaccagggcgcggacaagtgggccactgccgtgacaaggctaactgacctcaaatcaactctggccacgaccgccatcgagacggctacgaaacggaaactatacagattgatccaaagggacctcaaagaggctcaaaaacacgagaccaatcgggccatggaggaatggaagcagaaagtactggctcttgacaatgcgtctccggaacgtgtcgccaccctcctgcaacaggctcccaccgcgaaggctagagagtttgcagagaagcacttcaaaatactactccccgtacccgcggacgcccccgtccaagcgtctccaacgccgatggaatacagcgccagccccctcccggacccaaaggatatagacagagctacatccatccacggggaacaggcgtggaagaagatacagcaggcgttcaaggatttcaacttcgccgtcctgcggcccgctgactgggatgccctggcagcggagtaccaacgccgtggttcgccccttccggcggccgtgggtccagcgctctcagggttcctggagacgatcctagggacgctgaacgacatctacatggataagctccgctcctttctgcccgacgcgcagccttttcaggcgccgcccttcgactggctaacgccgtatcaggaccaagtcagctttttcttgcgcaccatagggctgccgctggtgcgagcgctggccgacaagatcagcgtgcaggcactgaggcttagccacgcgctccagtccggcgatttgcagcaggccacggtgggcacgcccctggagctccctgccacagagtacgcgcgcatcgcctccaacatgaagtccgtgttcaacgaccacggacttcaggtgcgatcagaggtcgcggattatgtggaggcccaacgagccgacgcacacacgccacacgtcccacgtccaaagatacaggcaccaaagactctgattccacatccggacgcaatcgtcgcggacggactacccgcctttcttaagacgtccctactgcagcaagaggccaaacttctggcgctacagcgggcggacttcgagtcgctcgagagcgacatgcgcgccgcagaggcccagagaaaagcatcgcgcgaggaaacccagcgcaaaatggcacacgccatcactcagctcttacagcaggcacccagtgcgatctcggggcgcccgctatccttacaggacccggtgggcttcctcgagggcatcatatacgacaaggtcctggagcgcgaatcctacgagacgggtctcgagggactgtcctggctcgagcagaccatcaagtccatcaccgtatacgctcccgtagaggagaagcaaagaatgcacgtgctgctggacgaggtgaaaaagcagcgagcaaacactgagaccgctctcgagctagaggccgcggctacgcacggcgacgacgctagactcctgcagcgagcggtcgatgagctgtcaccgttgcgcgttaagggggggaaggccgcggtggaatcctggcggcagaaaatccaaaccctgaaatccctggtacaggaagcggagcaggccggcctcctgttggccaccatagacacggtggccggccaggcccaggagaccatatcaccatccacactccagggactgtaccaacagggacaggaggccatggcggccattaagcggtttagggactcgccccagctagctggcctgcaggaaaagctggccgagctacagcagtacgtcaagtacaagaagcagtatctggaacactttgaggccacccaaagcgtagtgtttacagcctttccgctcacacaggaggttacgatcccagccctgcattacgcgggacctttcgacaacttggagcggctctcacgatacctacacatcggccagacgcagccggctccgggacagtggctcctgacacttcccacattcgaccccacgcgcccggcctgcgtcccagccggcggccacgaacccccgttgcacagacaggtggtgttctccagctttttggaggcccagatccgattagcgttgtccgtagcgggccccgtgcctggacggggtctgcccggaacaccgcagatccgaaggggcgtggaggctgccgcttgtttcctccaccagtgggacgagatatctcgcctccttccagaggtactggacacctttttccacaacgcgccccttcccgcagagtcttcctccaatgctttcctggccatgtgcgtattgacgcaccttgtctacctagctgggcgcgccgtcttgggcccacgggagccggagcacgccgccccggacgcgtacccaagggaggtggcgctggccccgcgcgacctgacctaccttctactggccatgtggccatcttggatctcggcaattttgaaacagccttcgcacgcggaggcggcgcacgcatgtcttgtcacgctgccaacaatgctcaaggctgtgccgtacctcacgctggaagcctcagctggaccactgccggcggacatgcgccacttcgccacgccagaagcgcgtctgtttttccccgcgcgatggcaccacgtcaacgtgcaggagaaactgtggctgcgtaatgattttatgtcgctgtgtcaccgttccccggggcgcgcgcgcatagccgtcttggtgtgggccgtcacttgcctagatcctgaggtaataaggcagctgtggtccaccttgcggccccttactgcggatgaatccgacacggcttctggactgctgcgggtgctagtagaaatggagtttggtccgccgcccaagacgccgcggcgggaggcggtggcgcccggcgcaacactgccaccgtacccctacggccttgccaccggcgagcgcctggtcggccaggcgcaggaacgctctggcggcgctggcaagatgccggtgtccgggtttgagatagttttaggcgcactgctgttccgcgcccccctacgcattttcagcaccgcatcaacccacaggatctcagatttcgagggcggtttccagatactgactcctctcctggactgttgcccagatcgcgagccattcgcctccctggccgccgcaccacgaaggacggtgccactgggagacccgtgcgccaacattcacacccccgaagagatacagatctttgcgcgtcaagccgcctggcttcaatataccttcgcaaattaccagatccccagcaccgacaacccgataccgatcgttgtgctaaacgctaacaataaccttgaaaacagctacatccctcgcgatcgcaaagcggacccgctacgaccattctatgtagtccctctgaagccgcagggtagatggcctgaaataatgaccacagcaacaaccccctgccgcctaccgacatcgccagaagaggcgggatcacagttcgccagactccttcagagccaggtgagcgccacatggtctgacatcttctccagggttcccgagcgcctcgctcccaatgcgcctcagaagagttcccagacaatgtcagaaatccacgaggtcgccgccacgccgccactcacaatcaccccaaataaaccgaccggaacccctcacgtctccccggaggctgatccaataacagaacgcaaacgcggacagcagccgaagattgtcgcggacaacatgcctagtcgtattctcccgtcgctaccgaccccgaaacccagagagcctagaatcacgctaccccacgcactgcccgttatatcacccccagcacatcgcccgtcgcctataccgcatctgccagcaccgcaggtaacggagcccaaaggggttctccaaagcaaacgtggaactctcgtgctgcggcccgccgcggtcattgacccacggaagcccgtctcggcaccgatcacgcgatatgagaggacggcgctccagcccccccggactgagggcgaaggccggcgccctcccgacacgcaacccgtcactttaacctttcgtctcccacctaccgcacccactcccgcaactgcagccctagaaaccaaaacaactcccccatccacgcccccacacgccatagacattagcccaccacagacacctcccatgtccacctcacctcacgcgagagacacaagcccccccgcagaaaagcgggccgcacccgtcattcgagtaatggcgcccacgcaaccgtcgggagaggcaagagtcaagcgagtggagatcgaacagggcctttccacacgcaatgaagcccctccccttgaacgctcgaatcacgccgtgcccgccgttaccccaaggcgcaccgtagcccgcgaaatcaggatcccgccggagataaaggcgggttgggacactgcaccggacattcctctgccccacagctccccggagtcatccccaccgacttccccccagcctatccgcgtggatgataaatcgcctcttcccaacctcgtagagagatacgcgcggggtttcctggacacgccctctgtagaggtgatgtccctggaaaatcaggacatcgccgtggaccccggactgctaacccgccggattccatccgtggtgcccatgccccatccaattatgtggtcacccatagtacccatcagtttacaaaacacagacatagacactgcaaagataacactgattagttttattagacgcatcaaacaaaaagtggccgccctatcggcgtccctggcggagacggttgacagaataaagaagtggtacttgtga

SEQ ID NO: 10743 - DNA, 7908 bp, unidentified
  source 1..7908: mol_type = other DNA
  misc_feature 1..7908: note = Synthetic
atggcagcccagcctctgtacatggagggaatggcctccacccaccaagctaactgtatattcggagaacatgctggatcccagtgcctcagcaactgcgtcatgtacctggcgtccagctattataacagcgaaacccccctcgtcgacagagccagcctggacgatgtacttgaacagggcatgaggctggacctcctcctacgaaaatctggcatgctgggatttagacaatatgcccaacttcatcacatccccggattcctccgcacagacgactgggccaccaagatcttccagtctccagagttttatgggctcatcggacaggacgcggccatccgcgagccattcatcgagtccttgaggtcggttttgagtcgaaactacgcgggcacggtacagtacctgatcattatctgccagtccaaagccggagcaatcgtcgtcaaggacaaaacgtattacatgtttgacccccactgcataccaaacatccccaacagtcctgcacacgtcataaagactaacgacgttggcgttttattaccgtacatagccacacatgacactgaatacaccgggtgcttcctttactttatcccacatgactacatcagcccagagcactacatcgcaaaccactaccgcaccattgtgttcgaagaactccacgggcccagaatggatatctcccgcggggtggaatcatgctccatcaccgaaatcacgtccccttctgtatcccccgcgcctagtgaggcaccattgcgcagggactccacccaatcacaagacgaaacgcgcccgcgcagacctcgcgtcgtcattcctccttacgatccgacagaccgcccacgaccgcctcaccaagaccgcccgccagagcaggcagcgggatacggtggaaacaaaggacgcggcggtaacaaaggacgcggcggaaagacgggacgtggcggaaatgaaggacgcggtggccaccagccaccagacgagcaccagcccccacacatcaccgcggaacacatggaccagtccgacggacaaggcgccgatggagacatggatagtacacccgcaaatggtgagacatccgttacggaaaccccgggccccgaacccaatcccccagcacggcctgacagagagccaccgcccactcccccggcgaccccaggcgccacagcgctgctctctgacctaactgccacaagagggcagaaacgcaaattttcctcgcttaaagaatcttatcccatcgacagcccaccctctgacgacgatgatgtgtcccagccctcccaacaaacggctccggatactgaagatatttggattgacgacccactcacacccttgtacccactaacggatacaccatctttcgacataacggcggacgtcacacccgacaacacccaccccgagaaagcagcggacggggactttaccaacaagaccacaagcacggatgcggacaggtatgccagcgccagtcaggaatcgctgggcaccctggtctcgccatacgattttacaaacttggatacactgctggcagagctgggccggttgggaacggcacagcctatccctgtaatcgtggacagactgacatcgcgaccttttcgagaagccagcgctctacaggctatggataggatactaacacacgtggtcctagaatacggtctggtttcgggttacagcacagctgccccatccaaatgcacccacgtcctccagtttttcattttgtggggcgaaaaactcggcataccaacggaggacgcaaagacgctcctggaaagcgcactggagatccccgcaatgtgcgagatcgtccaacagggccggttgaaggagcccacgttctcccgccacattataagcaagctaaacccctgcttggaatccctacacgccactagtcgtcaggacttcaagtccctgatacaggcattcaacgccgaagggattaggatcgcctcgcgtgagagggagacgtccatggccgaactgatagaaacgataaccgcccgccttaaaccaaattttaacattgtctgtgcccgccaggacgcacaaaccattcaagacggcgtcggtctcctcagggccgaggttaacaagagaaacgcacagatagcccaggaggctgcgtattttgagaatataatcacggccctctccacattccaaccacctccccaatcgcaacagacgttcgaagtgctgccggacctcaaactgcgcacgctcgtggagcacctgaccctggttgaggcgcaggtgacaacgcaaacggtggaaagtctacaggcatacctacagagcgctgccactgctgagcatcaccttaccaacgtgcccaacgtccacagtatactgtctaacatatccaacactctaaaagttatagattatgtaattccaaaatttataataaacaccgatacactggccccatataaacagcagttttcatatctggggggtgaactggcatctatgttctcccttgactggcctcacgcacctgcagaggcggtagagccactacccgtgctgacttctctgcgaggtaaaatcgcagaggcgctgacgcgtcaagaaaacaaaaacgctgtagatcaaattctaaccgacgccgaaggcctccttaagaacattaccgatccaaacggcgcacacttccacgcccaggccgtatcaattccagtgttagaaaactacgtacataacgcgggggtccttctcaagggcgaaaagagcgagaggttctcccggctgaagaccgccatccaaaacctggtatcctccgaatcatttatcaccgtgaccctacacagtacaaaccttggaaacctagttaccaacgtaccaaaacttggtgaggcgttcaccgggggcccgcacctcctgacaagcccgtccgtgagacagtccctttccaccctgtgcacaaccctgctgcgagatgccctggacgccctggaaaaaaaggatccggcccttcttggtgaggggaccacgttggcgctggagacactcctaggatacgggtcggtgcaggactacaaggagacggtacagataatatccagccttgtgggcatccaaaaattagtcagggaccagggcgcggacaagtgggccactgccgtgacaaggctaactgacctcaaatcaactctggccacgaccgccatcgagacggctacgaaacggaaactatacagattgatccaaagggacctcaaagaggctcaaaaacacgagaccaatcgggccatggaggaatggaagcagaaagtactggctcttgacaatgcgtctccggaacgtgtcgccaccctcctgcaacaggctcccaccgcgaaggctagagagtttgcagagaagcacttcaaaatactactccccgtacccgcggacgcccccgtccaagcgtctccaacgccgatggaatacagcgccagccccctcccggacccaaaggatatagacagagctacatccatccacggggaacaggcgtggaagaagatacagcaggcgttcaaggatttcaacttcgccgtcctgcggcccgctgactgggatgccctggcagcggagtaccaacgccgtggttcgccccttccggcggccgtgggtccagcgctctcagggttcctggagacgatcctagggacgctgaacgacatctacatggataagctccgctcctttctgcccgacgcgcagccttttcaggcgccgcccttcgactggctaacgccgtatcaggaccaagtcagctttttcttgcgcaccatagggctgccgctggtgcgagcgctggccgacaagatcagcgtgcaggcactgaggcttagccacgcgctccagtccggcgatttgcagcaggccacggtgggcacgcccctggagctccctgccacagagtacgcgcgcatcgcctccaacatgaagtccgtgttcaacgaccacggacttcaggtgcgatcagaggtcgcggattatgtggaggcccaacgagccgacgcacacacgccacacgtcccacgtccaaagatacaggcaccaaagactctgattccacatccggacgcaatcgtcgcggacggactacccgcctttcttaagacgtccctactgcagcaagaggccaaacttctggcgctacagcgggcggacttcgagtcgctcgagagcgacatgcgcgccgcagaggcccagagaaaagcatcgcgcgaggaaacccagcgcaaaatggcacacgccatcactcagctcttacagcaggcacccagtgcgatctcggggcgcccgctatccttacaggacccggtgggcttcctcgagggcatcatatacgacaaggtcctggagcgcgaatcctacgagacgggtctcgagggactgtcctggctcgagcagaccatcaagtccatcaccgtatacgctcccgtagaggagaagcaaagaatgcacgtgctgctggacgaggtgaaaaagcagcgagcaaacactgagaccgctctcgagctagaggccgcggctacgcacggcgacgacgctagactcctgcagcgagcggtcgatgagctgtcaccgttgcgcgttaagggggggaaggccgcggtggaatcctggcggcagaaaatccaaaccctgaaatccctggtacaggaagcggagcaggccggcctcctgttggccaccatagacacggtggccggccaggcccaggagaccatatcaccatccacactccagggactgtaccaacagggacaggaggccatggcggccattaagcggtttagggactcgccccagctagctggcctgcaggaaaagctggccgagctacagcagtacgtcaagtacaagaagcagtatctggaacactttgaggccacccaaagcgtagtgtttacagcctttccgctcacacaggaggttacgatcccagccctgcattacgcgggacctttcgacaacttggagcggctctcacgatacctacacatcggccagacgcagccggctccgggacagtggctcctgacacttcccacattcgaccccacgcgcccggcctgcgtcccagccggcggccacgaacccccgttgcacagacaggtggtgttctccagctttttggaggcccagatccgattagcgttgtccgtagcgggccccgtgcctggacggggtctgcccggaacaccgcagatccgaaggggcgtggaggctgccgcttgtttcctccaccagtgggacgagatatctcgcctccttccagaggtactggacacctttttccacaacgcgccccttcccgcagagtcttcctccaatgctttcctggccatgtgcgtattgacgcaccttgtctacctagctgggcgcgccgtcttgggcccacgggagccggagcacgccgccccggacgcgtacccaagggaggtggcgctggccccgcgcgacctgacctaccttctactggccatgtggccatcttggatctcggcaattttgaaacagccttcgcacgcggaggcggcgcacgcatgtcttgtcacgctgccaacaatgctcaaggctgtgccgtacctcacgctggaagcctcagctggaccactgccggcggacatgcgccacttcgccacgccagaagcgcgtctgtttttccccgcgcgatggcaccacgtcaacgtgcaggagaaactgtggctgcgtaatgattttatgtcgctgtgtcaccgttccccggggcgcgcgcgcatagccgtcttggtgtgggccgtcacttgcctagatcctgaggtaataaggcagctgtggtccaccttgcggccccttactgcggatgaatccgacacggcttctggactgctgcgggtgctagtagaaatggagtttggtccgccgcccaagacgccgcggcgggaggcggtggcgcccggcgcaacactgccaccgtacccctacggccttgccaccggcgagcgcctggtcggccaggcgcaggaacgctctggcggcgctggcaagatgccggtgtccgggtttgagatagttttaggcgcactgctgttccgcgcccccctacgcattttcagcaccgcatcaacccacaggatctcagatttcgagggcggtttccagatactgactcctctcctggactgttgcccagatcgcgagccattcgcctccctggccgccgcaccacgaaggacggtgccactgggagacccgtgcgccaacattcacacccccgaagagatacagatctttgcgcgtcaagccgcctggcttcaatataccttcgcaaattaccagatccccagcaccgacaacccgataccgatcgttgtgctaaacgctaacaataaccttgaaaacagctacatccctcgcgatcgcaaagcggacccgctacgaccattctatgtagtccctctgaagccgcagggtagatggcctgaaataatgaccacagcaacaaccccctgccgcctaccgacatcgccagaagaggcgggatcacagttcgccagactccttcagagccaggtgagcgccacatggtctgacatcttctccagggttcccgagcgcctcgctcccaatgcgactcagaagagttcccagacaatgtcagaaatccacgaggtcgccgccacgccgccactcacaatcaccccaaataaaccgaccggaacccctcacgtctccccggaggctgatccaataacagaacgcaaacgcggacagcagccgaagattgtcgcggacaacatgcctagtcgtattctcccgtcgctaccgaccccgaaacccagagagcctagaatcacgctaccccacgcactgcccgttatatcacccccagcacatcgcccgtcgcctataccgcatctgccagcaccgcaggtaacggagcccaaaggggttctccaaagcaaacgtggaactctcgtgctgcggcccgccgcggtcattgacccacggaagcccgtctcggcaccgatcacgcgatatgagaggacggcgctccagcccccccggactgagggcgaaggccggcgccctcccgacacgcaacccgtcactttaacctttcgtctcccacctaccgcacccactcccgcaactgcagccctagaaaccaaaacaactcccccatccacgcccccacacgccatagacattagcccaccacagacacctcccatgtccacctcacctcacgcgagagacacaagcccccccgcagaaaagcgggccgcacccgtcattcgagtaatggcgcccacgcaaccgtcgggagaggcaagagtcaagcgagtggagatcgaacagggcctttccacacgcaatgaagcccctccccttgaacgctcgaatcacgccgtgcccgccgttaccccaaggcgcaccgtagcccgcgaaatcaggatcccgccggagataaaggcgggttgggacactgcaccggacattcctctgccccacagctccccggagtcatccccaccgacttccccccagcctatccgcgtggatgataaatcgcctcttcccaacctcgtagagagatacgcgcggggtttcctggacacgccctctgtagaggtgatgtccctggaaaatcaggacatcgccgtggaccccggactgctaacccgccggattccatccgtggtgcccatgccccatccaattatgtggtcacccatagtacccatcagtttacaaaacacagacatagacactgcaaagataacactgattagttttattagacgcatcaaacaaaaagtggccgccctatcggcgtccctggcggagacggttgacagaataaagaagtggtacttgtga

SEQ ID NO: 10744 - DNA, 162 bp, unidentified
  misc_feature 1..162: note = Synthetic
  source 1..162: mol_type = other DNA
agggaatggcctccacccaccaagctaactgtatattcggagaacatgctggatcccagtgcctcagcaactgcgtcatgtacctggcgtccagctattataacagcgaaacccccctcgtcgacagagccagcctggacgatgtacttgaacagggcatga

SEQ ID NO: 10745 - DNA, 162 bp, unidentified; identical to SEQ ID NO: 10744
  source 1..162: mol_type = other DNA
  misc_feature 1..162: note = Synthetic

SEQ ID NO: 10746 - DNA, 69 bp, unidentified; identical to SEQ ID NO: 1386
  misc_feature 1..69: note = Synthetic
  source 1..69: mol_type = other DNA

SEQ ID NO: 10747 - DNA, 315 bp, unidentified
  source 1..315: mol_type = other DNA
  misc_feature 1..315: note = Synthetic
ataaatagtgcgatggcgtttgtgggagaacgcagtagcaatgggttgcgacgtgcacgatccttcgtggcaatgccaatggggcgttcccacgattattgtggcctggataacatgcgcggctttaggaatttggtgtttggcgggatcgtcggcggatgtctcttcgggacccggcatcgcagccgtagtcggctgttctgttttcatgattttcctctgcgcgtatctcatccgttaccgggaattcttcaaagactccgtaatcgacctccttacctgccgatgggttcgctactgcagctgcagctgtaa

SEQ ID NO: 10748 - DNA, 360 bp, unidentified
  misc_feature 1..360: note = Synthetic
  source 1..360: mol_type = other DNA
atgtattcgtacagaagccgctctcctgctggaaaagtgtttcaagttttaaaaatgtttagaagagattctgagattgtttttggagaaaattttagacacattgttaaaaattttaaaacattaggaatagaggatacagttcaagctgtaaagtgttttacgattggaaaaaatgctctgagggagtctgtttcaatggtagatttatgtgcttcattagcagagtattgggggggtgaggatttaccaaccaatgatagtttgcaagctcttaagttaatgaccattcttttatcggatgatgattattcttttattgatttgtgtcttagggttaggctaaaaaaacttaagtaa

SEQ ID NO: 10749 - DNA, 153 bp, unidentified; identical to SEQ ID NO: 1392
  misc_feature 1..153: note = Synthetic
  source 1..153: mol_type = other DNA

SEQ ID NO: 10750 - DNA, 153 bp, unidentified; identical to SEQ ID NO: 1392
  misc_feature 1..153: note = Synthetic
  source 1..153: mol_type = other DNA

SEQ ID NO: 10751 - DNA, 108 bp, unidentified; identical to SEQ ID NO: 1393
  source 1..108: mol_type = other DNA
  misc_feature 1..108: note = Synthetic

SEQ ID NO: 10752 - DNA, 510 bp, unidentified
  misc_feature 1..510: note = Synthetic
  source 1..510: mol_type = other DNA
atggacaaaaaacagctgtaccggcgcctgatcctgaagtccaccagcacgccggtgatgaccaaggacgaactcacgcagatcacgcgcattaccgagtacgtgtacctgggcagctacaacaacgccatggcactggaaagcagcggcgtgccgttccgctacgtgctgaacatgtccatggtccgctactcgctgccgggcagcagcgccaccatcgtccacatccccattcccgacaacgaccaggtgcacatcgcgaagtacttcgacggcgtggcggcgttcctggaacgctgcgagaagagccacacgccggtgctggtgcactgcattgcgggcgtgaaccgcagcggcgccatgatcatggcctacctgctgcacacgcgcaaccggcaaatcccggccgtgatctacttcctctacgtgtaccacggcatcaaggacatccgcggcgcgttcctggagaacgcgtccttcaagcggcagctggtggaccactacctgtga

SEQ ID NO: 10753 - DNA, 123 bp, unidentified; identical to SEQ ID NO: 1396
  source 1..123: mol_type = other DNA
  misc_feature 1..123: note = Synthetic

SEQ ID NO: 10754 - DNA, 72 bp, unidentified; identical to SEQ ID NO: 1397
  misc_feature 1..72: note = Synthetic
  source 1..72: mol_type = other DNA

SEQ ID NO: 10755 - DNA, 15 bp, unidentified
  source 1..15: mol_type = other DNA
  misc_feature 1..15: note = Synthetic
ctgctactactttaa

SEQ ID NO: 10756 - DNA, 57 bp, unidentified; identical to SEQ ID NO: 1401
  misc_feature 1..57: note = Synthetic
  source 1..57: mol_type = other DNA

SEQ ID NO: 10757 - DNA, 1278 bp, unidentified
  misc_feature 1..1278: note = Synthetic
  source 1..1278: mol_type = other DNA
atgtccaaaaagcgcgcgcgggtggatgatggcttcgaccccgtgtatccctacgatgcagacaacgcaccgaccgtgcccttcatcaaccctcccttcgtctcttcagatggattccaagaaaagcccctgggggtgttgtcccttaggctggccgaccctgtcaccaccaagaatggggaaattaccctcaagctgggggagggggtggaccttgacgactcgggaaaactcattgcaaacacagtaaacaaggccattgcccctctcagtttttccaacaacaccatttcccttaacatggatacccctttatacaccaaagatggaaaactatccttacaagtttctccaccattaagtatattaaaatcaacaattttgaatacattagctctagcttttggctcaggtttaggactcagtggcagcgccctggcagtacagttagcctctccacttacatttgatgataaagggaatataaagattaccctaaacaggggattgcatgttacaacaggagatgcaattgaaagcaacatcagttgggctaaaggtataaaatttgaagatggtgccatagctacaaacattggtaaggggctagagttcggaaccagtagtacagaaacaggagttaataatgcttatccaatccaagttaaacttggctctggtctcagctttgacagcacaggagccataatggctggcaataaagactatgataaattaactttgtggacaacgcctgacccatcaccaaactgtcaaatacttgcagaaaatgatgcaaaactaacactttgcttaactaagtgtgacagtcaaatactggccactgtatcagttttggttgttagaagtggaaacttaaacccaattactggcacagtaagcagtgctcaagtttttctacgttttgatgcaaatggtgttcttttaacagaacactctacactaaaaaaatactggggctacaagcaaggagatagcatagatggcactccatacaccaatgctgttggttttatgccaaattcaacagcttatccaaagacccaaagttctactactaaaaataatatagtgggtcaagtatacatgaatggagatgtttcaaaacccatgcttcttactataactcttaatggtactgatgacaccaccagtgcatactcaatgtcattttcatacacctggactaacggaagctatatcggagcaacatttggagctaactcatacaccttctcctacatagcccaacaataa

SEQ ID NO: 10758 - DNA, 222 bp, unidentified
  source 1..222: mol_type = other DNA
  misc_feature 1..222: note = Synthetic
atggcttcgaccccgtgtatccctacgatgcagacaacgcaccgaccgtgcccttcatcaaccctcccttcgtctcttcagatggattccaagaaaagcccctgggggtgttgtcccttaggctggccgaccctgtcaccaccaagaatggggaaattaccctcaagctgggggagggggtggaccttgacgactcgggaaaactcattgcaaacacagtaa

SEQ ID NO: 10759 - DNA, 684 bp, unidentified
  misc_feature 1..684: note = Synthetic
  source 1..684: mol_type = other DNA
atgagcaaggagattcccaccccttacatgtggagctatcagccccagatgggcctggccgcgggcgcctcccaagactactccacacgcatgaactggctcagtgccggcccctcgatgatatcacgggtcaacggggtccgcagtcatcgaaaccagatattgttggagcaggcggcggtcacctccacgcccagggcaaagctcaacccgcgtaattggccctccaccctggtgtatcaggaaatccccgggccgactaccgtactacttccgcgtgacgcactggccgaagtccgcatgactaactcaggtgtccagctggccggcggcgcttcccggtgcccgctccgcccacaatcgggtataaaaaccctggtgatccgaggcagaggcacacagctcaacgacgagttggtgagctcttcgatcggtctgcgaccggacggagtgttccaactagccggagccgggagatcgtccttcactcccaaccaggcctacctgaccttgcagagcagctcttcggagcctcgctcgggaggcatcggaaccctccagttcgtggaggagtttgtgccctcggtctacttcaaccccttctcgggatcgccaggcctctacccggacgagttcataccgaacttcgacgcagtgagagaagcggtggacggctacgactga

SEQ ID NO: 10760 - DNA, 33 bp, unidentified; identical to SEQ ID NO: 1390
  misc_feature 1..33: note = Synthetic
  source 1..33: mol_type = other DNA

SEQ ID NO: 10761 - DNA, 186 bp, unidentified
  misc_feature 1..186: note = Synthetic
  source 1..186: mol_type = other DNA
ttgggtaaaacagatttctcgaatatacgggcaaagttagaatccccggtaactaccatagtgggatatcatccagcggccagagaccaccaattcgagaaagatcgatcatttgaaattatcaacgttttactggaattagacaacaagacacctataaattgggctcaagggtttatttattaa

SEQ ID NO: 10762 - DNA, 27 bp, unidentified
  source 1..27: mol_type = other DNA
  misc_feature 1..27: note = Synthetic
atggtgcctattttatggatggattaa

SEQ ID NO: 10763 - DNA, 12 bp, unidentified
  source 1..12: mol_type = other DNA
  misc_feature 1..12: note = Synthetic
atgggaagttaa

SEQ ID NO: 10764 - DNA, 42 bp, unidentified; identical to SEQ ID NO: 1412
  source 1..42: mol_type = other DNA
  misc_feature 1..42: note = Synthetic

SEQ ID NO: 10765 - DNA, 1389 bp, unidentified
  misc_feature 1..1389: note = Synthetic
  source 1..1389: mol_type = other DNA
ctgaaggggatgtcaaattcctcctgtccctcaatcttcatttttatcttctatcagatgtccaaaaagcgcgcgcgggtggatgatggcttcgaccccgtgtacccctacgatgcagacaacgcaccgactgtgcccttcatcaaccctcccttcgtctcttcagatggattccaagaaaagcccctgggggtgttgtccctgcgactggccgaccccgtcaccaccaagaatggggctgtcaccctcaagctgggggagggggtggacctcgacgactcgggaaaactcatctccaaaaatgccaccaaggccactgcccctctcagtatttccaacggcaccatttcccttaacatggctgcccctttttacaacaacaatggaacgttaagtctcaatgtttctacaccattagcagtatttcccacttttaacactttaggtatcagtcttggaaacggtcttcaaacttctaataagttgctgactgtacagttaactcatcctcttacattcagctcaaatagcatcacagtaaaaacagacaaaggactctatattaattctagtggaaacagagggcttgaggctaacataagcctaaaaagaggactgatttttgatggtaatgctattgcaacataccttggaagtggtttagactatggatcctatgatagcgatgggaaaacaagacccatcatcaccaaaattggagcaggtttgaattttgatgctaataatgccatggctgtgaagctaggcacaggtttaagttttgactctgccggtgccttaacagctggaaacaaagaggatgacaagctaacactttggactacacctgacccaagccctaattgtcaattactttcagacagagatgccaaatttaccctatgtcttacaaaatgcggtagtcaaatactaggcactgttgcagtagctgctgttactgtaggttcagcactaaatccaattaatgacacagtaaaaagcgccatagtattccttagatttgactctgacggtgtgctcatgtcaaactcatcaatggtaggtgattactggaactttagggaaggacagaccacccaaagtgtggcctatacaaatgctgtgggattcatgcccaatctaggtgcatatcctaaaacccaaagcaaaacaccaaaaaatagtatagtaagtcaggtatatttaaatggagaaactactatgccaatgacactgacaataactttcaatggcactgatgaaaaagacacaacacctgtgagcacttactccatgacttttacatggcagtggactggagactataaggacaagaatattacctttgctaccaactcctttactttctcctacatggcccaagaataa

SEQ ID NO: 10766 - DNA, 309 bp, unidentified
  source 1..309: mol_type = other DNA
  misc_feature 1..309: note = Synthetic
atggcttcgaccccgtgtacccctacgatgcagacaacgcaccgactgtgcccttcatcaaccctcccttcgtctcttcagatggattccaagaaaagcccctgggggtgttgtccctgcgactggccgaccccgtcaccaccaagaatggggctgtcaccctcaagctgggggagggggtggacctcgacgactcgggaaaactcatctccaaaaatgccaccaaggccactgcccctctcagtatttccaacggcaccatttcccttaacatggctgcccctttttacaacaacaatggaacgttaa

SEQ ID NO: 10767 - DNA, 1728 bp, unidentified
  misc_feature 1..1728: note = Synthetic
  source 1..1728: mol_type = other DNA
atggctgaaaaagggaaaacaaatagttcatattggtctacaacccgaaatgacaattccacggtaaacacacacattaatacaccagcaggaaggacacacatctggctactgattgcaacaacaatgcatacagtattgtccttcattatcatgatcctatgcattgacctaattataaaacaagacacttgtatgaagacaaacatcatgacagtatcctccatgaacgaaagtgccaaaataatcaaagagacaatcacagaattaatcagacaagaagtaatatcaaggaccataaacatacaaagttcagtacaaagcgggatcccaatattgttaaacaagcaaagcagagatctcacacaattaatagagaagtcatgcaacagacaggaattggctcagatatgcgaaaacaccattgctattcaccatgcagacggcatatctcctctggacccacacgatttctggagatgtcccgtaggggaacccctactgagcaacaaccccaatatctcattattacctggaccaagtctactttctggatccaccacaatttcaggatgtgttagactaccttcattatcaattggtgatgcaatatatgcgtattcatcaaacttaatcactcaaggatgtgcagatatagggaagtcatatcaggttttacaattaggttacatatccttaaattcagatatgtatcctgatttaaacccggtaatttctcatacctatgacatcaacgacaacaggaaatcatgttctgtaatagctgcaggaacaaggggttatcagttatgctccttgcccactgtgaatgagactacagactactcgagtgaaggtatagaagatttagtatttgacatattagatctcaagggaaagaccaaatctcatcgatacaaaaatgaagatataacttttgaccatcctttttctgcaatgtatccgagtgtaggaagtgggataaaaattgaaaatacactcattttcctagggtacggtggcttaacaactccgctccaaggcgacactaagtgtgtgataaacagatgtaccaatgttaatcagagtgtttgcaatgatgctcttaagataacttggctaaagaaaagacaagttgtcaatgtcttaattcgtatcaataattatttatctgataggccaaagattgttgtcgagacaattccaataactcaaaattacttaggtgccgaaggtaggctacttaaactaggtaaaaagatctacatatatactagatcttcaggttggcactccaacctgcaaataggatcattagatatcaacaaccccatgaccattaaatgggcgcctcatgaagtcctgtctcgaccaggaaaccaagactgcaactggtacaacagatgtccgagagaatgcatatcaggtgtatatactgatgcatatccactatctcctgatgcagtcaatgttgctacaaccacactgtacgcaaacacatcacgtgttaatcccaccataatgtactcaaatacctcagaaattatcaacatgctaagactcaagaatgtacaactagaggcagcatacactactacatcatgtatcactcatttcgggaagggctactgcttccacattgttgaaatcaaccaagccagccttaataccttacaacctatgttgttcaagacaagtatccctaaaatatgtaaaatcacatcttga

SEQ ID NO: 10768 - DNA, 213 bp, unidentified
  misc_feature 1..213: note = Synthetic
  source 1..213: mol_type = other DNA
attcaacgggacacaatagtgggcgtggcaatggcttgctatatccaccccggtaaggcagccagccaggcaccatacagcttctacgactgcaaagaagagagctggcacgtggggctcttccagatcaaacacggacctggaggggtctgtacaccaccttgccacgtagcgattagggccgaccgccacgaggaacccatgcaatcgtga

SEQ ID NO: 10769 - DNA, 144 bp, unidentified; identical to SEQ ID NO: 1426
  misc_feature 1..144: note = Synthetic
  source 1..144: mol_type = other DNA

SEQ ID NO: 10770 - DNA, 33 bp, unidentified; identical to SEQ ID NO: 1427
  misc_feature 1..33: note = Synthetic
  source 1..33: mol_type = other DNA

SEQ ID NO: 10771 - DNA, 10026 bp, unidentified
  misc_feature 1..10026: note = Synthetic
  source 1..10026: mol_type = other DNA
atgaagaggaaggatttggaggcgcgaggaaaagcgccagggagggatttttccaccccgttctggggaagagaaggtaggagaaaggacaaggaaaagggaggggagtctccctcaaatcggcaagtgaccctgaatacacccatccagagtgggcgtagggcagggaaaagacagcgtgttggcctgctaggaaggctgggagttggatggggatccttcttacaggaggacatcgtccaagccctcattcacatggcattggtgcttcatgccctgttttcctccatcgaccggcgaattcgctcattatctcgacgtgttaccgctcttgaatctcgacgaaccacaggagatcctatgacgctagctttcatcttgggctttctcacagtgttatgtggatgcgtggtgattgacatgcaagtttctaccgctaagggcacggaaatttttgaaggaaagacgaaccggacagactacttgcatctggtcaagttacccgctgatggttgctggagtggcattcttgtcacaaagaagtgcccaaaagtgactgacttggcaaaggacctcgagtcaacagattgcggatcaacgtggactgagttcacattgcggtatcggagatgtgccgtgaagaaacgtgaaaagcgatcacgtgaacccccgaaagcggatctgctagctgaaatggagatcatcgcgttcaagaccattcgcgaaaataagacgattttcatcgtggccctactgtgtgtggcaatcgcgaagcgttggcccacctgggttgtgattcttctggctattggcacttggaccacagtaaagggggagtttgttgaaccgttatacacgctgaaagcggaacagatgaccatgctacagaccattgtgagaccggaggaagggtacgtcgtggccacgccaaacggtcttctcgagtttaaaacaggaccggcggagatctatggggggcaatggctgcgcgagttactcgcagactgccacgtcaacgcatcctattcgactgacgtgtgtcccggtggatcgcagctcaacatggctgacatcatggccaaggaacgagtatgctcgacccagccatacaaccgcggttggggcactgggtgcttcaagtgggggattggattcgttggaacgtgcgtcgaactccattgcgacagaggattcaacgtttcttccatcgctaggtcagccattgtcatgaacgttacggctagcttccactctgttagcgacacacaacagatggttggcgacataccgcttacatttaggtttgcgaaactcggaaacgcggcgatgacctgcaggttggagtctgagcagttgctgcttgattactatcacgttacgggaagctctcacgaggggctgtttttgcggtcgcaaattgacagttggcctggtgtgcactctaccgctagtggtcggcatggcatggagaaagttgttgtgtggggagatgctaggtccaatgagatattggtaaaaaacgtaattgaaccttcgttgtcctgggaagacgcgatcgccacccatgatggattccgtgatatctcttttgtttgtcagattatgctcgacaaactagtcagtggagcttttcgagactgtccaggcccaaaaacatccacattttcccaagacggctttgggtatagtggagtggtgataactaccctcaccgcttcttcaaatgagacctgttcgcttagcttaacgtgccacggctgtctgctgcaatccacaaaaatgatctttctcgcagggaagacaacttctcgggcatttgtcaagtgtgggaaccatacgagcaccttgctcgttgggagcacttcagtttccattgagtgtgcccttaaccctatctcgcaaggatggcgcctggctcgacacgtggtggataggtatcgacggtttggcgtgtctggtgttgcgggagtgtggcaggatctggttggaaagttttcggttggtgcctttttctccaacacaacccttctagtcattttcgtcctcgctgccttgattgacaaacgcatagcctttctgttggttttaggggggtacttttactatgtgcgggctgatctggggtgtgggattgacaccacgagaaaaaccatctcgtgcggcagcggcgcttttgtgtggaaacacttgggcgttggcatttccaatgatcatgctgtggaacttgaagattactcattcactgacttgtacataaaggatatgtttagctggaccacgaaaccctgcttgatttgtgaggatgctttgcagtgcgtagccctgcgcagagctgctttctctgctgttgggtcaatgggtcctgaacaggtgtatgtaaatgacacattggcacgtacattcaagttctccgaaacaccaaagagaaccatttccgtcaccattaacctaattcagtacaagttctcatcttatgttgcacatggacgcgctgagggtgatctggggcatctaccaacaatgtttggaagctatcccgaaaaagaggctgataaggttatccggattgtcgcatcgcggcccgatattcgccgactttgcggaaaagctgtctctttccaattcaagtttacgggcttccggcgaggcttgtatggttcaaacgttcaggttgaggtctcaaagaactcatcgaccgagtgtcccacgtacctggcgggcgttgtcgtgaagaatggccgaactgtcatcactgacggcatgttttggttggaaagcacagtgttggatggagttgcccagattacatcacttgagatgcgtcaatcacaccgctgtgtgtggcccagggaatacaccccagacacgctcagtgacccttcagaccaagctttatttattccacctgcttgggggggaccaatttcgcgagtgaaccacataatcgggtacaagacacaaactgactttccgtggaacgttagtgacatcactctcatagagggcccagcccctggcacaaaggtcaaggtggactctagatgtcatgggcgaatgcacgcacaggtaattggaccgaatgacacggaatcctggtgttgccaatcatgcacaagaatagtccactttcgagttggtgacctcctatattaccccatggagatccaacttggaaccatgtctgaagcgccagagccgaattctaaaatatttgaggaaccgatcggcgaggaaccagaaccaacagttgacgacatattgaagagatacgggaaggcaaacgctcaatcggatttccggagggtgagcccacgtgcaggagttgggttcgaccgctccctcctaaatctcctgtgcctcgctatttcattgcagcttatcggggcaaaaaccagaacatcgacactaacccgtctatttctgacgattctagcaatggcgctctttggactccccaatttgttttcatctgtggggctatctgcttgggtgttgctagtggcgtcctcatcatcgcaaccgcaagatctattgatgaatctctggatcatactacagactgggagctcagcagtcctgctgttggggtacatgatcaggaagaaactctcaatagtgctaggggtccaccacttggtgactttgatgtgcattcagttcctgttctccgccgtcgatcgctatcagaaatatctctacggtctcctagaactcatggcttcggtggtcctgctgagcgcctacaagagcgtcctgcaggctctccccccagaggttctatgtttcagcctgataatggggtggaagacagccctgtctctcgctaccgttgtgtctctgatcttcagtttgaacgctatgtacaagtacgcatgtcaatatcacaatccgaggaacggctacagagactctggcgcgaatttatggttttggactgtatccttggcgagcgctgggggaatctgggcggcggagaaagctcaccaaccaacggtggcagctgtcctagcctttacaatgatagtgctctttctttacatggaacagacgaacgtcagtatggagcttgagttcatctcagctggagagactcccgaaggagtgtcaaccgaaaatgatgacgggatgaatattcctgacttaaaagggcgctatggggaggatgggatcgtcgtgggggcggcctcatcgtctggccacctacccgagctcgtgtttgtgttcctcctaggttttgccgtgacgtccacttcatactttttgggggcgctctacctgctcatcgcaaccagcactaaccttcccgtgaccataatacggatgctgcgtatgaagctcactgccaacaaccgatctgatgatctcttgggactcggcggacctattgaaactgatctccagaccagctttcaagacattcccaatggagtgtatcgcatcgttgttcgcagcttatttggcgaccggcaacgaggggctggcttctcgaaaaatggggtgtttcacactctcatgcacgtcactcgaggtgaaccagttaaatggcgtgggcgagttgtcgttcctcactctggtagtgccttgcgcgacgtggtgtcgtatggtggaccttggcagttggacacccccactaccacggaagacctcgtgctgatggcttgcaaaccggacaagaccgttgagtaccatcggtacaggccgggagtcatgagtattgacggtgaacctgtcatgttcattagtgatgatttcggaaaaggatcttctggctcaccgttcttcattaatggcgagcccgtcgggttctatggttttgggttctatgtgaacggcatttatcgctcaacagtagcaggtggtaaaccaaccgatgtcacggagaacttggactgtgattcgaccaggcggttcgtgacatggcatccgggaaaaggaaagacgcgcaaggttattgtcgaagaaactaagaagaactatgattccaaccaacggaccgtgatcttaacacccacccgggtagtcatggctgaggtcgttgaggccttgaagaactcaggcatgaggagtgataagaacctgtcgtactgcaccaggaacctgataacggttgcatgtcacgcaacgttcacgaaatttgttcttagccatggcgccaagaaagtgcgggttgccatgatcatcatggatgagtgccatttcatggatcctatgtccattgctgcgcgcgggatcatggagcatctccacagccaaggaacaaaattgatttaccttagtgcaacaccacccggccacgcgcctgatacaggctcgaattatgcaataagtgaccaatccattagcttcccaacctggttgagtccagcgtggataggaaacgttcaaaaatccgtgggggcgaagaagaccattttattcgtcccatcgcacaaccaagctaacaccctggctagtgctattcctggatccgtcccattgcatcgagcaaacttttccactaactatgcacaagcgggtgatgcagccaccgccctggtaatctccaccgacatctcagaaatgggagcgaatttgggcgtcgatctggttatagacactcgaagagctttgcgaccccttgtggattctgccacgcgtgtgaagctggttgaaacgaacataaccacatcatccatgatccagaggagagggaggacgggaagacgggaaccaggaacgtatgtgtatcctattgatagccaaacggaggaaaatccagtgtcttgggcgtgttggcctgaagcccaaatgatactggaccagctcggcatgacttttatgctagaggaagccgcatacagccaacccccggggagattcaccctagtgggagaggatagaatgcgattttcaaagcttatggaccgggatgacattcccatttggttggcgtggcactgggcagaagctggggaccgacggcactcagccctgtttcagggcgaaggaaccggaaagatcatcgagaaccgatttggcaaacaagagtatcgaccacaatacgttgatgaccgctttgagagcgttgagtgggagacgcgcaaggtgtccattgatttctacatgaactgccgcggggggcctagcctctatgagtttttcacattgattgattggactgacatatggaggagaacgacatctgctctttgggatttgagtgacgtcatgaatggagaactgcgtgaccggtccacaactgagcgctcccttaccgtgctaatggcttttgtcttgggcgtctcaattgtgctctcctgtttcatcgctgtctgggcattgtgtttcctattctccttgtttaggccgcgaaaggtaacttatgagcaaatgccatctagtgacccacttagcggtggtgtcttggtgtcaacccctagcctcctttattatatgggagtccccttggggttctgcgtcgtcatatcactggctatgttcttggtgtacccagtattgtacaagtcaattggaaatcgcagttacatggacagcgatttggtaaagtgggtcatcttgggatcatgtctgatctgcggagtgctggcttgggagatgcgaatgttcccgaacatacgtggcgacctcatggagctcgtgaaagctgtcaaggagcccgaggaggtcgtgaattccgggccattttttccaagttgggaaatagcgcggggaaagggagctacaatgttggactctctgcaggtattcttcttcataacagtgttgtcaacaaaattcttgtactggttccaggagaactggactgcacgaatgtacgccatgaaacatccggagatggttagctcgattggtggattcagatttgatgaaattccattcagggcagtccttccctctggttttgccattgtcgcgattgctagcctctcaagtgtggtggtggggcttctggcagctggtgtgttcatggccatcatgtactgtcagaacaagtggaatgccaccccaaagatcttgacagcattggacgctcgcgaccagagacatgatcgtcccactgaaatcactagtagagtgccactcgaaaacactcggtccatcatgtatgccttttgcttgatcttcagcctgttttgggctttctgcacacggtctcctggagattttctccgagggtcattggtggtcggggctagcatgtggcaaattctccatccccggtcaaagatccatgatgtcatggattttggctccatggtgtctgccatagggttgctagaaatgaactaccttttttataggttcatgcacattgccgctagagccttgggcgcggtagctcccttcaaccagtttcgagctctggaaaagtcaacaacgatcggtctgggaatgaaatggaagatgactctgaatgctcttgatggagatgcattcacaaaatacaaatcacgcggggtaaatgagacggagcggggtgattatgtctctcgtggcggcctcaaattgaatgaaatcatctcaaagtacgaatggagaccgagtggtcgagtggtggatttgggatgtgggcgcggtggctggagccagcgagctgtgatggaggaaacggtgtcctccgctctcgggttcacaataggtggggcggaaaaagagaatcctcagcgattcgtcacgaagggatataacctggctacgctaaaaactggagtggatgttcataggctcaccccattccggtgtgacaccattatgtgtgacatcggagagagtgatcccagcccaatcaaggaaaagaccagaactctcaaagtcttgcaattgttagaaaattggctcttggtgaacccgggagcccattttgtgtgcaagattctatcaccatattctcttgaagtccttcggaaaatcgagtccctccaacatctgtacaatggcaggttggtgcgcctctcccacagtcgaaatagctcggctgagatgtactacatctccggggctaggtctaacgtggtgcgcaccacatacatgacgctggccgccttaatggcccgcttctcccgacacttagacagcgttgtcctcccgagtcctgtgttgcccaaaggcacacgggctgacccggctgctagtgtggcatccatgaataccaacgacatgacggaccgtgttgaacgcttaatgaacgagaaccgtggaacatggtttgaagatcaacaacacccctacaagagtttcaagtattttggatcgtttgtcaccgatgatgtgaaggtaggagggcaagcggtgaaccccctcgttaggaagatcatgtggccatgggagactctcacgagtgtggtggggttttccatgactgacgtgtcaacctactcacagcagaaggtactgagggagaaggtggacactgtcatccctccccacccacagcatatacggcgggtcaacaggacgattacaaagcattttatccggttcttcaagaatcgcaacttacgaccgcgtattttatcaaaagaagaattcatcgccaacgttcgaaatgatgcggctgtaggatcgtggagcagggatgtgccatggcgagatgtgcaagaagccatacaggaccagtgcttctgggatctcatcggaaaggaacgggccctccatctgcaagggaagtgtgaaatgtgtatctacaacaccatgggcaagaaggagaaaaagcccagcctagctggtgaggccaagggctcaaggaccatctggtacatgtggcttgggagccggttccttgaatttgaggctctaggctttcttaatgcggatcactgggtcagtagggagcacttccctgggggagttggaggcgttggtgtcaattatttcgggtactacttgaaggacattgccagcagaggaaaataccttttcgcggacgacattgctggatgggacacaaaaattagcgcggaggatctggaggatgaggaagctctcctaacagccctcacggaagacccccaccacagagcgttgatggcggctaccatgcgactggcatatcagaacattgtggccatgttcccacgaacacactcaaaatacggcagcggcacggtgatggacgtcgttggccgtcgggaccaacgtgggtcagggcaagtagtcacatatgcgctgaacaccataacaaatggtaaggttcaggtggcgagggttttagaaagtgaaggactactgcatgcggatgaatcggtgttggatgcgtggttggaaaaacaccttgaagaagctctcggaaacatggtcattgctggagacgatgttgttgtgtcgacagacaatcgcgatttttcatctgctctcgaatatctcgagctgacgggaaaaactcggaagaacgtcccacagggagctccctccaggatggagagcgactgggaaaaggtggagttttgttctcaccattaccatgaaatgtgcctgaaagacggcagaatcctcatagcaccttgcagacatgagaacgaagtgcttggtcgtagccgattgcaaaagggaggggtagtcagcatctcggagagtgcttgcatggccaaggcctatgcccagatgtgggcattgtattttttccacaggcgtgatttacgcctaggtttcattgccatctcgtcggctgtgccaaccaattggttccctctaggacgtacctcgtggtcagtccaccagcatcacgaatggatgaccactgatgacatgcttcgggtttggaatgacgtgtgggtgcacaacaacccgtggattctaaacaaggagtcaattgaatcctgggatgacatcccctacctgcacaagaaacaggacataacctgcggaagcctgataggggtcaaggagcgcgcaacgtgggcacgagagattgaaaatagtgtcatcagcgtccggaggataatcgacgcagaaactggggtcctgaacacctacaaggacgagctctcagttatgagtcgatatcgaagaggaaatgatgtcatttag

SEQ ID NO: 10772 - DNA, 111 bp, unidentified; identical to SEQ ID NO: 1429
  source 1..111: mol_type = other DNA
  misc_feature 1..111: note = Synthetic

SEQ ID NO: 10773 - DNA, 186 bp, unidentified
  source 1..186: mol_type = other DNA
  misc_feature 1..186: note = Synthetic
atgcatgtctatatgccagtcaacacggagaggaattctacaccaacaagattgtcccactcattgagcgggcaattgaacttgaaggtctacacattgaggtcccggaattccatcaagctgttgcagcttacaacgggtacttcaatggtactgagggccaaccaagccagatcgctttcgtga

SEQ ID NO: 10774 - DNA, 117 bp, unidentified; identical to SEQ ID NO: 1431
  source 1..117: mol_type = other DNA
  misc_feature 1..117: note = Synthetic

SEQ ID NO: 10775 - DNA, 285 bp, unidentified
  source 1..285: mol_type = other DNA
  misc_feature 1..285: note = Synthetic
atgggcaactgcaacggggcatccaagtctaaccagccagactcctcaagagccacacagccagccgcagaatttaggagggtagctcacagcagtctatatggtagatataactgtaagtgctgctggtttgctgataccaatttgataacctgtaatgatcactacctttgtttaaggtgccatcagggtatgttaaggaattcagatctctgcaatatctgctggaagcccctgcccaccacaatcacagtaccggtggagccaacagcaccaccaccatag

SEQ ID NO: 10776 - DNA, 297 bp, unidentified
  misc_feature 1..297: note = Synthetic
  source 1..297: mol_type = other DNA
attgggaaagaagcaactataccagacataaagctggagctgcaagaccttgtcctgcccattgacctgcattgtgacgaagagttgacagaagagcagtcagaaaacctgtcagaatctacagtagcagaggtggagcctcagagaactctgtacaagattgtagtaccgtgtggaggctgtgattcccggctgaaaatctacgtttctgctacacagtttggaattcgttctttagaagacttgctgctagaagaaccttctttgctgtgtcctgcttgcagaaatggcagataa

SEQ ID NO: 10777 - DNA, 27 bp, unidentified
  source 1..27: mol_type = other DNA
  misc_feature 1..27: note = Synthetic
atgaccactatcaccagcaacaagtaa

SEQ ID NO: 10778 - DNA, 1065 bp, unidentified
  misc_feature 1..1065: note = Synthetic
  source 1..1065: mol_type = other DNA
ttgccgtctcttcgcgcgtcactcttcatggcttggcgcagcgggctttgcgagaccgattccagaactttgaagcagttcttgcaagaggaatgcatgtggaagctggtcggcaagagccggaaacaccgcgagtatcgggccgtcgcttgccgttcgacgatctttagtccggaggacgacggctcgtgtatcttgtgccaattgctgttgttctaccgcgacggcgaatggatcctctgtctttgctgcaacggccgttatcaaggccactatggcgtgggccacgtacatcggcgtcgtcgacgcatctgtcatttacctaccttgtaccaactgagcttcggaggtcctttgggtccagccagcattgatttcttgccaagctttagccaggtgaccagcagtatgacgtgcgatggtattacgcccgacgtgatttacgaggtctgcatgttggtgccccaggatgaagccaagcgcatcctggtcaagggtcacggtgccatggacctgacctgtcagaaggcagtgacgctaggcggcgccggcgcctggttgctgccgcgtcccgaaggctacacgcttttcttttacattctgtgctacgacctgtttacctcatgcggcaatcggtgcgatatcccttccatgacgcggctcatggcggcggccacggcctgcgggcaggcgggttgcagcttttgcacggatcacgagggacatgtagatcccactggcaattacgtgggttgcacccccgatatgggccgctgtctttgttacgtgccctgtgggcccatgacgcagtcgctcatccacaacgaggaacccgcgacttttttctgtgagagcgatgacgccaagtacctatgcgccgtaggttctaagaccgcggcgcaggtcacactgggagacggcctggattatcacatcggtgtcaaggattctgagggccgatggttgcccgtcaagaccgatgtgtgggacctggtcaaggtagaggaacctgtgtcacgtatgatagtgtgttcctgtccggtgcttaagaacctagtgcactaa

SEQ ID NO: 10779 - DNA, 798 bp, unidentified
  source 1..798: mol_type = other DNA
  misc_feature 1..798: note = Synthetic
acgaacggaatgccgggacataacgcgccgtataacacgccgcgccttcgcggcgtacttgcgacacgcccggggtttcgaagggtccccgggcgatacttagcccctccgtatagggcggcggcagtcattcccgtttgggcccgcggtctccgcgccgcgtcgccgagcgcgcacgccggtcgccatgtcggacagcgcgctccaggtcccggcgcccgccggcatgacccccccgtccgctccacccccaaacggaccgttgcaggtcctgttggggagcctgaccaacctccgccggccgccctccccctcgagcgagccggcgggcagcgcggacgagccggcgtttctgtccgcggccaaactgcgcgccgccacggcggcgtttctgttgtcgggcgcggcggtcggcccggcggaggcgcgggcgtgctggcacccgctcctggagcaactgtgcgccttgcaccgggcccacgggcttccggagacggcgctcttggccgagaacctccccgggctgctggtgcaccgcatggcggtggcgctccccgagacccccgaggcggccttccgggagatggacgtcatcaaggacacggtcctggcgatcaccggctccgacacgacccacgcgctggaggccgccgggctgcgcaccacggcggccctggggccggtgcgcgtccgccagtgtgccgtggagtggatcgaccgctggcggaccgtcacccagagctgcctggccatgaacccgcggacctccctggaggccctcggggagatgtcgcttaa

SEQ ID NO: 10780 - DNA, 18 bp, unidentified
  source 1..18: mol_type = other DNA
  misc_feature 1..18: note = Synthetic
atggaaagttatatgtaa

SEQ ID NO: 10781 - DNA, 33 bp, unidentified; identical to SEQ ID NO: 1442
  misc_feature 1..33: note = Synthetic
  source 1..33: mol_type = other DNA

SEQ ID NO: 10782 - DNA, 135 bp, unidentified; identical to SEQ ID NO: 1443
  source 1..135: mol_type = other DNA
  misc_feature 1..135: note = Synthetic

SEQ ID NO: 10783 - DNA, 135 bp, unidentified; identical to SEQ ID NO: 1443
  misc_feature 1..135: note = Synthetic
  source 1..135: mol_type = other DNA

SEQ ID NO: 10784 - DNA, 5460 bp, unidentified
  misc_feature 1..5460: note = Synthetic
  source 1..5460: mol_type = other DNA
atgtcgaaagtctttgtagacatcgaggccgagagcccgtttttaaaatcactacaaagagcatttccagcatttgaagtggaagcacagcaggtcacgccgaacgaccatgctaatgctagagcattctcgcatctggctacgaaattgatagagcaagagacagaaaaagacacgctcatcctggatatcggcagtgcaccagccaggagaatgatgtctgagcacacataccattgtgtgtgcccaatgcgcagcgctgaggacccagagcgtctgctgtattatgctaggaagttggctaaggcatcaggcgaagtcgttgacagaaacatcgcagcgaagatagacgacctgcagtcagtgatggcaaccccggataacgagtcacggaccttttgccttcacacagatcagacatgcaggactcaagcagaggtggcagtctatcaggacgtctatgcggtccatgcaccgacttctttgtacttccaggcaatgaaaggagtacgcacagcgtattggattgggttcgacaccaccccattcatgtttgatacaatggctggggcctatccaacatatgcaaccaattgggctgacgaacaggtattgaaagccaggaacataggattatgttccgcatcactgacggaggggcaccttggcaagctgtcaataatgaggaaaaagaagatgacaccgagcgatcaaataatgttctcggtaggctctacactgtacatagaaagccgtcgcctgctaaagagttggcatttaccatcagtgttccacctgaaaggacgacaatcgtatacgtgccgttgtgatacaattgtgtcatgtgagggctacgtcgttaagaagataacgatgagcccaggggtttttggaaaaacatcaggttacgccgttacacaccatgctgaaggattcctggtgtgtaaaaccacagacacaattgctggtgagcgggtttcgttccccatctgcacgtatgtaccatcaacaatctgtgaccagatgactggcattttagcgacggaggttacacctgaggacgcgcaaaaattgcttgtcgggttaaatcagaggattgtcgtaaatggaagaactcagaggaacaccaatacaatgaagaattatttgctaccggtggtgtcgcaggcattcagcaagtgggcaaaagagtatcgacttgaccaggaagacgagaaaaacatgggtatgcgtgaacgtaccctgacttgctgttgcctgtgggcctttaagactcacaagaaccacaccatgtacaagaaaccggacacgcaaacaattgtcaaggtcccgtcggagttcaactcctttgtaattcccagcctatggtccgcagggttgtcgataggaatcagacaccgaattaggcttcttctgcagtcaagacgagtcgagccactcgttccatccatggacgtaggcgaggccagagcagcagagagggaagctgctgaagctaaggaagcagaagataccctagcagccttaccaccgctgattccgaccgctccagtactcgatgacatacccgaggtggatgtggaagagttggagtttcgagcgggagccggtgttgtcgagacacccaggaacgcccttaaagtcacaccccaagacagagacaccatggttggtagttatcttgtcctgtctcctcagactgtccttaaaagtgttaaactgcaggcattgcatcctttagcggagagcgtaaaaatcattacccacaaaggtcgtgcagggcgataccaagtggatgcctatgatggccgtgttctactccccacgggggccgcgattccggtgcccgatttccaggctttgagtgagagcgcaacgatggtgtacaacgagcgcgagtttatcaaccgcaagctgtaccacatagccgtgcatggggcagcactgaacaccgatgaggagggctatgagaaagtccgggccgaaagtacagacgccgaatacgtttatgatgtggaccgcaaacagtgcgttaaaagggaggaggccgaaggtctcgtaatgatcggagacctgatcaatcctcccttccacgaatttgcgtatgagggactgaaacgaagaccggcagccccgtacaagaccaccgtggtcggggtctttggcgtgcccggatctggaaaatcaggtataatcaagagcctggtcacacggggggacttggtcgccagcggaaagaaagaaaactgtcaggagatcatgcttgatgttaagagatatagagacctggatatgaccgcaaaaacagtggattccgtactgctgaacggcgttaagcagactgttgacgtcttgtacgtcgatgaggctttcgcatgccatgcggggacactgctggcacttatcgccacggtacgaccacgcaagaaagtggtactatgtggcgacccaaagcagtgcggattctttaatttgatgcagttacaggtcaatttcaatcataatatctgcaccgaagtcgaccataagagtatctccagaagatgtacgctgccgatcaccgccattgtctcgacattacattatgagggcaggatgcgtactaccaacccatacaataagccagtcattattgataccacaggccagaccaagccgaaccgcgaagacatcgtgttaacgtgtttccgaggttgggttaagcagttacaacttgactatcgtggacacgaggtcatgacagctgctgcatcacaggggttgacccgaaagggcgtgtatgccgtccgaatgaaggtcaacgaaaacccgctgtacgcgcaatcttcagaacacgtcaatgtcctattgacgcgtacagagggccgacttgtgtggaagacgctgtcgggtgatccctggattaagaccttgagcaacataccaaaagggaattttacagcaaccttggaggactggcaacgagagcatgacaccatcatgagggcaataacgcaggaagcagctcctttggatgtgttccagaataaagctaaagtgtgctgggccaaatgcctggtacccgttttggaaacagcagggatcaaactgtcagccactgattggagtgcgattatcttggcctttaaagaagacagagcttattcgccagaagtcgcgctgaatgagatctgcacaaaaatctacggagtggacttagacagtggtctgttctcggctccgcgtgtgtcgctgcattatactacgaatcactgggataactcaccaggaggaagaatgtacggattctctgttgaggctgccaaccgtctggaacaacaacacccattctataggggacggtgggcttcagggcaggtgctggtcgcggaacggaaaacacagccgatcgacgtcacctgcaatctaatcccttttaacaggagactaccgcacacgctggtcacggagtaccatccaatcaaaggtgaaagagtagagtggcttgtgaacaagatcccgggttaccacgtgctgttggttagtgagtacaacctcatcttgccgaggagaaaggtgacgtggatcgctccgccgactgtaacaggagctgacctaacatatgacttagatctaggactgccacctaacgctggcaggtacgacctggtcttcgtcaacatgcacacaccgtataggctacaccactaccaacaatgtgtcgaccacgccatgaaattacaaatgctgggcggtgatgcactttacctattgaaacctgggggaagcctccttttgagcacctacgcgtacgctgacagaacgagcgaggcagtggtaacggccctcgcccgtcggttctcgtcatttagagccgtcacggtccggtgtgtaactagcaacaccgaagtgttcttgctgttcacgaactttgacaatggtagaaggacagtaaccctgcatcaaacaaatggtaagttgtcatcaatctatgcggggacggtgctgcaggcagctggttgcgctccagcgtatgccgttaaaagggccgacattgcaaccgctattgaggacgcggtggtcaacgcggccaaccaccgcggacaagtgggcgacggtgtctgcagagctgtagcacggaagtggcctcaagccttccgcaacgcagcgacaccggtcggaaccgcaaaaaccgtcaagtgcgacgagacctacatcatccatgcggtggggccgaactttaacaatacatccgaggccgagggagatcgtgacttggcagcggcataccgagccgtggcagcagagatcaaccgactgtccataagtagtgtggcaatcccactgctttctacaggtatatttagtgctgggaaagacagagtgcatcaatcactctcgcatctgttggcagcaatggataccactgaggcacgggtcactatctactgccgcgataaaacgtgggagcaaaagattaaaaccgtcctgcaaaaccgcagtgccactgaactggtgtcagatgaattacagtttgaagtcaacctgactagagtccatccggacagtagcctggtgggacgtccagggtacagcactaccgatgggactctgtactcctacatggaaggtactaagttccaccaggcggctcttgacatggctgagatcacgactttgtggccaagagtccaggatgcaaatgaacatatttgtttgtatgcgctgggcgagaccatggacaatattcgtgccaggtgcccagtggaagacagtgattcatcgactccacccaagacggtcccatgcctatgccgatatgccatgacaccggagagagtcacaagactacggatgcaccacacaaaagatttcgtggtttgctcgtcttttcagctgccaaagtatcgtatacctggcgtgcaacgagtgaagtgtgagaaagtaatgctttttgatgcagctccaccagcctccgtcagtccagtgcagtacctgacaaaccaaagtgaaactaccataagtttgagttcattttcaattacgtctgacagcagctccctcagcacttttcctgatctggagtcagcggaagaacttgaccatgactctcagtccgtgcggccagcgctgaatgaacccgatgaccatcaacctacgccaacggcagaacttgccactcatcccgtaccaccgcctcgccctaaccgtgcaaggcggttggcggccgctcgtgtgcaagtccaggtggaagtacatcaaccaccttccaaccaaccaacgaagccaatcccagcaccacgtaccagcctacgccccgtcccagctcctagaagatacgtgccaagaccggtggtcgagttaccctggccgctggagaccatcgatgtagagttcggggcaccgactgaagaggagagcgatatcactttcggtgacttctccgcctcggagtgggaaaccattagtaattcatcttga

SEQ ID NO: 10785 - DNA, 5460 bp, unidentified; identical to SEQ ID NO: 10784
  source 1..5460: mol_type = other DNA
  misc_feature 1..5460: note = Synthetic

SEQ ID NO: 10786 - DNA, 30 bp, unidentified; identical to SEQ ID NO: 1447
  misc_feature 1..30: note = Synthetic
  source 1..30: mol_type = other DNA

SEQ ID NO: 10787 - DNA, 42 bp, unidentified
  misc_feature 1..42: note = Synthetic
  source 1..42: mol_type = other DNA
attaatgtcgaaatgatttttataaaaatattgaatatataa

SEQ ID NO: 10788 - DNA, 54 bp, unidentified; identical to SEQ ID NO: 1449
  misc_feature 1..54: note = Synthetic
  source 1..54: mol_type = other DNA

SEQ ID NO: 10789 - DNA, 54 bp, unidentified; identical to SEQ ID NO: 1449
  source 1..54: mol_type = other DNA
  misc_feature 1..54: note = Synthetic

SEQ ID NO: 10790 - DNA, 54 bp, unidentified; identical to SEQ ID NO: 1449
  misc_feature 1..54: note = Synthetic
  source 1..54: mol_type = other DNA

SEQ ID NO: 10791 - DNA, 54 bp, unidentified; identical to SEQ ID NO: 1450
  source 1..54: mol_type = other DNA
  misc_feature 1..54: note = Synthetic

SEQ ID NO: 10792 - DNA, 54 bp, unidentified; identical to SEQ ID NO: 1450
  misc_feature 1..54: note = Synthetic
  source 1..54: mol_type = other DNA

SEQ ID NO: 10793 - DNA, 54 bp, unidentified; identical to SEQ ID NO: 1450
  misc_feature 1..54: note = Synthetic
  source 1..54: mol_type = other DNA

SEQ ID NO: 10794 - DNA, 144 bp, unidentified; identical to SEQ ID NO: 1452
  misc_feature 1..144: note = Synthetic
  source 1..144: mol_type = other DNA

SEQ ID NO: 10795 - DNA, 1275 bp, unidentified
  misc_feature 1..1275: note = Synthetic
  source 1..1275: mol_type = other DNA
atgaatccggataaaacaatcgcagtgattacagagactattcctataggtatgcaatttgataaagtatatttgtctacatttaacgtgtggagggaaattctatccaataccacaaaaacactagatatatcatctttttattggagtttatcggatgaagtgggtacgaatttcggcacgataatattaaatgagattatacaattacccaaaagaggagtacgcgttagagtagccgtcaataaatccaacaaaccattaaaggatgttgaaacgctacaaatggccggagttgaagtaagatacatagatattacaaatatcctaggaggagttcttcatacaaaattttggatatccgataatacacatatttatttaggaagcgctaacatggattggagatcactaactcaggtcaaggaattgggtattgctatcttcaataatagtaacttggcagcggatctcactcaaatttttgaggtatactggtatcttggagttaacaatctaccatataattggaaaaacttttatcctgcgtattataatacagatcatcctcttagtatgaacgtaagcggtgttccacattctgtatttattgcttctgcgccacaacaactatgtactatggaaagaactaatgatttaaccgctttattgtcatgtatcggaaatgcgagtaaattcgtttatgtatccgttatgaactttatccctattatttattcgaaggcgggtaaaattttgttttggccgtatatagaagatgaattaagaagagccgctatagacagacaagtgtcagttaagctattgattagttgctggcaacgatcttcgtttattatgagaaactttttaagatctatcgctatgctaaaatctaaaaacatagatatagaagtaaaactgtttattgtaccggatgccgatcctccaattccatattctagggtaaaccatgccaaatatatggtaacagataaaacggcgtatataggaacctcaaattggacagggaattactttacggatacatgtggagcatctattaatattacaccggatgatggattaggtcttcgtcaacaattggaagatatttttatgcgtgattggaattcaaaatacagctatgaattgtacgatactagtcctactaaaagatgtagactattaaaaaatatgaaacaatgcacaaatgatatatacaacgacgagatacaaccggaaaaagaaattcctgaatactatctggaataa

SEQ ID NO: 10796 - DNA, 10275 bp, unidentified
  source 1..10275: mol_type = other DNA
  misc_feature 1..10275: note = Synthetic
atgtctaaaaaaccaggaaagtccgctgcaaagcggactgtcaatatgctaaaacgcctggctagcgtgtccccctcaagggggcgaagaactattcggagaatgctagatgtgagaggagcaccaagattgatcctagccctcatggcttttttccgtttcgcagcaatcaagcccactctgggcttgaaaaaacgatggcgttctgtcaacaagacagtcgctgtcaaacatctgaccaacttcaaaaaggaactgaccaccatgctcgactcagtcaacaagcgcaaggaaaagaagaagagcttctcaacggccctgctctggattaccatgatcacagcggtcgccggcctcaagatctcatcacacagagaccggcctctgctgatggtgaacaaaactgatgtgtcggatgccatcccagtgccctcagtgaaaggaaccaacatgtgcacgatcagggctttggacgtaggctacacttgcgcttatgacacaacttacgagtgccctcacctggaagtgaccatggatccggaagacatagattgttggtgcacacttgaatctgtttatgttaactacggactctgcaagcaaaaccatcatgttagaaggggccgacgtgcgatcaacattcctcaccacggagagagccatcttgaaaaccgggcgactccatggatggacaccaccaagacaaccaagtatctaactaaagttgagaattgggttatacgcaatcctggatatgcactagtagcattggccacagcctggatgttaggtagcaacaccccgcagagggtggtcttcatgatcatgatgatgctcattgctccagcatacagcttgaactgcttgggaatctcaaaccgagattttgttgaaggcttgtctggaggcacatgggtggacattgtgctggaaggagggagctgtgtgacagttatggccaaggacaaaccaacactagacatcaagttgataagaatggaagccaaggacctggccacggttcgtagttactgctaccaggccactgtcaccgactcgtcaactgaggccagatgccctaccatgggtgaagcccacaactccaaatctcttgacgccagctacgtctgcaaatcatcatacgtggatcgcggatggggcaatggatgcgggctctttgggaaagggagcatccaaacttgtgtgaagttttcatgtcctggaaaggctactgggaaaagcattcagagggagaatctgaactatgacgttgcagtgtacgtgcacggaccaataagcgcagccgcacacggcaactacaccgcccaattgacagggaagtacgctgccaaattctctatcactccaagtgcaccaacatacactgcaaatttgggggaatatggagaagcaacaatggagtgtgaaccacgggccgccttggacattgacaactactatgtcatgtcactcaacaacaaacattggcttgtcaaccgtgactggttccatgatctggatctaccctggactggacccgccactgagtcgtggaagaaccgtgagagcctcatcgagtttgaggagccccatgctactcgacaaacagtagttgctttgggtaaccaagagggcgctctgcatacggctttggcaggtgccatacccgtggaagtctcaagcacgactctcactttgaactctggacacctcaagtgcaggttgaagctggataagctcaagatcaaagggacaacttacgctatgtgcaaagggactttcgcgtttgcccaaaccccagtggatacaggccatggcaccatcgtggctgagctgacctacacagggacggacggaccgtgcaagatccccatctccatgactgcagatttgcgggacatgactccaatcggaagacttgtcacagtcaatccaataatcccaagctcggccaaatcccaaaagattctggttgaacttgagcccccctttgggagctcgttcatcctcgtgggccaagaaaacaaccagattaagtaccaatggcacaagactggcagcacaattggaaatgctctgaaaacgacttggaagggagctcaaaggtttgctgtcctcggagacacagcttgggactttggttctgtgggtggaattttcaattccattgggaaaaccattcatggagtgtttggcaccgccttcaggtcattgtttggaggtatgtcgtgggtaacgcaagctctcatgggagctcttctgctctggctcggcatcagtgctcgtgaaaggacggtgtctttgataatgctgagtgtgggtggcatcctccttttcttggctgtcaatgtgcatgctgacaccggttgtgctattgacatggcacgtcgtgagctgaaatgtggaagtggtatcttcatccacaacgatgttgagacatggaggaacaattacaaataccacccactcacgccacgcggctttgccaaggtcattcagatgtcaaaggataaaggtgtctgcggcataagatcagtgggcagacttgagcacgagatgtgggaggccatcgcacctgagttgaacgccatcttcgaggacaatggagtggacctcagcgttgtcgtgaaaggccagacagggatttacaaacgtgcacccaaacgcctcaccgagacgaaagatgaaatgagctttggatggaagaattggggaaagagctttatcttttcaaccgaaacagccaactccacattcattgtcgatggaccagaaagtaaagagtgcccaacatcagaccgggcttggaactccctagaattggaggatttcgggttcggaatcatctcaaccaagattttcctaaaggtcaacgagcaacggggaaactcatgcgactcagcggtgattggaacagccgtcaagggcaatgaagctgtccatagtgacttgggattctggatccagagcacaaagaatgaatcctggcaactggagagagcagtccttggggaggtcaagtcgtgcacatggccggaaagccacacattgtggggcgacggagttgaggagagtgacttgattattccaatcacgctggccggaccaaaaagccaccacaacatgcgcccagggtacaagactcaaaccaaagggccctggcatgaggagacacctctcgtcatcgagtttgctgaatgtccagggaccacagtgacccaggaagagagttgtggcggtagaggaccatcaattaggacaacaacagcaagtggaaggaccatacgcaattggtgttgcaagaactgcacccttcctccactccgatttatggccggggaaaactgctggtatggcgtggaagtcagacccaagcgcgagaatgaggaaaccctaatcaagtcaaaagtctcagcggggaatggccagaccattgagcccttccaactcgggatcctaatggcatttgtgttcacccaagaagtcctgaggaggaggtggacggcgaacctagcgttgcccacctcagccttgctaatggcttgtttcatctttggcggcttcacctacctggacctgttcaggtattttatccttgtgggtgcggcctttgcagaggcaaacagcggtggggacgtcgttcatctagccatgatagctgcttttaacatccagccagtggcactagtcactaccttcttcaggaaaaattggaccaaccgggagaacatgattctcatcatcgctgcagcatgcacacagatggcgtgcatggagttgaagattgagttgtttcatgtcatgaattcactttctttggcatggatgatactcaaggccctgacaactggcacgacttcgactcttgcaatgccgtttctggcagctctgtccccacccatgaactggcttgggctggacgtagtaaggtgtcttctgatcatggctggagttgcagcgctcattagtgagcgtagggagagcttggccaagaaaaaaggggccttgctcatctctgcagccttagctttgacgggagctttctcgccgctggttctgcagggagccctgatgttcactcaaagtttgggaaaacggggatggcctgccagtgaagtactaacagccgtgggcatgactttcgctcttgcggggagtgttgccagactggacggagggactatggccatcccattggccaccatggccatactggctgttgcctatgtcctctcaggaaaatccactgacatgtggttggaacgctgcgctgacatctcatggatcaatgaggctgagatcacagggaccagcccacgtcttgatgtcgaacttgattccaacggagacttcaagatgatcaatgaccctggagttccaatgtggatgtggacttgtagaatgggcctcatggcaatggcagcatacaaccccgtgcttattccagtgtccatggccggatactggatgacagtgaaaatccacaagcgtggaggggtcatgtgggacgttccagctcccaagcaatttggcaagacggagttaaaacccggagtctacagagtcatgaccatgggaattttgggacggtaccagtcaggtgtgggggtcatgtgggatggagtcttccacaccatgtggcatgtcacacagggagccgccttgcgaaatggtgaaggacgcctcaaccccacttgggggagtgtgcgtgatgacttaatatcctatgggggcaagtggaaactctcagccacatggaatggaagtgaggaggtccagatgatcgccgtggaaccaggaaaggctgcaaaaaactaccaaaccaagccaggagtgttcaaaacgccggcaggagaaattggtgccatcacactggattttcccaagggcacttcgggatcgcccatcattaacaaagccggggaaatcactggactgtatggcaatggaattgtgctggaaagaggggcatatgtcagcgccatcacacaaggagagcggcaggaagaggaaactccggaggcattcacgccggacatgctaaaaaaacgaaggctcacaatactggatctccatccaggagctgggaaaacaagaagggtcatccctcagattgtcagagagtgcgtgaaagcccgcctccgaacggtcatactggttcccaccagagtcgtcgccgctgaaatggcagaggcacttcgtggtctccccatcaggtatcaaacatcagccgtcaaggcagaacactctgggaatgagatagtggatgccatgcgccacgcaacactgacacagcgcctgctaacaccagcaaaagtgccgaactacaacgtgtttgtgatggatgaagcccacttcactgacccagcaagtatagcggcaagggggtacatttcaaccaaggtggaacttggggaggctgcggccatcttcatgactgcaacaccgccgggaacgactgacccctttccagactcaaatgctccaatcattgaccaagaggctgaaatccccgacagggcttggaatagtggcttcgagtggatcacagaatacacaggaaagaccgtctggtttgtacccagtgtgcgcatgggcaatgaaattgccatgtgcttgaccaaagcggggaaaaaggtgatccaactgaataggaagagctacgactctgagtaccagaagtgcaaaggcaatgactgggacttcgtcataacaactgacatttccgaaatgggggccaattttggcgctcatagggtcattgacagtaggaagtgcgtgaaaccagtcattctggacggagatgacagagtcctcatgaatgggccggccccaatcaccccagcaagcgcagcccaaaggagaggtaggattggaagggacccgacccaatcaggggacgagtacttctacggaggaccaaccaccactgatgacacgggacatgctcactggattgaagcaaagatcctcctggacaacatccaactacagaatggactagtggcccagttgtatggcccggagcgtgacaaggtcttcacaaccgatggtgagtaccggttacgcagcgagcagaaaaagaacttcgtggaattcctcaggacaggtgacctcccagtgtggctgtcatacaaggttgctgaagcggggtacgcctacacagacaggagatggtgttttgacggacccgcaaacaacacaattctagaggttagaggagacccagaagtctggacgcgacaaggggaaaaaaggattctgcgcccaagatggtcagatgcacgagtctactgtgataaccaagccctgagatccttcaaggagtttgcggcagggaagcgctcagcaggctcagtcatggaggtaatgggtagaatgcctgactatttttggacaaagactctcaatgcagcagacaacctgtatgttctggccacagccaacaaaggagggcgagcccatcaagcggcacttgaagagctgcctgacacagttgaaaccatcttgctcatgacaatgatgtgtgtggcatcactgggaatgttcactctgatggttcaccggaggggtctgggcaagactggactgggaaccctagtgctcgcgacggtcacggtcctcctatggatctcagatgtgccagccccaaagatagctggagttctcctaattgcattcctgctgatgatcgtcctcatcccagaacccgaaaagcaaaggagccagacagataaccatttggcaatctttctcgtgtgcgttcttctgttgattggggccgtttccgccaacgaaatggggtggcttgagacaaccaaaaaagacatcggaaagctgttccgctcaagtggagacacacaagagcagtcgacctggcaatcttgggcacccgaggtgagagcagccactgcatgggcaggttatgctgggctcacagtgttcttaacaccacttttccggcatctcatcaccacccagtatgtgagcttttccctgaccgcaattacagcccaggcctcggctttgtttggtctgagcgcaggttacccctttgttgggattgacttggcggtgggtttcctattactcgggtgctacggacagtacaacttgccaacagctgtggcgaccggcctgcttctcctagctcactatggatacatgatcccagggtggcaggctgaggccatgcgtgcagcacaaaagagaacagcagctggcgtgatgaagaatgcagttgttgatggaattgtggcaacggacattccagaagtggacactgcaacaccaatcacagagaaaaaactgggccagatcttgctcattctactgtgcggagcatctctcttagttaagtttgacaccatggttttagtggaagcaggggtcttgacaacatcagccatggccactctcattgagggaaacgccaacacagtctggaactcaacggtggcggttggtgtttgccacctcatgcggggagcttggctggctgggccttcgatcggatggaccatcgttagaaatcttgagaaccccaaattgaagcgcggaggaggatcggctccaacccttggagagatatggaaagcccaactgaaccaactgaccagggaggaattcatggcgtaccgaagagatgggatcctcgaagtggacaggacacaggcgcggagagcacgccaaagtggaatcacaaccggagggcatccggtatcccgaggaacggccaaactacgctggatggttgagcggggatttgtgaggcccattgggaaagtggttgatcttggctgtggcaggggaggctggagctactattgtgccaccctcagacatgtgcaggaagtgagaggatacacaaagggtggaccaggccacgaggaaccggtgatgatgcaaagttatggatggaacattgtcaccatgaaaagcggtgttgacgtgttctacaagcccactgagtcctgtgacacactcctctgtgacatcggagagtcttcttcctcagttggagttgaggaggccagaactctcagggtcttggacatggttgaaccatggcttagagctgccaatagtttctgcatcaaagtgttgtgcccatacaccccaaaggtcattgaacgcctggagcgccttcaaagggcttatggtggcggactggtcagagtcccgctttctaggaactccacgcatgagatgtactgggtcagtggggcatcaagcaacatcatcaatgccgtcaccgtcacaagccagatcctcgtgcagcgcatgaataaaggctgccgacatggccctcgctatgaggaggatgtttgcttgggaagcggcacacgtgccgtggccacccaggcatcaccctctgatcacaccaagatcaagcacaggctggagcggctgaggaaagagttttcagcaacctggcacatcgaccttgaacatccgtaccggacatggcactaccacggaagctacgaggttcagcccactggatcagccaactcaatggtcaatggcgtggtgcgcctgttgtctaagccatgggacgcaattaccagcgtggtaaccatggcaatgactgacacgaccccctttggccaacaaagggtgtttaaagagaaggtggatacacgggccccagacccagcggtgggagttgctcaggcactggacatcacaacaggctggctatggaccttcctggctagaagcaagaaacccaggatgtgcacgcgtgaggagtttatcgcgaaggtcaatagcaacgcggcattgggcgcggtgtttgatgagcagaaccagtggtcaacggctagagaagcagtggaagacccagccttctggaacctagttgatgaggagcgcaaagcccacctggcaggacgctgtgaaacatgcatctacaacatgatgggaaagcgagagaaaaaactaggagagttcgggaaggcaaagggaagcagagccatctggtacatgtggcttggagctagattcttggaatttgaagcactgggctttctaaatgaagaccattggatgagcagagagaactcactgggtggagtcgaagggcaaggactccagaaacttgggtacattctgagggacatctcacacctggagggtggaaacatgtttgctgatgacactgcaggctgggataccagaatcacgagggctgatcttgaaaacgaagccaaagtgatgaacatgatggatggagaacataaacaactcgccaaggctataatcgaattgacctacaggcataaagtagtcaaggtcatgcggcctgcgcggggagggaagacagtcatggacatcatctccagggaggaccagagagggagtggccaagtagtcacctatgcacttaacaccttcaccaacctggcggctcaactagtgagatgcatggagggggaggaactgttgacggagagtgacgtgcacggcttgagcccgaagaagaagcaagcagtccggaactggttgatccaaaatggaagagagaggctttcgcgcatggctgtcagtggagatgactgcgtggtgaaacccattgatgaccgattcgcgagcgcccttcatttcctcaatggcatggcaaagatcaggaaagatacccaggaatggaaaccatccgtgggctggagcaactggcaggaagtgccatttggctcccaccatttcaatgagctgctgatgaaagatggacgcaccatcgtagttccatgccgttcccaagatgaactagtgggaagagcacgggtgtcacctggtagcggatggagcctgcgagagacagcttgtctgagcaaagcctatgcccagatgtggttgctcatgtatttccaccgccgtgacctccgtctcatggccaacgccatctgttcagcagtgcctgtggattgggtcccgactggacgaaccacatggtccatccacggaaaaggagaatggatgaccacagaggacatgctccaagtgtggaacagggtctggattgaggacaatgagcacatggaggacaagacacccatcacgtcttggactgacatcccctacatcggaaagagggaggaccaatggtgtggtagtctgattggaacccgacagagagcaacatgggcggagaatatatatacaccaataatgcaaatccgcaacttgatcggggatgagaagtatgtggactgcatggtgtcccagcacaggttcgaaacaccttcgcccgtgctgttcaccggcgccatctaa

SEQ ID NO: 10797 - DNA, 183 bp, unidentified
  source 1..183: mol_type = other DNA
  misc_feature 1..183: note = Synthetic
atgtctgtagtccaaagttcattgatgtccacatttcgaaagacgaaaaattcaatgtatctcgagctcgtttgtctctgtagggtaatcgtttcggagatcttttctgaaattgcgctgtacatttttccaggtgacagagagctgtctgctgttaatcacgtcgacgcgaagactagttga

SEQ ID NO: 10798 - DNA, 1191 bp, unidentified
  misc_feature 1..1191: note = Synthetic
  source 1..1191: mol_type = other DNA
atgcctgtggattttcactatggggtcagggtggacgtgaccctcctgtctaaaatcaggagggtcaatgaacacattaagagtgccactaaaaccggagtagtgcaagtgcacggatcggcttgcacgccaaccctcagtgtgctgtccagcgtggggacagctggcgttctggggttaagaataaagaatgcccttacgcccctggtgggacacacggaaggcagtggagacgttagcttcagcttcaggaatacgtccgtcggtagcggcttcacgcacacgcgtgagctattcggtgcgaatgtactcgacgctggcatagccttttatcgaaagggggaggcatgcgatacgggggcccaaccgcagttcgtcaggaccaccatttcctacggggacaacctcacctccaccgtgcacaaaagcgtggtggaccaaaagggtatcctacctttccacgatcggatggaagccggtggtaggaccaccaggcttctcctctgtggcaaaacgggtgcattcctacttaagtggctaaggcagcaaaaaacaaaagaggaccaaacggtgactgtgtctgtcagcgagacgctgtcgatcgtgacattttctcttggtggcgtgagcaagatcattgatttcaagccagaaaccaaacccgtttctggctgggatggtctgaaggggaagaagtcggtggatgtgggcgtggtgcacaccgacgccctgagccgggttagcctggagtccttaatcgccgccctgagactgtgtaaagtcccgggttggtttacccccgggctgatttggcactccaacgaaatattagaagtggaaggtgtgcccactggctgccaatcaggtgacgtaaagttaagtgtcctacttttagaggtaaaccgatctgtgtctgccgagggaggcgagtcttcgcaaaaggttcccgattctataccggactccaggaggcagccggaattggagtctccggattctccccctctcacaccagttggtccctttgggccgctggaggacgcctctgaggacgctgcctctgtcaccagctgccccccagcggcgccaactaaggacagcacaaagaggcctcacaagaggcgctcagactcgagccagtccagggatcgtgggaaggtgcccaaaaccacatttaaccccctgatttga

SEQ ID NO: 10799 - DNA, 1191 bp, unidentified; identical to SEQ ID NO: 10798
  misc_feature 1..1191: note = Synthetic
  source 1..1191: mol_type = other DNA

SEQ ID NO: 10800 - DNA, 129 bp, unidentified; identical to SEQ ID NO: 1459
  misc_feature 1..129: note = Synthetic
  source 1..129: mol_type = other DNA

SEQ ID NO: 10801 - DNA, 150 bp, unidentified; identical to SEQ ID NO: 1460
  source 1..150: mol_type = other DNA
  misc_feature 1..150: note = Synthetic

SEQ ID NO: 10802 - DNA, 39 bp, unidentified; identical to SEQ ID NO: 1461
  source 1..39: mol_type = other DNA
  misc_feature 1..39: note = Synthetic

SEQ ID NO: 10803 - DNA, 6669 bp, unidentified
  misc_feature 1..6669: note = Synthetic
  source 1..6669: mol_type = other DNA
ctgcagctaaacatggaggaagacatagcctgtgtcaaagacttagtatcaaaatacctagtggacaacgagagattgtcaagacagaagttagcatttcttgtgcagacagagcctaggatgctattaatggaagggttgaaactcttgtccctctgtattgaggttgattcttgcaacgcaaatggttgcgagcataacagtgaggacaaatctgtggaaagaattctccatgaccatggaatcttgacaccttcactatgtttgtggtacccggacggttacaaactgacgggcaatgttctaatactgctggagtgttttgttagatcatctcctgctaactttgagcagaagtacattgaggacttcaaaaaattagagcagctgaaagaagacctgaagagtgtcgacatcaatttaataccacttatagacgggagaacatcattctacaatgaacaaatacctgactgggtcaatgataagttgagggatacgctcttctcacttttaaagtatgcacaggagagtaattcactttttgaagagtcagagtatagcagactctgtgaatctttattcatgacttcgggtagattatcaggggtggagagtttaaatgttctgatggacaatcgctctaatcattatgaggaagtgattgcctcatgccaccagggcatcaataataaattaacagctcatgaggtaaagctgcagatcgaagaggagtatcaagtgtttaggaacagattgaggaaaggagagatagaaggtcagtttttaaaggttgataagagccagttacttaatgagcttaacaatttgtacgctgataaggtagttgcagaagacaatatcgaacacttaatttaccagttcaagagagcatcaccaatattgagatttttgtatgcaaatgttgatgaggggaatgaaaaaaggggaaaccaaactattggagaatgtcaggttcaatgctggagatcattcctaaataaagtaaaatctttgaggatattgaacacaaggaggaaacttctattaatttttgatgcactaattctccttgcaagtaagcatgacctgatgaaacaaaagtgtttaaaagggtggttggggtcttgcttcttaagagttaaagatagactagtttctttggaggcaacaaagagggatctcgagaaatggggagagcgaggcaacaggctaagatctagaatcacacagtcctcccagtgtttgagtaagaatcaaatcctcaattcaatattccagaaaaccattttgaaggccaccactgctttaaaggatgttgggatcagtgtggaccactataaaattgatatggaggtgatctgccttaacagctatgatttgattatggactttgatgtctccggagttgtcccaacaatcagttatcagagaacagaggaagaaacattcccttatgtgatgggggatgtggaactactgggaaccactgacttagagagactttcctcattgagcctcgctttggtgaactctatgaaaacttcttctaccgtaaagctgagacagaatgaatttggacccgcaaggtatcaagtggtcagatgcaaagaagcatattgtcaagagttttcattgggtaacactgaattacaactgatttatcaaaagacaggggagtgctcgaagtgctatgctattaatgataacaaagttggtgaggtgtgctcattttatgctgatcctaaaagatattttccagcaatattttcagctgaggttttacaaacaacaataagcactatgatttcttggatagaagattgcaatgagctggaagggcagttgaacaatatcaggtctctgacaaagatgatcctggttttaattttagctcaccccagtaaacgttctcaaaagctcctccaaaatcttaggtactttgtaatggcttatctatcagattatcatcataaggacctcattgacaaaataagggaagaattaatcactgatgttgagttcctgctctataggttaataaggacattaatgaatctggttttatctgaggatgtgaagagcatgatgactaataggttcaagttcattttgaatgtttcctacatgtgccacttcattacgaaagaaacaccagatagattgacagatcagataaaatgttttgagaagtttctggaaccaaaggtgagatttggtcatgtgagcactaatcctgcagacacagccactgaggaagaattggatgacatggtctacaatgcaaaaaagtttttaagtaaagatggatgcacaactatcgagggaccagattataaaaggcctggtgtttcaaagaagtatttatctcttcttacatcctcttttaacaatggttcactatttaaggagagggaagtaaaaagggaaatcaaagatcctctcatcaccagtggcagtgcagccttggatttagccagcaagaaaagtgttgttgttaataaatacacagatggttctagaatattaaactatgacttcaataagctcacagcactggccgtgtcgcagctcactgaagtcttctcaaggaaaggaaagtaccttctcaacaagcaggactatgagtacaaagttcagcaggcaatgagcaatttggttctaggatctgggcagctcaaaagtgatgctgatggggctgacctagacgaaattttgctcgatggaggtgcaagcgattattttgatcagctaaaggagactgttgaaaaaattgttgatcagtatagggaacctgtcaagctaggctcaggccctaatggtgatggccaaccatcaataaatgatctagatgagattgtctcaaataagttttacattaggttgatcaagggtgaattatccaatcacatggttgaggagtttgatcatgatatcttaccaggtaaattttatgaagaattctgtaatgctgtctatgagaatagtagattgaagcagaagtatttttactgtggacatatgtcacagtgtcctattggagagttgacaaaggcagtgtcaacaaggacatactttaaccatgaatactttcagtgttttaagtccatactcttgatcatgaatgcgaatacacttatggggaggtacactcattataagtcaaggaaccttaatttcaagtttgatatgggtaaactctctgatgatgtaagaattagtgaaagggagagcaattcagaggcacttagtaaggctctgtcactgacaaactgtaccacagcaatgttaaagaatttgtgtttttatagccaagagtcgccacaatcttatgactcagtgggacctgatacaggaaggcttaagttttctttgtcatataaagaacaagtgggtggtaacagagaattatatattggtgatcttagaacaaagatgtttactagacttatagaagattactttgaagctataagcctacagttatcagggagttgcctgaacaacgagaaggaatttgaaaatgctatcctttccatgaaattgaatgtttcattggcacatgtgtcttatagcatggatcatagtaagtggggcccaatgatgtgtccatttttgttcttgactgtcttacagaatttaattttcctctcaaaggacttgcaagctgacataaaagggagggactatctctcaaccctacttatgtggcatatgcacaaaatggtggaaataccttttaatgtggtgacagccatgatgaagtctttcattaaagcccaactagggttaaggaagaaaactaaacagtcaataacagaagatttcttttactctaatttccaagctggtgtagtgccttctcacatcagttcaatacttgacatgggtcaaggaatattacacaacacatcagatttttatgccctcatttcagagaggttcattaattatgctatcagttgtatatgcggtggtacgatagatgcttatacctctagtgatgatcagatttctctctttgatcaatctctcacagagcttttgcaaagagacccagaagaatttaggactctaatagagttccactattatatgagtgatcaactcaataagtttgtgagccctaaaagtgtcattggcaggtttgttgcagagtttaaatctagattttttgtttggggagatgaagtgccattattgacaaagttcgttgcagcagctcttcacaatataaagtgtaaagagccacaccaactggcagaaacaattgacacaatcattgatcagtcggttgcgaatggtgtccctgttcacttatgtaatctaatacagaaaagaaccttaaatcctttgcaatatgcaagataccctattgacccattcttattgaattgcgagacagatgttagagactgggtagatggcaaccgtagttataggattatgaggcaaatagagggattgattcctaatgcttgcagcaagattagatctatgttaagaaaactgtacaataggttgaagactgggcaactccatgaagagttcacaacaaactatttgtctagtgagcacctctcatcactaagaaatctttgtgagctgttggatgttgagcccccatctgagtctgaccttgagtattcttggctaaacttggctgcgcatcatcctttaagaatggtgttgagacaaaagataatatattcaggtgctgtgaacctagatgatgagaagattcctaccattgtcaaaacaatccaaaataagttgtcttccactttcactcgaggtgcgcaaaaattgctgtctgaagctatcaacaaatctgcattccaaagttccattgcatctggctttgtaggattgtgcagaacattgggtagcaaatgtgttcggggaccaaataaagagaatctgtatattaagtccattcagtctctgatttctgatgtcaagggaatcaaattgttgacaaattctaatggcattcaatattggcaagttccgctagaacttagaaatggaagtggaggtgaaagtgtggtcagttatttcagacccttgttatgggattatatgtgcatctccttatcaactgcaatagaactgggtgcatgggtcttaggggaacctaagacagttaaggtgtttgattttttcaaacataacccttgtgactattttcccttaaagccaactgcatcaaaactattggaggatagggttggtttgaatcacatcattcattctttaagaaggctgtacccatcagtgtttgagaaacacatattaccattcatgagcgatctagcgtcaaccaaaatgaagtggtcacccagaataaaatttctagatctctgtgtagcgttggatgttaactgtgaagccttgtctcttgtctcacacatagtaaaatggaaaagagaggaacattacattgtgttatcatctgaattgaggttgtctcacagtaggacacatgaacccatggtggaagaaagagtagtgagcactagtgatgctgttgacaatttcatgaggcaaatttattttgagtcttacgtgagaccatttgttgcgactacaagaacattggggtccttcacgtggtttccacacaagacatcagttccagagggtgaagggttgcatagaatgggtccattttcttcatttgtagagaaagttattcacaaaggtgttgaaaggccaatgtttaagcatgatctgatgatgggttatgcttggatagactttgatattgagccagctagattcaatcaaaatcaattgatcgcatcaggtttagttgatcctaagtttgactcattggaggatttctttgatgccgtagcttcactacctccagggtctgcaaaactgagtcagacagtgaggttccgtgttaaaagtcaagatgctagttttaaggaaagctttgccatccaccttgagtatactggctcaatgaatcaacaggccaagtatctagtacatgatgtaaccgttatgtactcaggtgcagtgagtccgtgtgtcttgtcagactgttggagactggttttgtcaggacctactttcaagggcaaatcagcatggtatgttgacaccgagatcattaatgagtttttaattgacacaaatcaactagggcatgtgacccctgttgagattgttgttgatatggaaaggttgcagtttacggagtatgactttgtattggtgggtccttgcactgaaccaacccccctggttgtgcataggggaggcttgtgggaatgtggaaagaaattggcatcctttacacctgttatacaagaccaggatcttgagatatttgtgagagaggttggggacacttcgtctgacctgctgattggggcattgagtgatatgatgatagacaggctggggttaaggatgcagtggtcaggggtggacattgtctccacacttagggctgcagcgccgagttgtgaggggatcttgagtgcggttcttgaggcagtggacaactgggtggagttcaagggttatgctctctgttatagtaagtcaaggggaaaggtgatggtacaatcaagtggtggtaaattgagattgaagggcagaacatgtgaggagctgactaggaaggatgaatgcatcgaagacattgagtag

SEQ ID NO: 10804 - DNA, 1494 bp, unidentified
  misc_feature 1..1494: note = Synthetic
  source 1..1494: mol_type = other DNA
atgaggcgcgcggtggaactgcagacagtggcttttcctgagacaccacctccctcttacgaaaccgtgatggcagcggcgccaccctacgtgcctccccgctatttgggtcctacggagggaagaaacagtatccgttactcggaattgtcaccgttgtacgataccactcgagtgtacttggtggacaacaagtcttctgacattgcttcattgaattaccagaatgatcacagcaactttttaaccactgtagtgcaaaataatgactattcccctatagaggctggcacgcaaactattaactttgatgaaaggtctagatggggtggagatttaaaaaccatcttacataccaacatgccaaacgtgaacgattttatgtttaccaccaaatttaaggccagggtaatggtggctaggaaaacaaacaacgaaggccaaaccattttagaatatgagtgggcagaatttgtgctacccgagggtaactattcggaaaccatgactattgacttaatgaacaatgctattattgagcattatttgcgagtaggaagacagcatggagtgctggaaagtgacattggagttaagtttgacaccagaaactttcgtctgggttgggaccccgaaacccaattagtaactccgggagtgtacactaatgaggcttttcatccagatatagtactgcttccaggttgcggggttgattttacagagagcagattaagcaacatactaggtataagaaagaggcagccgtttcaggaaggatttgtgattatgtatgaacacttagagggaggcaatattccagctcttttggatgtaaaaaaatacgaaaacagtctgcaggatcaaaacactgtaagaggagacaactttattgccttaaataaggctgctaggattgaaccggttgaaacagaccccaaaggacgcagttacaacttgcttccagacaaaaaaaatactaaatatcgcagctggtatttggcatacaactacggagacccagaaaaaggagttcggtcatggactctactaacaactccagatgtaacaggcggctccgaacaggtgtactggtccctacccgatatgatgcaagatccggtgacttttcgctcctcgcgtcaagttagcaactatcctgtagttgcagcagaattactgccagttcatgctaaaagcttctacaacgagcaagccgtctactcacagcttattcgccagtcaaccgcgcttacgcgcgtgtttaatcgctttcccgagaaccagatactggtgcgtccaccagccgctaccatcactaccgtcagtgaaaacgttcccgcccttacagatcacgggaccctgccgctgcgtagcagtatcagtggagttcagcgagtcaccatcactgacgcccgccgccggacctgtccctacgtttacaaagcactgggcatagtttctccacgagtgctttctagtcgcactttttaa

SEQ ID NO: 10805 - DNA, 1896 bp, unidentified
  source 1..1896: mol_type = other DNA
  misc_feature 1..1896: note = Synthetic
atgagtaaatcacacgcggcctatatcgattatgccttacgcagaactactaatatgcccgttgaaatgatggggtcagacgtagtacgcctcaaggattatcaacattttgtagcaagagttttcttaggattagacagtatgcattctcttttattgttccatgaaacgggtgtcggtaaaacaatgactactgtatatattctcaaacatcttaaggatatttatacgaattgggcaattatcttattggtgaaaaaggctttgatagaagatccttggatgaacactatactcagatacgctccagagataacgaaggattgtatttttattaattacgatgatcaaaattttagaaataaattttttactaatatcaaaactattaattccaagagtagaatatgcgtcatcattgatgaatgtcataacttcatttctaaatcattaatcaaagaagatggcaagatccgtcctactcgttcagtatataattttttatctaagaccatcgcgttaaaaaaccataagatgatttgtttatcggctacacctatcgtcaatagtgtgcaagaattcactatgttggttaacttactgcgaccaggatccttacaacaccaatcgctatttgagaataaacgtctagttgatgagaaagaattagtctccaaactaggaggcctatgttcgtacatagttaataacgagttttctatttttgatgacgtagaagggtctgcatcattcgctaagaaaacagtattaatgcgatacgttaatatgtcaaaaaagcaagaagagatttatcaaaaggctaaactcgcagaaataaaaactggtatatcatcatttagaattctgagacgcatggctactacgtttacgttcgatagctttcctgaaagacaaaatcgtgatcccggcgaatacgcgcaagagatagcaacactatataatgattttaaaaattcattaagagatagagaattttctaaatccgcattagatacctttaaaaggggagaactattgggaggggatgctagtgcggctgatatctctctatttactgaattaaaggagaaaagcgtcaaatttatagatgtatgtttgggaatattagcatcccatggtaaatgtctagtctttgaaccatttgttaatcagtcaggaatagaaatcttattactatatttcaaagtctttggtatctctaatatagagttctcatctagaactaaagatactagaatcaaggcggtggctgagtttaaccaagaatcaaacactaacggagaatgcattaaaacatgcgtattctcttctagtggaggcgagggtattagtttcttctcaatcaatgatatcttcattttagatatgacatggaacgaggcgtctcttcgtcagatagtaggaagagccattcgtctcaatagtcacgttcttactcctccagaacgtagatatgtaaacgtgcactttataatggctagattatctaatggtatgcctactgtagacgaagacctatttgaaatcattcaaagcaaatcaaaagaatttgtccaattgtttagagtgtttaaacatacatcattagaatggattcatgctaatgaaaaagacttctcaccgatcgacaatgagtccggttggaaaaccttggtttcaagagccatcgatctatcgtctaaaaaaaatattaccaataaactaattgagggtactaatatttggtattccaattctaatagattaatgtcaataaatagaggatttaaaggcgtagatggtagagtatacgatgtagacggtaactatctacatgatatgccagacaatcccgttataaaaatacacgatggtaaattaatttatattttctaa

SEQ ID NO: 10806 - DNA, 39 bp, unidentified; identical to SEQ ID NO: 1470
  misc_feature 1..39: note = Synthetic
  source 1..39: mol_type = other DNA

SEQ ID NO: 10807 - DNA, 18 bp, unidentified
  misc_feature 1..18: note = Synthetic
  source 1..18: mol_type = other DNA
atgatttttaaaacatag

SEQ ID NO: 10808 - DNA, 1896 bp, unidentified
  misc_feature 1..1896: note = Synthetic
  source 1..1896: mol_type = other DNA
atgagtaaatcacatgcggcctatatcgattatgccttgcgcagaactactaatatgcctgttgaaatgatgggaacagacgtagtacgcctcaaggattatcaacattttgtagcaagagttttcttaggattagacagtatgcattctcttttattgttccatgaaacaggtgtcggtaaaacaatgactactgtatatattctcaaacatcttaaggatatttatacgaattgggctattatcttattagtgaaaaaagctttgatagaagatccttggatgaacactatactcagatacgctccagagataacgaaggattgtatttttattaattacgatgatcaaaattttagaaataaattttttactaatatcaaaactattaattccaagagtagaatatgcgtcatcattgatgaatgtcataacttcatttctaaatcattaatcaaagaagatggtaagatccgtcctactcgttcagtatataattttttatctaagaccattgcgttaaaaaaccataagatgatttgtttatcggctacacctatcgtcaatagtgtgcaagaattcaccatgttggttaacttactacgaccaggatccttacaacaccaatcgctatttgagaataaacgtctagttaatgaaaaagaattagtctccaaactaggaggcctatgttcgtacatagttaataacgagttttctatttttgatgacgtagaagggtctgcatcattcgctaagaaaacagtattaatgcgatacgttaatatgtcaaaaaagcaagaagagatttatcaaaaggctaaacttactgaaataaaaacaggtatatcatcatttagaattctgcgacgtatggctactacgtttacgttcgatagctttcctgaaagacaaaatcgtgatccgggtgaatacgcgcaagagatagcaaccctatataatgactttaaacgctcattaagagatagagagttttctaaatccgcattagatacctttaaaaagggagaactattgggaggggacgctagtgcggctgatatctctctatttactgaattaaaagagaaaagcgccaaattcatagatgtatgtttgggaatattagcatcacatggtaaatgtctagtctttgaaccatttgttaatcagtcaggaatagaaattttattactatatttcaaagtctttggtatctctaatatagagttctcatctagaacaaaagatactagaatcaaggcggtggctgagtttaaccaagaatcaaacactaacggagaatgcattaaaacatgtgtattctcttctagtggaggcgagggtattagttttttctcaattaatgatatcttcattctagatatgacttggaacgaggcatctcttcgtcaaatagtaggaagagccattcgtcttaatagtcacgttcttactcctccagaacgtagatatgtaaacgtgcactttataatggctagattatctaatggtatgcctactgtagacgaagacctatttgaaattattcaaagcaaatcaaaagaatttgtccaattgtttagagtgtttaaacatacatcattagaatggattcatgctaatgaaaaagacttttcaccgatcgataacgagtccggttggaaaaccttggtttcaagagccatcgatctatcgtctaaaaaaaatattaccaataaactaattgagggtactaatatttggtattccaattctaatagattaatgtcaataaatagaggatttaaaggcgtagatggtcgagtatacgatgtagatggtaactatctacatgatatgccggacaatcccgttataaaaatacacgatggtaaattaatttatattttctaa

SEQ ID NO: 10809 - DNA, 60 bp, unidentified
  source 1..60: mol_type = other DNA
  misc_feature 1..60: note = Synthetic
ttgttaagtatgaatacggggtacaaacataaactgaagtttaacattatttatttatga

SEQ ID NO: 10810 - DNA, 60 bp, unidentified; identical to SEQ ID NO: 1477
  source 1..60: mol_type = other DNA
  misc_feature 1..60: note = Synthetic

SEQ ID NO: 10811 - DNA, 36 bp, unidentified; identical to SEQ ID NO: 1478
  source 1..36: mol_type = other DNA
  misc_feature 1..36: note = Synthetic

SEQ ID NO: 10812 - DNA, 105 bp, unidentified; identical to SEQ ID NO: 1479
  source 1..105: mol_type = other DNA
  misc_feature 1..105: note = Synthetic

SEQ ID NO: 10813 - DNA, 222 bp, unidentified
  misc_feature 1..222: note = Synthetic
  source 1..222: mol_type = other DNA
atgtccatgggcgcactcacagacctgggccaaaaccttctctacgccaactccgcccacgcgctagacatgacttttgaggtggatcccatggacgagcccacccttctttatgttttgtttgaagtctttgacgtggtccgtgtgcaccagccgcaccgcggcgtcatcgagaccgtgtacctgcgcacgcccttctcggccggcaacgccacaacataa

SEQ ID NO: 10814 - DNA, 327 bp, unidentified
  source 1..327: mol_type = other DNA
  misc_feature 1..327: note = Synthetic
ttgtacatgatggactcctcacctgaaaagacgaatcttgaacttttgtatgagcaagtctgtgagcagggaagggagtttgaggtcgtgttttatccaatgctgccacgattatatgaaatgatgcttccttctttggaggcgcgactgaattttcttagtgttggatatagacacgttgctttttctagatacgttcacggggatgtcgattgcgtgcatcgagaggtcatggctcagaaaatggtacttctcacttcgatattgtcaaagctgttaaatgtaaatggaatattagaacatcaagaatatttaaatacggaatag

SEQ ID NO: 10815 - DNA, 24 bp, unidentified
  misc_feature 1..24: note = Synthetic
  source 1..24: mol_type = other DNA
atgccacgaataaaaaatacttaa

SEQ ID NO: 10816 - DNA, 648 bp, unidentified
  misc_feature 1..648: note = Synthetic
  source 1..648: mol_type = other DNA
atgtttctgaagtcgcgtggggtccggtcttgcagggaccggcgcctcttgtcggacgaggaggaagagacttcacagagcagcagctacactctggggtctcaggcctcccagtctatccaggaggaggacgtgagtgacactgatgagtctgactactcagatgaagacgaggagattgatttggaggaagagtaccccagtgatgaagacccatccgagggcagtgatagcgacccctcgtggcatccttcagattcagacgagtctgactacagcgagagcgacgaggatgaagcaacccccggctctcaggcctcacgatcttcaagagtctcgccatctacccaacagtcttcaggtctgacacccacgccttcgttctcccgaccacgcacccgggcacctccgaggccgccggctcccgcgccggtcaggggacgggcctcagcacctcccaggccaccagccccagttccgcaatccaccaaagacaaggttcccaatagacctacgcgacctgtacttagaggcccagctccacgccgcccccctccaccttcaagtcccaatacatacaataaacacatgatggaaaccaccccccccattaagggcaataacaactacaattggccatggctgtaa

SEQ ID NO: 10817 - DNA, 648 bp, unidentified
  source 1..648: mol_type = other DNA
  misc_feature 1..648: note = Synthetic
atgtttctgaagtcgcgtggggtccggtcttgcagggaccggcgcctcttgtcggacgaggaggaagagacttcacagagcagcagctacactctggggtctcaggcctcccagtctatccaggaggaggacgtgagtgacactgatgagtctgactactcagatgaagacgaggagattgatttggaggaagagtaccccagtgacgaagacccatctgagggcagtgatagcgacccctcgtggcatccttcagattcagacgagtctgactacagcgagagcgacgaggatgaagcaacccccggctctcaggcctcacgatcttcaagagtctcgccatctacccaacagtcttcaggtctgacacccacgccttcgttctcccgaccacgcacccgggcacctccgaggccgccggctcccgcgccggtcaggggacgggcctcagcacctcccaggccaccagccccagttcagcaatccaccaaagacaagggtccccatagacctacgcgacctgtacttagaggcccagctccacgccgcccccctccaccttcaagtcccaatacatacaataaacacatgatggaaaccaccccccccattaagggcaataacaactacaattggccatggctgtaa

SEQ ID NO: 10818 - DNA, 648 bp, unidentified; identical to SEQ ID NO: 10817
  source 1..648: mol_type = other DNA
  misc_feature 1..648: note = Synthetic

SEQ ID NO: 10819 - DNA, 75 bp, unidentified
  misc_feature 1..75: note = Synthetic
  source 1..75: mol_type = other DNA
ataataataagaccaataccgaaacagatagaaatgagacgtcttagagatagaatttcaaatcttgaaagatag

SEQ ID NO: 10820 - DNA, 10305 bp, unidentified
  source 1..10305: mol_type = other DNA
  misc_feature 1..10305: note = Synthetic
ataaccatgactaaaaaaccaggagggcccggtaaaaaccgggctatcaatatgctgaaacgcggcctaccccgcgtattcccactagtgggagtgaagagggtagtaatgagcttgttggacggcagagggccagtacgtttcgtgctggctcttatcacgttcttcaagtttacagcattagccccgaccaaggcgcttttaggccgatggaaagcagtggaaaagagtgtggcaatgaaacatcttactagtttcaaacgagaacttggaacactcattgacgccgtgaacaagcggggcagaaaacaaaacaaaagaggaggaaatgaaggctcaatcatgtggctcgcaagcttggcagttgtcatagcttacgcaggagcaatgaagttgtcgaatttccaggggaagcttttgatgaccatcaacaacacggacattgcagacgttatcgtgattcccacctcaaaaggagagaacagatgctgggtccgggcaatagacgtcggctacatgtgtgaggacactatcacgtacgaatgtcctaagctcaccatgggcaatgatccagaggatgtggattgctggtgtgacaaccaagaagtctacgtccaatatggacggtgcacgcggaccaggcattccaagcgaagcaggagatccgtgtcggtccaaacacatggggagagttcactagtgaataaaaaagaggcttggctggattcaacgaaagccacacggtatctcatgaaaactgagaactggatcataaggaatcctggctatgctttcctggcggcgacacttggctggatgcttggcagtaacaacggtcaacgcgtggtatttaccatcctcctgctgttggtcgctccggcttacagttttaattgtctgggaatgggcaatcgtgacttcatagaaggagccagtggagccacttgggtggacttggtgctagaaggagatagctgcttgacaatcatggcaaacgacaaaccaacattggacgtccgcatgattaacatcgaagctagccaacttgctgaggtcagaagttactgctatcatgcttcagtcactgacatctcgacggtggctcggtgccccacgactggagaagctcacaacgagaagcgagctgatagtagctatgtgtgcaaacaaggcttcactgatcgtgggtggggcaacggatgtggacttttcgggaagggaagcattgacacatgtgcaaaattctcctgcaccagcaaagcgattggaagaacaatccagccagaaaacatcaaatacgaagttggcatttttgtgcatggaaccaccacttcggaaaaccatgggaattattcagcgcaagttggggcgtcccaggcggcaaagtttacaataacacccaatgctccttcgataaccctcaaacttggtgactacggagaagtcacgctggactgtgagccaaggagtggactgaacactgaagcgttttacgtcatgaccgtggggtcaaagtcatttctggtccatagggaatggtttcatgacctcgctctcccctggacgtccccttcgagcacagcgtggagaaacagagaactcctcatggaatttgaagaggcgcacgccacaaaacagtccgttgttgctcttgggtcacaggaaggaggcctccatcaggcgttggcaggagccatcgtggtggagtactcaagctcagtgaagttaacatcaggccacctgaaatgtaggctgaaaatggacaaactggctctgaaaggcacaacctatggcatgtgtacagaaaaattctcgttcgcgaaaaatccggcggacactggccacggaacagttgtcattgaactatcctactctgggagtgatggcccctgcaaaattccgattgtctccgttgcgagcctcaatgacatgacccccgttgggcggctggtgacagtgaaccctttcgtcgcgacttccagtgccaactcaaaggtgctggtcgagatggaaccccccttcggagactcctacatcgtggttgggaggggagacaagcagatcaaccaccattggcacaaagctggaagcacgctaggcaaggccttttcaacaactttgaagggagctcaaagactggcagcgttgggcgacacagcctgggactttggctccattggaggggtcttcaactccataggaaaagccgttcaccaagtgtttggtggtgccttcagaacactctttgggggaatgtcttggatcacacaagggctaatgggtgccctactactctggatgggcgtcaacgcacgagaccgatcaattgctttggccttcttagccacaggaggtgtgctcgtgttcttagcgaccaatgtgcatgctgacactggatgtgccattgacatcacaagaaaagagatgagatgtggaagtggcatctttgtgcacaacgacgtggaagcctgggtggacaggtataaatacttgccagaaacgcccagatccctagcgaagatcgtccacaaagcgcacaaggaaggcgtgtgcggagtcagatctgtcactagattggagcaccaaatgtgggaagccgtacgggacgaattgaacgtcctgctcaaagagaatgcagtggacctcagtgtggttgtgaacaagcccgtgggaagatatcgctcagcccctaaacgcctatccatgacgcaagagaagtttgaaatgggctggaaagcatggggaaaaagcattctctttgccccggaattggctaactccacatttgtcgtagatggacctgagacaaaggaatgccctgatgagcatagagcttggaacagcatgcaaatcgaagacttcggctttggcatcacatcaacccgtgtgtggctgaaaattagagaggagagcactgacgagtgtgatggagcgatcataggcacggctgtcaaaggacatgtggcagtccatagtgacttgtcgtactggattgagagtcgctacaacgacacatggaaacttgagagggcagtctttggagaggtcaaatcttgcacttggccagagacacacaccctttggggagatggtgttgaggaaagtgaactcatcattccgcataccatagccggaccaaaaagcaagcacaatcggagggaagggtataagacacaaaaccagggaccttgggatgagaatggcatagtcttggactttgactattgcccagggacgaaagtcaccattacagaggactgtggcaagagaggcccttcggtcagaaccactactgacagtggaaagttgattactgactggtgctgtcgcagttgctcccttccgcccctacgattccggacagaaaatggctgctggtacggaatggaaatcagacctgtcaggcatgatgaaacaacactcgttagatcacaggttgatgctttcaatggtgaaatggttgacccttttcagctgggccttctggtgatgtttctggccacccaggaggtccttcgcaagaggtggacggccagattgaccattcctgcggttttgggggccctacttgtgctgatgcttgggggcatcacttacactgatttggcgaggtatgtggtgctagtcgctgccgctttcgcagaggccaacagtggaggagacgtcctgcatcttgctttgattgccgtttttaagatccaaccagcgtttctagtgatgaacatgcttagcacgagatggacgaaccaagaaaacgtggtcctggtcctaggggctgccttgtttcaactggcctcagtagatctgcaaataggagtccacggaatcctgaatgccgccgctatagcatggatgattgtccgagcgatcaccttccccacaacctcctccgtcaccatgccagtcttagcgcttctaaccccgggaatgagggctctatacctagacacttacagaatcatcctcctcgtcatagggatttgctccctgctgcaagagaggaaaaagaccatggcaaaaaagaaaggagctgtactcttgggcttagcgctcacatccactggatggttctcgcccaccactatagctgccggactaatggtctgcaacccaaacaagaagagagggtggccagccactgagtttttgtcggcagttggattgatgtttgccatcgtaggtggcttggccgagttggatattgaatccatgtcaatacccttcatgctggcaggtctcatggcagtgtcctacgtggtgtcaggaaaagcaacagatatgtggcttgaacgggccgccgacatcagctgggagatggatgctgcaatcacaggaagtagtcggaggctggatgtgaaactggatgatgacggagattttcacttgattgatgatcccggtgttccatggaaggtctgggtcctgcgcatgtcttgtattggcttagccgccctcacgccttgggccatcgttcccgccgctttcggttattggctcactttaaaaacaacaaaaagagggggcgtgttttgggacacgccatccccaaaaccttgctcaaaaggagacactactacaggagtctaccgaattatggctagagggattcttggcacttaccaggccggcgtcggagtcatgtacgagaatgttttccacacactatggcacacaactagaggagcagccattatgagtggagaaggaaaattgacgccatactggggtagtgtgaaagaagaccgcatagcttacggaggcccatggaggtttgaccgaaaatggaatggaacagatgacgtgcaagtgatcgtggtagaaccggggaaggctgcagtaaacatccagacaaaaccaggagtgtttcggactcccttcggggaggttggggctgttagtctggattacccgcgaggaacatccggctcacccattctggattctaatggagacatcataggcctatacggcaatggagttgagcttggcgatggctcatacgtcagcgccatcgtgcagggtgaccgtcaggaggaaccagtcccagaagcttacaccccaaacatgttgagaaagagacagatgactgtgctagatttgcaccctggctcagggaagaccaggaaaattctgccacagataatcaaggacgccatccagcagcgcctaagaacagctgtgctggcaccgacgcgggtggtagcagcagaaatggcagaagctttgagagggctcccagtgcgatatcaaacttcagcagtgcagagagagcaccaagggaatgaaatagtggatgtgatgtgccacgccactctgacccatagactgatgtcaccgaacagagtgcccaactacaacctatttgtcatggatgaagctcatttcactgacccagccagcatagccgcacgaggatacattgctaccaaggtggaattaggggaggcagcagccatcttcatgacagcgaccccgcctggaaccacggatccttttcctgactcaaatgccccaatccatgatttgcaagatgagataccagacagggcatggagcagtggatacgaatggatcacagaatatgcgggcaaaaccgtgtggtttgtggcgagcgtaaaaatggggaatgagattgcaatgtgcctccaaagagcggggaaaaaggtcatccaactcaaccgcaagtcctatgatacagaatacccaaaatgtaagaatggagactgggactttgtcattaccaccgacatctctgaaatgggggccaacttcggtgcgagcagggtcatcgactgtagaaagagcgtgaaacccaccatcttagaagagggagaaggcagagtcatcctcggaaacccatctcccataaccagtgcaagcgcagctcaacggaggggcagagtaggcagaaaccccaaccaagttggagatgaatatcactatgggggggctaccagtgaagatgacagtaacctagcccattggacagaggcaaagatcatgttagacaacatacacatgcccaatggactggtggcccagctctatggaccagagagggaaaaggcttttacaatggatggtgaataccgtctcagaggtgaagaaaagaaaaacttcttggagctgcttaggacggctgacctcccggtgtggctggcctacaaggtggcgtccaatggcattcagtacaccgacagaaggtggtgttttgatgggccgcgcacgaatgccatactggaggacaacaccgaggtagagatagtcacccggatgggtgagaggaaaatcctcaagccgagatggcttgatgcaagagtttatgcagatcaccaagccctcaagtggttcaaagactttgcagcagggaagagatcagccattagcttcatagaggtgctcggtcgcatgcctgagcatttcatgggaaagacgcgggaagctttagacaccatgtacttggttgcaacggctgagaaaggcgggaaagcacaccgaatggctctcgaagagctgccagatgcactggaaaccatcacacttattgttgccattactgtgatgacaggaggattcttcctactaatgatgcagcgaaagggtatagggaagatgggtcttggagctctggtgctcacgctagctaccttcttcctgtgggcggcagaggttcctggaactaaaatagcagggaccctgctgatcgccctgctgctgatggtggtgctcatcccagaaccggaaaaacagaggtcacagacagataaccaactggcggtgtttctcatctgcgtcttgaccgtggttggagtggtggcagcaaacgagtacgggatgctagagaaaaccaaagcagatctcaagagcatgtttgtcggaaagacgcaggcatcagggctgactggattgccaagcatggcactggacctgcgtccagccacagcctgggcactgtatggggggagcacagtcgtgctaacccctcttctgaaacacctgatcacgtcggaatacgtcaccacatcgctagcctcaattaactcacaagctggctcattattcgtcttgccacgaggcgtgccttttaccgacctagacttgaccgttggcctcgtcttccttggctgttggggtcaaatcacccttacaacgtttctgacagccatggttctggcgacacttcattatgggtacatgctccctggatggcaagcagaagcactcagggctgcccagagaaggacagcggctggaataatgaagaatgccgttgttgacggaatggtcgccactgatgtgcctgaactggaaaggaccacccctctgatgcaaaagaaagtcggacaggtgctcctcataggggtaagcgtagcagcgttcctcgtcaaccctaatgtcaccactgtgagagaagcaggggtattggtgacggcggctacgctcactttgtgggacaatggagccagtgccgtctggaattccaccacagccacgggactctgccatgttatgcgaggtagctacctggctggaggttccattgcttggactctcatcaagaacgcggataagccctccttgaaaaggggaaggcccgggggcaggacgctaggggagcaatggaaggaaaaactaaacgctatgagcagagaagagttttttaaataccgaagagaggccataatcgaggtggaccgcactgaagcacgcagggctagacgtgaaaacaacatagtgggaggacatccggtttcgcgaggctcagcaaaactccgttggctcgtggagaaaggatttgtctcgccaataggaaaagtcattgatctagggtgtgggcgtggaggatggagctactacgcagcaaccctgaagaaggtccaggaagtcagaggatacacgaaaggtggggcgggacatgaagaaccgatgctcatgcagagctatggccggaatctggtctccttgaaaagtggagtggacgtgttttacaaaccttcagaacccagtgacaccctgttctgtgacataggggaatcctctccaagtccagaagtagaagaacaacgcacactacgcgtcctagagatgacatctgactggttgcaccgaggacctagagagttctgcataaaagttctctgcccttacatgcccaaggttatagaaaaaatggaagttctgcagcgccgcttcggaggtgggctagtgcgtctccccctgtcccggaactccaatcacgagatgtattgggttagtggagccgctggcaatgtggtgcacgctgtgaacatgaccagccaggtactactggggcgaatggatcgcacagtgtggagagggccaaagtatgaggaagatgtcaacctagggagcggaacaagagccgtgggaaagggagaagtccatagcaatcaggagaaaatcaagaagagaatccagaagctcaaagaagaattcgccacaacgtggcacaaagaccctgagcatccataccgcacttggacataccatggaagctatgaagtgaaggctactggctcagccagctctctcgtcaacggagtggtgaagctcatgagcaaaccttgggacgccattgccaacgtcaccaccatggccatgactgacaccaccccttttggacagcaaagagtcttcaaggagaaagttgacacgaaggctcctgagccaccagctggagccaaggaagtgctcaacgagaccaccaactggctgtgggcccacttgtcacgggaaaaaagaccccgcttgtgcaccaaggaagaatttataaagaaagtcaacagcaacgcggctcttggagcagtgttcgctgaacagaatcaatggagcacggctcgtgaggctgtggatgacccgcggttctgggagatggttgatgaagagagggaaaaccatctgcgaggagagtgtcatacatgtatctacaacatgatgggaaaaagagagaagaagcctggagagtttggaaaagctaaaggaagcagggccatttggttcatgtggcttggagcacggtatctagagtttgaagctttggggttcctgaatgaagaccattggctgagccgagagaattcaggaggtggagtggaaggctcaggcgtccaaaagctgggatacatcctccgtgacatagcaggaaagcaaggagggaaaatgtacgctgatgacaccgccggatgggacactagaattaccagaactgatttagaaaatgaagccaaggtgctggagctcctagacggtgaacaccgcatgctcgctcgagccataattgaactgacttacaggcacaaagtggtcaaggtcatgagacctgcagcagaaggaaagaccgtaatggacgtgatatcaagagaagatcaaagggggagtggacaggtggtcacttatgcccttaacactttcacgaacattgctgtccagctcgtcaggctgatggaggctgagggggtcattggaccacaacacttggaacagctacctagaaaaaccaagatagctgtcaggacctggctctttgagaatggagaggagagagtgaccaggatggcgatcagcggagatgactgtgtcgtcaagccgctggatgacagattcgccacagccctccacttcctcaacgcaatgtcaaaggtcagaaaagacatccaggaatggaagccttcgcatggctggcacgactggcagcaagttcccttctgctctaaccattttcaggagattgtgatgaaagatggaaggagcatagttgtcccgtgcagaggacaggatgagctgataggcagggctcgcatctctccaggagctggatggaatgtgaaggacacagcttgtctggccaaagcatatgcacagatgtggctactcctatacttccatcgtagggacttgcgtctcatggcaaatgcgatttgctcagcagtgccagtggattgggtgcccacaggcaggacgtcctggtcaatacactcgaaaggagagtggatgaccacggaagacatgctgcaggtctggaacagagtctggattgaagaaaatgaatggatgatggacaagactccaatcacaagctggacagacgttccgtatgtgggaaagcgtgaggacatctggtgtggtagcctcatcggaacgcgatccagagcaacctgggctgagaacatctatgcggcgataaaccaggtcagagctgtcatagggaaagaaaattatgttgactacatgacctcactcaggagatacgaagacgtcctgatccaggaagacagggtcatctag

SEQ ID NO: 10821 - DNA, 3603 bp, unidentified
  misc_feature 1..3603: note = Synthetic
  source 1..3603: mol_type = other DNA
ataaccatgactaaaaaaccaggagggcccggtaaaaaccgggctatcaatatgctgaaacgcggcctaccccgcgtattcccactagtgggagtgaagagggtagtaatgagcttgttggacggcagagggccagtacgtttcgtgctggctcttatcacgttcttcaagtttacagcattagccccgaccaaggcgcttttaggccgatggaaagcagtggaaaagagtgtggcaatgaaacatcttactagtttcaaacgagaacttggaacactcattgacgccgtgaacaagcggggcagaaaacaaaacaaaagaggaggaaatgaaggctcaatcatgtggctcgcaagcttggcagttgtcatagcttacgcaggagcaatgaagttgtcgaatttccaggggaagcttttgatgaccatcaacaacacggacattgcagacgttatcgtgattcccacctcaaaaggagagaacagatgctgggtccgggcaatagacgtcggctacatgtgtgaggacactatcacgtacgaatgtcctaagctcaccatgggcaatgatccagaggatgtggattgctggtgtgacaaccaagaagtctacgtccaatatggacggtgcacgcggaccaggcattccaagcgaagcaggagatccgtgtcggtccaaacacatggggagagttcactagtgaataaaaaagaggcttggctggattcaacgaaagccacacggtatctcatgaaaactgagaactggatcataaggaatcctggctatgctttcctggcggcgacacttggctggatgcttggcagtaacaacggtcaacgcgtggtatttaccatcctcctgctgttggtcgctccggcttacagttttaattgtctgggaatgggcaatcgtgacttcatagaaggagccagtggagccacttgggtggacttggtgctagaaggagatagctgcttgacaatcatggcaaacgacaaaccaacattggacgtccgcatgattaacatcgaagctagccaacttgctgaggtcagaagttactgctatcatgcttcagtcactgacatctcgacggtggctcggtgccccacgactggagaagctcacaacgagaagcgagctgatagtagctatgtgtgcaaacaaggcttcactgatcgtgggtggggcaacggatgtggacttttcgggaagggaagcattgacacatgtgcaaaattctcctgcaccagcaaagcgattggaagaacaatccagccagaaaacatcaaatacgaagttggcatttttgtgcatggaaccaccacttcggaaaaccatgggaattattcagcgcaagttggggcgtcccaggcggcaaagtttacaataacacccaatgctccttcgataaccctcaaacttggtgactacggagaagtcacgctggactgtgagccaaggagtggactgaacactgaagcgttttacgtcatgaccgtggggtcaaagtcatttctggtccatagggaatggtttcatgacctcgctctcccctggacgtccccttcgagcacagcgtggagaaacagagaactcctcatggaatttgaagaggcgcacgccacaaaacagtccgttgttgctcttgggtcacaggaaggaggcctccatcaggcgttggcaggagccatcgtggtggagtactcaagctcagtgaagttaacatcaggccacctgaaatgtaggctgaaaatggacaaactggctctgaaaggcacaacctatggcatgtgtacagaaaaattctcgttcgcgaaaaatccggcggacactggccacggaacagttgtcattgaactatcctactctgggagtgatggcccctgcaaaattccgattgtctccgttgcgagcctcaatgacatgacccccgttgggcggctggtgacagtgaaccctttcgtcgcgacttccagtgccaactcaaaggtgctggtcgagatggaaccccccttcggagactcctacatcgtggttgggaggggagacaagcagatcaaccaccattggcacaaagctggaagcacgctaggcaaggccttttcaacaactttgaagggagctcaaagactggcagcgttgggcgacacagcctgggactttggctccattggaggggtcttcaactccataggaaaagccgttcaccaagtgtttggtggtgccttcagaacactctttgggggaatgtcttggatcacacaagggctaatgggtgccctactactctggatgggcgtcaacgcacgagaccgatcaattgctttggccttcttagccacaggaggtgtgctcgtgttcttagcgaccaatgtgcatgctgacactggatgtgccattgacatcacaagaaaagagatgagatgtggaagtggcatctttgtgcacaacgacgtggaagcctgggtggacaggtataaatacttgccagaaacgcccagatccctagcgaagatcgtccacaaagcgcacaaggaaggcgtgtgcggagtcagatctgtcactagattggagcaccaaatgtgggaagccgtacgggacgaattgaacgtcctgctcaaagagaatgcagtggacctcagtgtggttgtgaacaagcccgtgggaagatatcgctcagcccctaaacgcctatccatgacgcaagagaagtttgaaatgggctggaaagcatggggaaaaagcattctctttgccccggaattggctaactccacatttgtcgtagatggacctgagacaaaggaatgccctgatgagcatagagcttggaacagcatgcaaatcgaagacttcggctttggcatcacatcaacccgtgtgtggctgaaaattagagaggagagcactgacgagtgtgatggagcgatcataggcacggctgtcaaaggacatgtggcagtccatagtgacttgtcgtactggattgagagtcgctacaacgacacatggaaacttgagagggcagtctttggagaggtcaaatcttgcacttggccagagacacacaccctttggggagatggtgttgaggaaagtgaactcatcattccgcataccatagccggaccaaaaagcaagcacaatcggagggaagggtataagacacaaaaccagggaccttgggatgagaatggcatagtcttggactttgactattgcccagggacgaaagtcaccattacagaggactgtggcaagagaggcccttcggtcagaaccactactgacagtggaaagttgattactgactggtgctgtcgcagttgctcccttccgcccctacgattccggacagaaaatggctgctggtacggaatggaaatcagacctgtcaggcatgatgaaacaacactcgttagatcacaggttgatgctttcaatggtgaaatggttgaccctttttcagctgggccttctggtgatgtttctggccacccaggaggtccttcgcaagaggtggacggccagattgaccattcctgcggttttgggggccctacttgtgctgatgcttgggggcatcacttacactga

SEQ ID NO: 10822 - DNA, 1641 bp, unidentified
  source 1..1641: mol_type = other DNA
  misc_feature 1..1641: note = Synthetic
atggtagttatacttgacaagagatgttattgtaatcttttaatattgattttgatgatctcggagtgtagtgttgggattctacattatgagaaattgagtaaaattggacttgtcaaaggagtaacaagaaaatacaagattaaaagcaatcctctcacaaaagacattgttataaaaatgattccgaatgtgtcgaacatgtctcagtgcacagggagtgtcatggaaaattataaaacacgattaaacggtatcttaacacctataaagggagcgttagagatctacaaaaacaacactcatgaccttgtcggtgatgtgagattagccggagttataatggcaggagttgctattgggattgcaaccgcagctcaaatcactgcaggtgtagcactatatgaggcaatgaagaatgctgacaacatcaacaaactcaaaagcagcattgaatcaactaatgaagctgtcgttaaacttcaagagactgcagaaaagacagtctatgtgctgactgctctacaggattacattaatactaatttagtaccgacaattgacaagataagctgcaaacagacagaactctcactagatctggcattatcaaagtacctctctgatttgctttttgtatttggccccaaccttcaagacccagtttctaattcaatgactatacaggctatatctcaggcattcggtggaaattatgaaacactgctaagaacattgggttacgctacagaagactttgatgatcttctagaaagtgacagcataacaggtcaaatcatctatgttgatctaagtagctactatataattgtcagggtttattttcctattctgactgaaattcaacaggcctatatccaagagttgttaccagtgagcttcaacaatgataattcagaatggatcagtattgtcccaaatttcatattggtaaggaatacattaatatcaaatatagagattggattttgcctaattacaaagaggagcgtgatctgcaaccaagattatgccacacctatgaccaacaacatgagagaatgtttaacgggatcgactgagaagtgtcctcgagagctggttgtttcatcacatgttcccagatttgcactatctaacggggttctgtttgccaattgcataagtgttacatgtcagtgtcaaacaacaggcagggcaatctcacaatcaggagaacaaactctgctgatgattgacaacaccacctgtcctacagccgtactcggtaatgtgattatcagcttagggaaatatctggggtcagtaaattataattctgaaggcattgctatcggtcctccagtctttacagataaagttgatatatcaagtcagatatccagcatgaatcagtccttacaacagtctaaggactatatcaaagaggctcaacgactccttgatactgttaatccatcattaataagcatgttgtctatgatcatactgtatgtattatcgatcgcatcgttgtgtatagggttgattacatttatcagttttatcattgttgagaaaaagagaaacacctacagcagattagaggataggagagtcagacctacaagcagtggggatctctactacattgggacatag

SEQ ID NO: 10823 - DNA, 45 bp, unidentified; identical to SEQ ID NO: 1492
  source 1..45: mol_type = other DNA
  misc_feature 1..45: note = Synthetic

SEQ ID NO: 10824 - DNA, 10311 bp, unidentified
  misc_feature 1..10311: note = Synthetic
  source 1..10311: mol_type = other DNA
ttgaacgttttttggagagagactactatgtcaaacaaaaaaccaggaagacccggggcaacccgggttgtcaatatgctaaagcgcggcgcatcccgcggaaatccgatatctcggatcaagaggatgttggatgggctattcaagggaataggacccatcaggattgtccttgcattcctgacgtttttcaaatttacagctttgaaaccgacggcaggattgttgagacgatggaagattgttggtgtggcggaagccacgcgacatctaaaaagttttaggaaggacataggacagatgttggatggactcaacaagagaggaaagaagaaaagaggaggaagcactggtggtttgcttttgattattagcttctcatgtgcgtgtgcccttaaggtgggatcgtacaatggaaagccgctgatcactgtaaaccaagcggacgtgcagaacccaattgagctaccaacagcacagggaacgaaccgatgcatggtgaaagctttggatgttggactcatgtgtcctgacgacataacatatttgtgccccaagcttgaaaatggatatgaccctgaggacattgattgctggtgcaacggaacggaagtgtacatacattatggtcggtgcacgccgacgagacatgccagacggtcaagaagagcgatcacagtccatcatcatggcgaaagcctattggaagcgaagaacacaccatggatggactcaacaaaagccacaaagtacttgactaaggttgagaactgggctattcgaaatccaggatacgctctagccgcagccatagtgggttggaacttggggaccaccaaagcacaaaagataatctttaccatcatgctcatgctcattgcaccagcgtacagtttcaattgcttgggcatgcagaaccgtgactttgttgaaggcgtgaatggagttgagtggattgatgttgtaatggaaggaggaagttgtgtgactataacggcgaaagacaaaccaacaattgatgtcaaaatgatgaacatggaggcaactgacttggccctcgtccgctcttattgctatgaacccaaaataaccgatgtcagtacagagccacgctgcccaaccatgggagaggcccacaatacaaaggcatccagtcaagactacgtatgtaagaaaggattgacggacagaggatggggaaatggctgtggactgtttggaaaaggaagcattcatacatgtgcaaaattcgaatgcacacataaagctgaagggagggtagtgcagaaagaaaacatccagtttgaagtggctgtcttcgtgcatggctcgacggaagtcggaacttataacaactactctatacagcaatcactgaaacatgctgcgagatttgtcatcacacccaaagctccggtgcacacagcagagctgagtgagtatggaacggtcactctggaatgtgaaccgcggtcaggtcttgatatgagtcaattttatgtgatgaccatgaacatgaagagctggctagtgaacagagactggttccatgatttaaatctgccatggaccggttcagcagcaggaaattggcaaaatagagagtcactagttgaatttgaggaggcgcacgccaccaagcaatcagtggttgctttggcctctcaagaaggagccctgcacgcggcactggccggagcaattcctgtgaagtacacaagcagcaagctggaaatgacatcaggacacttgaaatgtagggtaaaattgcaaggattgaagttaaaaggaatgacttacccaatgtgctctaacaaattcagcctagctaggaatcccacagacacggggcatggaacagtggtggtgaaattgagctatgctggctctgatggaccatgcagaataccaatctcaatgacagcaaatctacaggacttgaccccgatcggccgcatgataactgtgaacccatatgtttccacatcctccaccggaacgaaagtgatagttgaattggaaccaccctttggcgactcgttcatcctagttggtagtggagaaaatcaaattaaatatcagtggcataagagtgggagctcaattggtaaagcatttgtttccaccctcaagggagcccagcgtatggtggcacttggggatactgcctgggatttcggatcagtaggaggtttctttacctctcttggaaaaggaattcaccaagtctttggaacagcattcagaagcttgttcggaggcatgtcatggataacacagggacttctagggatcctaatgctttggatggggctgaatgccagagaccggtcaatatcgatcacattcttagcagtgggaggagtcctagtgtttctagcgaccaatgtccatgcggacactggttgtgctctggacatgtcaagaaaggaactgaaatgtggaagtggcatctttgtgttcaatgatgttgagacttggagagacaattacaaatactacccagcaacaccaaggaatttggctaaagtgatcgtggaatcatacaggaaaggaatatgtggagtcagatcagtgagccggttggaacacaacatgtgggattcgatcaagcatgaactcaatgccattctggaagacaacggggaggatttgacagtcgtggtggaaccaattgtgggacgtctcaggtcgacacagcgaagattgacgtggacggaagaagagttggaatatggatggaagaaatgggggaaaaccctctttacgagtccaggcatgtcaaacagaacttttgtggtggatgggccaaaaacgaaagagtgtcccgatgacaagagagcttggaacagcttgtacgttgaggactttggatttggcatcacatccactagagtgtggatgggactgcgaaaggtgaacaccacggactgtgatacggcagtgatgggcacagcggtgaaaggagacgttgctgtgcacagtgacctgagctactggattgagagccgcaacaacaagacctggaaattagaacgagcagtgctaggagaagttaaatcgtgcacatggcctgagacacacactctgtggagtgaaagtgttatggagagtgacttaatcataccggttaccattgcgggaccacgtagtagacacaacatgagacctggatacaaagtgcagaattctggaccttgggatgagaaggaaatcaccatagattttgactactgcccaggaacaacagtgaaagtgacttcgacctgccatgacagggcagcatcagctcgaaccaccactgccagcgggaagctcattcaagactggtgttgcaggtcatgcacactcccaccattgagatacatgacaaaaagtggatgctggtatgccatggaaatccggccgacaacacacggtgaggacacccttatcaagtctaaggtgagcgcattcagaggcgatggcatggaaccatttcaactgggggttctcttgatgtttgtggccacacaggaagtcttgcggaagagatggacagcaggcatggcattaccagcaatgctcatgtttttatgtgctttgatctttggtgggataacatacatggatctggttaggtacgtcatactagtggctgcagcttttgcggaaagcaacagtggaggtgacatcgtgcacttagcgctaatcgctgctttcaaaattcagccaggattactagttgcatactcactgaaaaggaaatggagcaaccaggagagtgttttggttggaattgccctttcaatgttgaccttggccatgcaagattgggacatgacaatcccgagcctgcttaactcgggagcggccgcttggttgctgctgagagctgtgagtgagggaacagtaagtgccgtctgcattccagtgctgggcatgctggctcctggacttcgcatcgcgggaattgacgtggttcgcataggattgctgatcatagggattatgtcgctgatgagggaacgcaacaatgcagcagcaaaaaagaaaggaggattgttgataggactggccctagcagaatctgggttgatcagccctcttgtttatgccggactaaccttggcactaaaaccaaacatgaggagaggatggccggtgagtgaagcactgacagccgttggattgacgttcgcactggctggtggcatcgcacattttgatgaaggaaatatggccattccgttagcagtgggcggcataatgttggttgtggcagttgtgacagggttcacaacagatctatggctggaaaaagctggagaaatgacatggtctgaggaggcccaaataacgggtagctcccaacgatatgatgtggaaattgatagtgatggcaacatgcgacttttgaatgatcctggaatacccttctcagtgtgggcgcttcgaacaggattgatacttttatccgcttacaacccttatctccttccagtgacgttgggagcttattggctcacagtcaaggctccgaaacgtagcggagcgatttgggatgttccagcaccaaaggaaagaaggaaagcagaaattagcacgggggtgtttagaatcatggccagaggaatttttggaaaataccaagctggagtaggcgtgatgtacgagggagtatttcacacaatgtggcatgtcacgaacggtgccacgattaacgtgggtgacgggtgcctggtcccctactgggctagtgtcagggaagacctcatatcctatggagggccatggaagctgggaaaaaagtggaatggagttgatgaagtgcaggtcgtggtggtccagccaggaaagccagccacaaatgtgcaaactaaacctgggatatttcgaacacatgcaggggaagttggagccgtcacattggattaccccacaggaacatctggttcaccaatcattgataaagaaggcaacataattggcttgtatgggaatggcatcctcgtcggagcgggaaactttgtgagtatgatatcacaaggaaaccgtatggaagaagagattccacaggtgtttaatgatgatatgctacgcaagcgacaactcacggtgcttgatttacatccaggatcagggaaaacccgcaaagtgctcccacagattgttaaagctgccattgaaaaaaggttgagaactgcaatcttggcacccacacgtgtcgtggcggctgagatagctgaggcgttgaaggaatacccaatcaggtatttgacccctgccgtcaagagagaacacactggcactgaaataattgacgtgatgtgccatgccactttgacagcacggttgttaacaccacaaagggtgcctaactacaacttattcgttatggatgaagcacatttcactgacccagccagcattgcggctcgtgggtacatttccacaaaagttgacctaggagaagcggcagccatattcatgactgcgacaccaccaggaacgagagatgcctttcctgattcaaattcacctatcatggatgtggaggaacaaataccagatcgagcatggaactcagggtatgactggattacggactatactgggaaaacggtgtggtttgttccaagcgtgaaaatggggaatgaaattgctatgtgtctgacaaaagcggggaagaaagtcattcaattgaacaggaagagttttgacaacgaatatccaaagtgtaagacaggagactgggactttgttgtgacaacagacatatcagagatgggagccaattttggagccagtagagtgatagacagccgcaagtgcataaaaccagttattattgaagacggggaaggcagtgttcaattaaatgggccagttcccatcacagcggctagtgcagcacaaaggaggggaagagtgggcagaaatccagtgcaagttggggatgaataccactttgctggaccgaccagtgaggatgatcacgatttcgcccattggaaggaagcgaagatcttgctagacaacatcaacctaccaaacggactggtggcgcaattgtatgagcctgaacgagagaaggtcttttccattgatggggagtacaggctgagaactgagcaacggaaaaactttgtagagttcttgagaacgggagacctgccagtttggatatcgcacaaactggctgacgctggaatagcttacaacgaccgacgatggtgctttgatggacccaccgtgaacacagtgctagaagacaacaatcctgttgagctctggacgaagactggagagaagaagatcctgaggcctcgttggcgagacggaaggctttgggctgaccatcaagcgctaaaatcattcaaagagtttgcttgtggaaaaaggtcggccattggggtttttgaagtagttaaaatgcttcccgaacattttgcgcataggatgggagaatccatggacaacatttacatgctgagcaccgcagagcgtggaagcagggcgcatagggaagcattggaggaactccccgaaactctagaaacaatcctactaatcacaatgatggctttagcatcatgtggagtctttctattctttgtgcagaggagggggttgggaaaaaccggtctaggtgcaatgatccttatgacagctacagtgttgttgtggattgcagaagtacagccccagaagatagcagggatcttgcttgtgtcacttctcttaatgatagtgttaatcccagaaccagagcgacaacgctcacaaacagacagccacctcgcagtcttcatgatagttgtcctactgattgttggggctgtggcttccaacgaaatgggttggctagagcagacaaaaagggatatatccggtttgtttgggagaacccaggagcagagaactgaaaagtgggattttccttggccagatttgagacctgccacagcctgggcagcatatgctggagcgacaacgctgctcactccactattaaagcatctaatagtcactgagtacgtgaatttctcactcatggctgtgacagcacaagctggagctttgtttggattaggaaaagggatgccctttgtgtccatggacctgtcagtgcctcttcttttactcggatgttggggacagttcaccatgaccaccacactcacgacaatcgtgttgttgattgtgcactatgcattcctcgtgccaggatggcaagctgaagcaatgcgtgcagcgcaaaggaggacagctgctggagtgatgaagaatccagtggtggatggaatagtcgccacagacatacctgatctagacgccagtactccgattacagagaagaaattcggccaagttattctaatagttgtgggagtctgtgcagttttcctaaaaccagggaccatgtcgctaacagagtttggaatgctgacatctgcagccgcagtcacactgatagaaggagcagcaggacgtatttggaatgccacaacagctgtggccatgtgccatctcttgcggaaaaattggctggccggagcctctctggcttggaccatatccaggaacctgcaaagtggagcgttgcgacgaggtggaggaagaggtcgcatgttgggtgagatgtggaaggcacaactaaaccagttgacgagacaggagttcatggagtacagaagggacggtataatagaggttgacagatctgcggctagaaaagcacggagagaaggtaatgtgactgggggacatcccgtctcacgtggaaccgcaaaactacggtggatggtcgagagaggttttgtgaagccacacggaaaggttatagacttgggctgcggcagaggaggctggagttattactgcgccaccttaaaattagttcaagaggtgaagggttacacaaaagggggaccaggtcatgaagaacctgtgatgatgcagagctacggctggaatttggtctcgctgaagagcggtgttgatgtgttttacagaccatctgaacaatcagacacactattatgcgacataggggaagcctcaccagtgccagaaattgaagaagcacggaccgtgaaagtactgcaaatggtggaagaatggctctcacgtggagttgaagatttctgtgtaaaaattctttgtccatacatgcccaaggtgcttaaagagctggaaaagatgcaattaagatggggaggtggcctgatccgggttccactttcgaggaattccaaccatgagatgtactgggtgagtggagccagtggaaacatcacaaattccgtcaacacagtaagtcaaatgctgatcaacagaatgaacagaaccaacaggaatgggcccaagtatgaggaagatgtgcatctaggatctggaacaagagccgtggtcacaaaaaagataaaaacaaactggaagatggtagaagacagagtgaaaaaactggcagatgagttttccaccacatggcactatgactcggagcacccttacaaaacttggaactatcatggaagttatgaagtcaaagcgaccggatcagctagctccatggtgaatggggtggtccgggtgctctcgaaaccatgggacacactgcagagtgtggtgaacatggccatgactgacacaacaccatttggccagcaacgggtgttcaaggaaaaggttgacacaaaagcaccagaaccccctaaaggaacagcagaagttatgagagtcacagcaaaatggatgtggaaatttgttggtagaagcaagacgccaagggtgtgcacgaaagaggaatttatagcaaaagtcaacagtcatgcagcgcttggggccatttttaaggaacaaaacagatgggcatcagcccgagaagcagtggaagaccccgctttctgggaaatggtggacagagaaagagaagcccatctacaaggacgatgtgaaatgtgtacatacaacatgatgggaaaacgcgagaagaagatgggtgaatttggaaaagcaaaaggtagccgggccatctggtacatgtggttaggttcaagatatcttgaatttgaagctctggggttcttaaacgaagaccattggatgagcagagagaacacacttggaggagtcgagggcttaggcctgcagaagcttggatacgtgctgagagacatagcaaagaatccaggaggcctcatgtatgcagacgacacggctggctgggacacaaggatcacgaaagcagatcttgaaaatgagtcaatcgtgttagaaatgatgactccggaacaccgagcgctggctgaaccactgattaagtttgcatacatgaacaaagtcgtgaaagtaatgagaccaggagctgatggcataacagtgatggacgtcatctcacgggaagaccagagagggagtggacaggtggtaacatatgcactcaacacgttcaccaacctttgtgtgcagctcatacgatgcatggaaggagagggtttgctgaagccagaggaggtggagaaacttgagagagggaaacaaaggaaaatccaagactggttggacaagaatggaactgaacgcctagcgtccatggcagtgagtggagacgattgcgtggtaaaaccaaaagatgacagattcgcaaccgctctccattttctcaatagcatgtcaaaaatcaggaaggatattccagagtggaaacaatcaacaggatggagaaactggcaggatgttccattctgctcacatcatttccacgaactcaccatgaaggatggacgccaaattgtggtaccttgccgccatcaagatgaactgatagggagggccaggctatcacctggctctggatggtcactgacggaaacagcatgcttgagcaaggcttatgggcagatgtggctgttgatgtacttccacagacgggacctccgtctgatggctaacgcaatctgctcagccgtgccagtgagttgggtgcccaccgggagaacaacctggtccatccatggaaaaggggaatggatgacaactgaagacatgctaagagtgtggaatcgcgtgtggattgaggaaaatgagcacatggaggataagaccccagtcagcagttggaatgacgtgccataccttggaaaaagggaagacagttggtgtgggagcttaattgggcatagagctagatccacctgggcggagaacatatacactcccatcatgcagataagagggctgataggcccagaaagatatgtggactatatgcccactctaaacagatttaaggcagtggaatcgtggtcagagggagtgctgtag

SEQ ID NO: 10825 - DNA, 10281 bp, unidentified
  misc_feature 1..10281: note = Synthetic
  source 1..10281: mol_type = other DNA
atgtttaacaaaaaaccaggaaaacccggggcaacccgggttgtcaatatgctaaagcgcggtgcatcccgcggaaatccgatatctcggatcaagaggatgctcgatggactactcagaggagtaggaccagtcagaattgtcttggcgatcttaacctttttcaaatttacagctttgaaaccaacggcaggattgttgagacgatggaagctagtgggggtggttgaggccacccgccacttgaaaagcttccgaaaggacataggacaaatgctagatggactgaacagacgcggcaaaaagaagcgtggggggaccaccgtgggcattgcctttcttgtggcactaggggtagcccaggctatcaagatcggatccttgaacggacggccacttgtcacagtcaaccaggcagatgtgttagaggcggttatgatcccaactgctggaggaaacaaccgatgcgttgtgaaagctctggatgtcggattgatgtgccctgatgacatcacgtatttatgtcccaagctagaggatgggtatgacccagaggatatagactgctggtgcaacaccacggagatctacatccactacggccggtgcaccccaacgcgacacgcgagacgatcgaggcggtctatcacagtgcaccatcacggagagagcttgctcgaagcaaagaatacaccatggatggactcaaccaaggctaccaaatacttgaccaaggtggaaaactgggccatacgtaaccctggatacgcactagcagcggctataataggatggaatttagggacaacaaaatcccaaaagatcattttcacaatcatgcttatgctcatcgctccggcctacagcttcaactgcctgggaatgcaaaacagagatttcgtggaaggtgttaatggagttgagtggattgatgtcgtgatggaaggtggaagctgtgtgaccattacagcaaaggacaagcccacaatcgatgtgaagatgatgaacatggaagccactgacttggcgcttgtgagatcatattgttacgagcctaaaatcactgatgttagtactgaaccaagatgccccaccatgggagaggcccacaacaccaaagccaataaccaggagtacgtgtgtaagaaaggttatactgacagaggttggggtaatggttgtggactgttcggaaagggcagtattcacacatgcgccaaatttgagtgcaccaataaggctgagggaagaattgtgcagaaggaaaatgttcatttcgagttggctgtgtttgtgcacggatcaacagaaatgggaacctacaatgactactttatacagcagtcattgaagcaggcagcgaggttcattgtcacaccaaaagcaccagtgtacacagccgaactcaatgagtatgggacggtgacactggaatgtgagccccgctccgggatggacatgagccagttttacgtgctaactatgaattcgaagagctggcttgtgaacagagactggttccatgacttaaaccttccgtggactggatcatctgctggctcatggcagaacagagaatcactggtggagtttgaagaagctcatgcaactaaacaatcagtagtggcactggcttcgcaagaaggggcgttacacgctgctctggccggagccattccagtgaaatacgccagcagtaagcttgagatgacttctgggcacttgaagtgtcgcgtgaaattacaaggactgaaattgaaaggaatgacttaccccatgtgctcaaataagttcactctagccaagaaccccacagacacagggcatgggacagttgttgtggaactcagctattctgggtctgatggaccatgtcgtatacccatatcaatgacagccaaccttcaggatttgaccccgataggaaggctcataacggtcaatccatatgtgtctacatcatcatcggggacaaaagtggttgttgagcttgaacccccattcggggattcattcattttggttggaacaggagaaaatcagataaagtatcaatggcacaagagtggaagctccatcggtaaggcattcatgtctaccgtgaggggagcgcagaggatggtagcacttggagacaccgcatgggactttggatcagtcggaggttttttcacatcactaggcaaaggaatacaccaagtgtttggaactgccttcagaagcctcttcggaggaatgtcatggataacccagggcctcctaggagcacttctgttgtggatgggacttaacgcaagagataggtcgatttcactgacgttcttggctgttggagcaatcctcatattcctagctacgaatgtacatgccgatactggttgcgcagtggacatggacaggaaagaactgaagtgcggaagtggcattttcatatttaatgatgtggaaacctggagggacaactacaagtactacccatcaactccgcggaatctggctaaagtcataatggaatcacgggaaaaaggaatctgtggtgtaaggtccgtgggaagactggagcataacatgtggaattcaatcaagcatgagctgaatgccatacttgaggacaacgggccagacttgacagtcgtcgttgaacagccaactggtagatttaggaaaacccaccggcgtttagtgtggacagacgaggaattggaatacgggtggaagaaatgggggaaaacattgtttgtcactccacccatgtccaataacacatttgttgtggatggtcccaaaacaaaagaatgcccagatgagaatagagcctggaacagtttagaagtggaggattttggatttgggctaacatcaacgaaagtttggttaggattaaggaaagaaaacacaaccgaatgtgacacggccgtgatgggcacagccatcaagggtgacaaagcagtccacagtgatttgagctactggattgaaagcagaaacaatggcagctggaaacttgaaagagctgtgctgggagaagtcaagtcatgtacttggccagatacccacactctgtggggggagagtgtccaggagagtgaattgatcattccagtcacattggccgggcccaggagcaaacacaacatgaggccaggctacaaggtgcaagtttcaggaccatgggatgagagagacatcaccatcgattttgattactgtccaggcaccaaagtgacagtcaccccaacatgcagggatagggttgcctccgccagaacaacaacggcaagcggtaagctgatcacagattggtgctgtaggtcatgcactctccctccattgcggtacatgacaaagagcggctgctggtatggaatggagattagacctacagtacatggagatgacatgttgataaaatcaagagtcaccgcttatgacggcgctggcatggaaccatttcagctgggtgtactcatgatgttcgtggccacacaagaggtgctgcggaaaagatggacaggccggatggccggtccagcactggtgggtctgttatgcgctatgattttcggcgggataacttacagggacatggtgaagtacgtcctgttggtggcggccgcctttgccgaaagcaacagcgggggtgacgtgatccaccttgctctgatagcaactttcaacgtgcaacctggactgctggtggcgtactccttgcggcggaaatggagtaatcaggatgccaccctcttaggcgtggcactggcaatgataaccatggcgttgcacgactggaacatgaccatacccagcttgttgaattcaggagccacggcgtggctgttgctgcgcgcagtgagtgaagggaccgtcagcgcggcctgtattcccattctcggacttttggctccaggaatgaaaataattggaattgatgtatttcggatcgggctgcttatcatcggagttatgtcactcctgaaagaaagaaacaatgccatcgcaaaaaagaaaggtggagtgctgattggtttggccctggcccaagacggctgggtgaatccactggtgtacgcaggactgacgttggctctgaaacccagcaatagaagaggatggccagtgagtgaagcccttacagcagtaggattgacctttgcgctagctggtgggatcgcacactttgacgaaggagacatggccatcccactggctgtgggaggaataatgctggtggtagctgtggtcacaggattcacaactgacctgtggttggagcgagctggagacatctcgtggattgaggatgcccaaataacaggaagctcacaacggtatgacgttgagatagattgtgatgggaacatgaaattgatgaatgatcaaggagtccctttttccatttgggcccttaggacaggactcattctagcatcggcctacaatccatacattctgccagtgacattgggagcttactggatgacgacacactccccgaagagaagtggagccatctgggatgttccggcccccagggaaaagaagagagctgaattgagcactggagtctttagaattatggctagagggatacttggaaaatatcaagctggagtaggagtgatgtttgatggggttttccacacgatgtggcatgtgacgaatggggccaccattaacgtgggggacggttgcctagtcccctattgggctagtgtaagagaggacttgatatcgtatggaggaccttggaagatgggcacgaaatggaacggggttgatgaagtgcaagtcattgttgtccagccagggaaatcagtcatgaatgtgcaaacaaagcccggggtctttaagacctctactggagagattggggcagtcacccttgattatccaacgggaacatcaggctcgcccatcgtagacaaggaagggaacataattgggctctatggtaatggcattcttgtcggagcaggcagcttcgttagcatgatttcccaaggccagcgaatggaagaagagattccgcaagtgttcagtgaagacatgctgaggaaaagacagctaactgtgcttgacttgcacccaggctcaggaaaaacaaggaaagtgcttccccaaattgtgaagacagccattgataggagactcaggacagctattttggcaccgacaagagtggtagcagctgagatagcggaagctctcaaggaatacccaataaggtacctaactccagctgtcaagcgagaacacacaggaacagaaatcattgacgtgatgtgtcatgcaacactgacgtcacgccttctcacgccacaacgtgttcccaactacaacttgtttgtgatggatgaagcccatttcaccgaccccgcgagcatagctgcccgaggatacatctcaaccaaagtggagctaggcgaggcggcagccattttcatgacggccacccctccaggaacgcgtgacccatttccagactcgaactcaccaatcgtggatgtggaggagcagatccctgatagggcatggaactcaggatatgagtggataaccgactataccggaaagacagtgtggtttgttcctagcgtgaagatgggaaacgagatagccgtgtgcttgacgaaggccggtaaaaaagtgatccaattgaatagaaagagctttgactctgaatacccaaagtgtaaaacaggtgagtgggactttgtgataaccacggatatttcggagatgggagccaactttggggcgagccgggttattgatagtcggaaatgcataaaaccagtcgtcgtagaggacggggaaggaagcgtgcagctcaatggaccagtgcccatcacagcagccagtgcagcgcagagacgcggaagaattgggagaagctacgtgcaagtcggagacgagtaccacttttctgggccaacaagcgaggacgaccatgactttgcccattggaaagaggccaagatactgctagataatatcaacctgcccaacggcctcgtagcccaactctatgagccagagagagagaaggtcttttccatcgatggggaatatcgcttgagaacggaacaacgtaagaattttgttgagtttttgagaacaggagatctgcctgtctggctttctcacaaattggcagaagcaggagttgcgtatcacgataggaagtggtgcttcgatggaccttcaataaatacagttctcgaggacaacaacccagttgagctttggacaaaatcgggtgagaagaagatactgcgacctaggttgagagatggaaggctctgggcggaccatcaagccctgaaatcatttaaggacttcgcttgtggcaagagatcagccattggcgtgtctgaagtggtcaaaatgcttccagagcatttcgcacacagaatgggagaatccatggacaatctgtacatgttgaccacttctgagaaaggtagcagggctcacagggaagcgctagaggagctaccagaaacactggaaacaatcctcttgattaccatgatgacgttagcatcctgtggggtctttctcttttttgttcaaagaaggggtttggggaaaacaggcttgggggccctggtgctgatgacagtgacagggttgctttgggtcgcagaagtccaaccacaaaagatagctggaatcttgctcatatcattgctactcatgatagttctcatccctgaaccagaaagacaaagatcacaaactgacagtcacttggcggtattcatgatactggtcctgctcatcgtgggaacagtggcttccaacgagatgggctggcttgaacaaacgaagaaggatgtcgccagcttgtttggtagggcacaccaccaagagccaagccgatgggaaatgccgtggcctgatctcagacccgccacagcttgggctgcatacgctggggccacgacgtttttgacaccactgctgaaacatctcattgtcacagaatatgtgaacttttcactgatggctgtgaccgctcaagccggagccctatttggattaggaaagggcatgccgttcgtggccattgacctgtcgaccccattgttactgttagggtgttggggccaattcacaatgaccacgactctgacaacaatcatgcttctgatcattcactacgcgtttttgatccctggctggcaagcggaagccatgcggtctgctcaaaggagaacagcagcaggtgtgatgaaaaatccagtggttgatggaatcgtggcaacggacgtaccggatctagaagcaagcacaccaatcactgagaagaaatttggacaggtcatactaattgtggtagccttgtgctcagtttttctgaagcctggaacaacatcactaacggaattcggaatgctcacatcagcagcctccgtgaaccttgataaaggacagcggacggatatggaatgcaccaccgcagttgccatgtgccatctaatgaggaagaactggctaacaggggcatcactcgcctggaccatctcaagaaacctacaaaacggaagcatgagaagaggaggcgggaaaggtagaatgctcggagaaatctggaaggcccaactcaatcaactaacacggcaggaattcatggaataccggaaggacggtatcatagaggttgatagagccccggcgcgaaaggcgcgaagagaaggaaacgtgacaggaggacatccggtgtctagaggaacggcaaaactgaggtggctcgttgagagaggattcctgaaaccgcgaggaaaggtggtagacctaggttgcggtaggggtggctggagctactactgtgcaaccctgaaaatggttcaggaagtgaaagggtacacaaaaggaggaccaggacacgaagaacctatgatgatgcaaagttatggatggaacctggtttccctgaaaagtgggattgacatcttctacagaccagctgaacattctgacacactcctgtgtgacattggagaagcttcacccgtgcccgagattgaagaggccaggacattgaaggtcctgcaaactgtggatgagtggctggcgagaggaactgaagaattttgcataaaagtgctatgcccatacatgccaagagtcctgaaagaactggaacggatgcagtcacgctggggagggggtctcgtcagggtcccactttcccggaattcaaaccatgaaatgtactgggtgagcggagccagtgggaacatcacgaatgccgtgaacacagtgagccagatgttgatcaacagaatgaatagaaccaacagaaatggcccaaaatatgaggaagacgttcacctaggttcaggaacaagagcggtgctgacgaagaaagtgaagaccaattggaaaatggtagaagaccgcgtcatgcgcctagccgaagaattctccaccacatggcatcatgacacagaaaatccatacaaaacctggaactaccatggaagttatgaagttaaagcaacaggatcagccagttccatggttaatggagtcgtgaaggtgttgtcaaagccttgggatgccttgcagaacgtagtaaacatggccatgactgacacgaccccatttggacagcaaagagtgttcaaggaaaaagtggacacaaaagcgccagaacctcctcgaggaacatcagaagttatgaaaatcacagctcggtggatgtgggacttcgtggggaggaataaaagacccagaatttgcacaaaggaggagtttatagagaaggtaaatagccacgcggcccttggtgcaatctttaaagaacagaacaagtgggcatcagctcgggaagcagtggaggacccagcgttttgggagttggtggatcaggaacgcgaggcgcaccttcaaggaaagtgtgagacatgcatctacaacatgatgggaaagagagaaaagaaaatgggagaatttggcaaagcaaaaggaagcagggccatatggtatatgtggctcggatcccggttcttagaatttgaggcccttgggtttctgaacgaggatcactggatgagcagagaaaacaccttgggaggcgttgaaggcatgggcctacagaagctagggtatgtattgagggacatggctggcaaggaaggggggctcatgtacgctgacgacactgctggatgggacaccagaatcaccaaagctgatctggaaaatgaagcactcattctcgaaagaatggacccagagcacaggcgtctcgcagagtcactaattaaatttgcttacatgaacaaagtggtgaaagtgatgcggcctgggagggaaggtatcaccgtgatggatgtgatttccagggaagaccagagaggaagtggacaagtcgtcacctacgcgttgaataccttcaccaatttgtgtgtccaattgattagatgcatggaaggagaaggactgctgaagcctgaagaagttgaagggctggagcgaggaaaacacaagaaaatccaagactggctgggcaagaatggaagagagagactggcggctatggcagtcagcggtgacgattgcgtggtaaagccaaaggatgaccgatttgcaacggcattgcatttcttgaacagcatgtcaaagatcagaaaagacatccccgagtggaaaccctcaacgggatggaggaactggcaagacgtccctttctgttcacatcatttccacgagttaaacatgaaggatggcagaaccatcgttgtcccatgcagacaccaggatgaactgataggaagggcacgattgtcaccaggatctgggtggtccctcactgaaacagcatgtctgagcaaagcttatggccagatgtggctactcatgtactttcacagacgtgacctgcggctgatggccaatgccatatgttcatctgtgccagtctcatgggtgcccacgggaagaaccacctggtcaattcacggaaaaggagaatggatgacaacagaagatatgttgagagtctggaacagggtgtggattgaggagaacgaacacatggaagacaagacccctgtggcctcatggaacgatgtgccgtacctcggaaagcgcgaggacagttggtgtggaagtctgatagggcacagaacacgatcaacctgggcagagaacatatacacaccaatcatgcagatcagggccctgattggaccagagcggtatgttgactatatgccaactctaaaccgcttcagggcagtggaaacatggtctgatggggttctgtaa

SEQ ID NO: 10826 - DNA, 10278 bp, unidentified
  misc_feature 1..10278: note = Synthetic
  source 1..10278: mol_type = other DNA
atgtctaacaaaaaaccaggaagacccggctcaggccgggttgtcaatatgctaaagcgcggaacgtcccgcggaaatccgctagcgcggataaagaggacgattgatggggtcctgagaggagcaggacccataaggtttgtgctggctctactgactttcttcaagtttacagccctgaggccaaccattggaatgctgaagagatggaagctggttggagttaatgaggcgaccaaacatctgaaaagcttcaagcgtgacattggacagatgctcgacggactgaataagcggaaggcgaaacgtcggggggggagttgctcttggatcattatgttactcccgatagttgctgggctgaagcttggaaactataatggtagagttttggccactttaaataagactgatgtatcagacttgctagtcattccaataacggctggcagcaatggatgcgtcgtacgtgctctagatgtgggactaatgtgtcaggatgacataacgtatctgtgcccaaagttggagtacggctacgaacctgaagacatagactgctggtgcaatgagactgagatatacattcattatgggagatgcaccccttcacggcatggacggaggtctaggagatcggtgaacgtgcatcaccatggagagagtctacttgaggccaagaacacgccgtggatggattcgaccaaagccactaaatatctcacgaaggttgagaactgggcgttgagaaatcctgggtatgctcttgctgccattttcataggctggaatctgggaacgacgagaagccaaaagataattttcacaattatgttaatgttaattgccccagcgtacagcttcagctgtctggggatgcagaaccgagactttgttgagggagtgaatggtgttgagtggatcgatgtcgttctggaaggaggcccatgtgtgaccattacggcaaaagacaggccgaccatagacgtcaagatgatgaacatggaggctacggaattagcggttgtgagatcttactgctatgagccgagagtgtcggacgtgacgacagaatccagatgcccaaccatgggagaggctcataatcccaaggcaacttatgctgaatacatatgcaaaaaagattttgtggacaggggttggggcaatggctgtggcttgtttggaaaggggagcatacagacatgtgccaagtttgactgcacaaagaaagcagaaggcaggattgtgcagaaggaaaacgtccagtttgaagttgcagttttcatacatggttccacggaagcgagcacctaccacaattattcagcccagcagtcgctgaaacatgccgctagattcgttataacgcccaaaagtcccgtctacaccgctgagatggaggattatggtaccgtcacactcgaatgtgaaccccgatctggggttgacatggggcaattctatgtctttaccatgaacacaaaaagctggcttgttaacagagactggtttcatgatctcaacttaccatggacagggtcatcagcggggacgtggcaaaacaaagagtcattgatagaatttgaggaggcccacgccaccaaacaatcagtggtggctttggcatcacaagaaggagccctccatgcagcattggcgggagctattccagtgaagtactctggaagcaaattggaaatgacctcaggtcatcttaaatgcagggttaaaatgcagggtttgaagctgaaaggaatgacctacccgatgtgtagcaatacattttccctagtgaagaatcctaccgacactgggcatggcactgtcgtggtggaattgtcttatgcaggtaccgatgggccctgtagagttcccatatccatgtcggcagatctgaatgacatgacaccagttggacgcttgataacagtcaacccatacgtgtcgacctcctccacgggtgccaagataatggtggaagtggaacctccattcggggattcattcatcttagtaggaagtggaaaaggacagatcaggtaccagtggcatagaagtgggagcacaattggaaaagcttttacgtcaacactcaaaggagcacaaaggatggttgctttgggtgacactgcatgggattttggctcagttgggggtgtactcacttccattgggaaaggcattcatcaggttttcggctcagcatttaaaagcttatttggaggaatgtcatggactactcaaggcatgttgggggcactgctattgtggatggggctgaatgcaagggacagatccatttctatgacttttctagctgtaggaggaattttagtcttcctggcagtaaatgtcaatgccgacacggggtgctcaatcgacttggctaggaaagaattgaaatgtggacaaggcatgtttgtcttcaacgatgttgaggcttggaaggataattataagtactatccatccacaccaaggagacttgccaaagtcgtggcagaagctcatgaggctggaatttgtggcatacgatcagtcagcaggctcgagcacaacatgtgggtaagcatcaaacatgagttgaacgcgatcttggaagacaacgccattgacttgactgtggtggttgaagaaaatcctggaagatacgggaaaactaatcagaggctgccgaacgttgatggagagctcatgtacggatggaagaaatgggggaaaagtatttttagcagcccgaagatgtcaaataatacatttgtcatcgatggaccaaaaactaaagagtacccagatgagagaagagcatggaatagtatgaagattgaagactttgggtttggagtgttgtccacaaaggtatggatggaaatgcgaacagaaaatacaactgattgtgacaccgcagtaatgggcacagcaattaaaggaaatagagctgtgcacagtgacctgagctattggatagagagcaagaataatggaagctggaaactggagagagctgtgctgggcgaggtgaagtcatgcacatggccggaaacccacacactgtggagtgacagcgttgtggagagtgaactcatcatacctaaaacattgggaggaccgaagagtcatcacaacacgaggacaggatacaaggttcagagttccggaccgtgggatgagaaagagattgtaatagacttcgactactgccctggaacaactgtcacagtaacgagctcgtgccgcgacagagggccttcagctaggacaacaacagcgagtgggaaactgataacagattggtgttgtaggtcttgcaccgccccaccactgagatttgttacaaaaagtggatgctggtatgggatggaaattcggccaactgctcacggagacgacatgttgatcaaatcaaaggtcatggcttttcaagggggtggcatggaacctatgcaattgggaatgctcgtcatgattgtagcagcccaggagattttgagaaggcgcatgacggctccaattgcttggtcagcgctgctgttgctgatggctttggtcctgtttggaggaatcacgtacagtgatctggtcaagtacgtcattctagtggcagctgcatttgctgagagcaatacaggtggtgacattgtgcacttggccatggtggccgcttttaacatccagccaggtttactgattggattcctactgaggaggaagtggagcaatcaggaaagcagattgcttggcgttgcgttagcactcataacagtggcaatgagagatttgaacatgagtataccaacattactcaactccggagccatggcctggctcttgctgagagccgtgtttgaagggacggttagctcctttgctctgccacttgttagcttgctggctccagggctcagaatagtggggatagatgtggtgagaataggtgtgctaaccctgggaatcctctcactattgaaagagaggagcaatgcaatggcaaaaaagaagggtggcatgctcctgggagtggcatgcgctaccgctggaatcgctagccctttggtgtttgctggtctgcacatggtgctgaagccagtgacacggagagggtggccagtcagtgaggctttgactgctgtgggattgacattcgcgttggcaggaggaatagcccagtttgatgacagcagcatggcgattccattagccgttggcgggattatgctggtggtggcagtggtaacaggcttctctacagacttatggctagagaaagcgagcgacatctcgtggagtgaggaggcgagggtgactggagcatcacagagatttgatgtggaaattgatcaggacggtaatatgagattactgaacgatcctggtgtgtcgctcggtgtttgggcctttcgaactgggcttattctgttatcttcatacaacccatacttcctgccactgactctggcaggttactggatgacaaccaaggcaaaacaacgaggaggagtcatctgggatgtgccagctccaaaggaaaggaagagagccgaagtaggcaatggagttttccggattatggcaagaggactgttagggaaataccaggctggagtgggagtcatgcatgagggagtgtttcacaccatgtggcacgtgacgaatggggccgttattcaagcaggagaaggaacactggtcccatattgggcgagtgtacgcaatgatctaatttcctatggtggaccatggaaattggggaagcaatggaatggcgtagatgaagtgcaagtcatcgtcgtgcaaccaggcaaagaggtcataaatgtgcagacccaaccaggaatttttaagactcaatatggtgaagttggagctgtgtccctcgattacccaacgggaacctctggatcacctatcattgacaaggaaggacaggtggttggcctctatggtaatggaatcctggtgggttcaggcgattttgtcagtatgattactcaaggggagaagaaggaagaagaagttcctcaggtgtttgacgaaaacatgctgcgaaaaaggcaactaacagtgctggacctacatccaggttcaggaaagaccagaaaagtcctccccatgattctgaagagcgccattgacaaacgattaagaacagctgtcttggctccgactcgggtggtggccgctgaaatagcggaagcactgaaaggacttccaatacggtatctgactccggcagtaaagagggagcataccggaacagagataatagatgtgatgtgtcacgcgactttgacagcgcggctgctcacacctcagcgagtgccgaattacaacttgttcattatggatgaggctcacttcacagaccccgccagtattgctgccagaggatatatatcaacaaaggtggaactgggagaggcagctgcaatattcatgacagccacacctccaggtacaactgaggcatttccggactccaactcgccaataacagacattgaagagcaaatccctgatagagcttggaattctgggtatgagtggataacagactttcaaggaaagactgtatggtttgtccccagcgtgaagtctggtaatgagattgccgtgtgcttgacaaaggccggtaagaaggtaattcagctaaataggaagagttttgactcagagtatcctaaatgcaagagtggagaatgggattttgtgataaccactgacatctcagaaatgggagcgaactttggagcgcaacgggtcatagatagtcggaagtgcattaaaccagtgattattgaggatggagaaggaagcgtgcaaatgaatggaccagttcctataacatcagccagtgcagcccagcgtcgtggacgggttggaagggatgtaacacaaattggagatgaataccactactcaggaccaaccagcgaggatgatcatgatttcgctcattggaaagaggccaagatactgctggacaacattaacatgccagatgggctggttgcccagttgtacggcccagagcgggacaaggttgacgcaattgatggggaattcagactgaggactgagcagaggaaacactttgtggagtatctgaggacaggagacctccctgtctggatatcgtacaaggtcgctgaagctgggataagttacaatgaccggcggtggtgctttgatggacccttatgcaatactgttctggaagacaataacccagtggagttatggacaaagtcaggtgagaagaaaatcttgaagccccggtggagagatggaagattgtgggcagatcaccaggccttaaaagccttcaaggattttgcgagtggaaagagatcagcgatagggatccttgaggttttcagaatgcttcctgaccacttcgctcacagaatgacagaatccatggacaacatatacatgctgactacagctgagaaagggagcagggcccacagagaagccctggaggaactgcctgagacgcttgaaacattcttactggtgttcatgatgacagtcgcctccatgggggtgttcttgttctttgttcagaggagaggcttagggaagacaggtcttggagctatggtcatggccacagttacggttttgttatggatagcagaagtcccggcccagaagattgccggtgtgcttctagtttctctattgctgatgattgttttgatcccagaaccagagagacagagatcgcagacggatagtcacttggctgttttcatgattgttgtcttgttagtggtgggtgctgtggcgtcaaatgaaatgggttggctagagcaaacaaagaaggacttgtcagctctgttcgggaggaaaagcgatagtcatcaagaaacctggagcatgccttggccggatttgagaccagcgacggcatgggcggcctacgcaggagctacaacatttctgactcccttgctaaaacacctcataataacagagtatgtgaacttttcactcatggcaatgacagcgcaggctggagcactatttggactagggaaaggcatgccttttgtcaaagcagacttgtcagtacccctgctactcttagggtgttggggacagttcacaatgacaacaacggtctcggcagtcatgatggtcatactgcattatgcatttttggtgccaggctggcaagcagaagccatgaggtcggcccagaggagaactgctgcaggtgtgatgaaaaatcccgtggttgatggcatagtggctacagatgttccagaccttgaggccagcactcctattacagagaagaaattgggtcaatgtgtgctagtgggaatagccttagtggcggtgttcctaacaccaaatacgctaaccttgaccgagtttggaatgttgacctctgccgcttcggtgacactaattgagggagctgcaggtcgtatttggaacgcaaccacagctgttgctatgtgccatttgttgaggaaaaactggctggctggggcctctctagcatggactataactcggaacctccaggcagggaccttgcgtcggggagggggaactggcagaactttgggggaggcatggaaggcccagcttaatcaactgacccggcaagagtttatggaataccggaaagacgggatcattgaagtagatagagctgctgcaaagagagcccgccgtgaagggaatgtgacaggagggcacccagtttcacgaggcacggcaaagctgaggtggctcgtggagcgtgggtttctcaaaccaagaggcaaagttgtggacttaggctgcggcagaggaggctggagttactactgtgcaacattaaagcaggttcaggaagtgagaggttacacaaaaggagggccagggcatgaggaaccagtgatgacccagagctatggctggaacattgtgacattaaagagtggggttaatgttcacttcaagccgactgaaccatctgacacactgctgtgtgacataggtgaagcttcacccgtcccagaaattgaatctgccagaacaatcagggtgctgcaaatggccgaggaatggctagctaggggcgttgaagagttctgcataaaagtgctttgtccctacatgccagcggtcataaaagaattggaaagactgcagctgaaatggggaggtggtttggttagggtgccactctcgcgtaattcaacacatgagatgtactgggtgagcggctcaagtgggaatgtgacaaatagtatcaatacagtaagccaaatgctgatcaacaggatgcacaaaaccaaccgcaatggacccaggtatgaagaagatgtggacttgggttcagggaccagagctgtgagctgcacaagacagaggactgactggggaatggtcgctgatagggtgaagaatttggccagagaatatgctccgtcttggcattatgaccaagacaatccttacaagacttggaactatcatggaagctacgaagtgaaagccacaggctcagccagctcaatggttaatggggtagttaggatactgtcaaaaccttgggacaccttgcaaaacgtggtaaatatggccatgacggacaccactccttttgggcaacagcgcgtttttaaagaaaaggttgataccaaagccccagaaccacctgcaggaacagctagggtcatgaacatcgtggcaagatggatgtggaactttgttggcagaaacaaacaaccgaggatgtgtacaaaagaagagttcatagagaaggtgaatagtaacgcagccctgggggccatgtttgaggagcaacacaaatgggccagcgccagggaagcggttgaggatcctgagttttggagtcttgttgacagagagagagaactgcacctgcaagggaagtgtgagacctgcatttacaacatgatgggaaagcgagaaaagaagatgggagagttcgggaaagcaaaaggtagtagagctatttggtacatgtggctcggggccagattcctagagttcgaagccttgggcttcttgaacgaggatcactggatgagcagggaaaacactaaaggaggtgttgaaggacttggactccaaaaattggggtatgtgctgcgtgacatctcggccaaagaaggaggacttatgtacgcagacgacacggctggatgggacactagaataaccaaggctgatttggaaaacgaagccatcattttggaaaagatggaaccaatgcacagagctgtcgcagaaccactcattaaatttgcctacatgaataaggtggtgaaggtaatgcgaccgggacgtgatgggaaaacagtcatggatgtcatctcgcgggaagaccagaggggaagtggacaggttgtgacttatgctctcaacactttcacgaacctgtgcgtccagctcattagatgtatggaaggggaggagttgctgctccccgaggaaacagagcgcctaaagaaaggaaaggaaaagcgcatccaagaatggctccaaaagaatggagagaacaggttgtcagccatggcagtcagcggggatgattgtgtggtgaaaccagcagatgacagattcgccacagcactgcatttcctcaacagtatgtctaaggtgaggaaagatactcaggaatggaagccctcaaccggttggagaaactggcaagaagtacccttttgctcacaccatttccacgagctgcaaatgaaagatggcagaaagattgtggttccatgtcgagaccaggatgaactaattggaagagccaggctctctccagggtctggctggtcactaacagaaacagcacgcctgagcaaagcatacgctcagatgtggttattgatgtacttccacaggagggacctcagactaatggcaaacgccatctgctcatctgtccctgtctcatgggtccccacaggaaggacaacgtggtcaatccatggaaaaggtgagtggatgacttctgaagacatgctggcagtgtggaacagggtgtggattgaagaaaatgaacacatggaagacaaaaccccagtgacttcatggaacgaagtgccataccttggaaagagggaagatggctggtgtggtagtctgattggacatcgagctagatccacctgggccgagaacatatacaccccaattatgcagatcagagctctcattggccctgagcactatgtagattacatgccaactctaaacaggttcaaacccattgaaagctggagtgaaggtgtcttgtaa

SEQ ID NO: 10827 - DNA, 378 bp, unidentified
  misc_feature 1..378: note = Synthetic
  source 1..378: mol_type = other DNA
atctcgtttagtatctcagattgtataggcaacgcttctgagtcccatcctttgtacatgatggattcctcacctgaaaagacgaatcttgaacttttgtatgagcgagtctgtgagcagggaagggagtttgaggtcgtgttttatccaatgttgccacgattatatgaaatgatgcttccttctttggaggcgcgactgaattttcttagtgttggatatagacacgttgcttttgctagatacgttcacggggatgtcgattgcgtgcatagagaggtcatggctcaaaaaatggtacttcttacttcgatattgtcaaagctgttaaatgtaaatggaatattagaacatcaagaatatttaaatacggaatag

SEQ ID NO: 10828 - DNA, 75 bp, unidentified; identical to SEQ ID NO: 1498
  misc_feature 1..75: note = Synthetic
  source 1..75: mol_type = other DNA

SEQ ID NO: 10829 - DNA, 33 bp, unidentified; identical to SEQ ID NO: 1502
  source 1..33: mol_type = other DNA
  misc_feature 1..33: note = Synthetic

SEQ ID NO: 10830 - DNA, 81 bp, unidentified; identical to SEQ ID NO: 1503
  source 1..81: mol_type = other DNA
  misc_feature 1..81: note = Synthetic

SEQ ID NO: 10831 - DNA, 2220 bp, unidentified
  misc_feature 1..2220: note = Synthetic
  source 1..2220: mol_type = other DNA
atggatcctcgtccaatcagaacctggatgatgcataacacatctgaagttgaagcagactaccataagattctaactgccggattgtccgtccagcaaggcattgtgagacaaagaatcattcctgtttaccaaatctcaaacctggaggaagtatgtcaactcatcatacaggcattcgaggctggcgtcgacttccaggatagtgcagatagctttttgttaatgctatgtctgcatcatgcctatcaaggggattataaacaatttttggaaagtaatgcggtaaaataccttgaaggtcatggattccgttttgagatgaagaaaaaggaaggtgtcaagcgcctggaggaactactccctgctgcctcgagtggaaagaacatcaagagaacattggctgcaatgcccgaggaggaaacaacagaagcaaatgctggacaatttctttcatttgctagtctgtttctcccaaaattggttgtcggagaaaaggcctgtctggagaaggttcaacgacaaatccaagtgcacgcagaacaaggtctgattcaatacccgacatcttggcaatcggtgggacatatgatggtcatcttcagactaatgcgaaccaacttcctgattaagttcctcctaatacatcaaggaatgcatatggttgcagggcatgatgctaatgatgccgtcattgccaactctgtagctcaagctcgtttctccggattgttgatagtcaaaacagtgcttgatcatatcctccaaaaaacagagcacggagttcgcctgcatcccttggcgcgaacagccaaagtcaaaaatgaggtgagctcttttaaggccgctttagcctcactagcacaacatggagaatatgccccgtttgctcgtctgctgaatctatctggggttaataatcttgagcatgggcttttccctcaactttctgcaattgctttgggagtagcaactgcacatgggagcactctggctggagtcaatgtaggagagcaataccaacaactgcgagaagcagccactgaggccgaaaagcagttgcagaaatatgctgaatctcgtgaacttgatcacctaggtcttgatgatcaggaaaagaaaatcctaaaagacttccatcagaaaaagaatgagatcagcttccagcagacgacagccatggtcacactgcggaaagagagattggccaaattgaccgaagctattacttccacctctatcctcaaaacaggaaggcggtatgatgatgacaatgacataccctttccagggccaatcaatgataacgagaactctggtcagaacgatgacgatccaacagactcccaggataccacaatcccggatgtaataatcgatccaaacgatggtgggtataataattacagcgattatgcaaatgatgctgcaagtgctcctgatgacctagttctttttgaccttgaggacgaggatgatgctgataacccggctcaaaacacgccagaaaaaaatgatagaccagcaacaacaaagctgagaaatggacaggaccaggatggaaaccaaggcgaaactgcatccccacgggtagcccccaaccaatacagagacaagccaatgccacaagtacaggacagatccgaaaatcatgaccaaacccttcaaacacagtccagggttttgactcctatcagcgaggaagcagaccccagcgaccacaacgatggtgacaatgaaagcattcctcccctggaatcagacgacgagggtagcactgatactactgcagcagaaacaaagcctgccactgcacctcccgctcccgtctaccgaagtatctccgtagatgattctgtcccctcagagaacattcccgcacagtccaatcaaacgaacaatgaggacaatgtcaggaacaatgctcagtcggagcaatccattgcagaaatgtatcaacatatcttgaaaacacaaggaccttttgatgccatcctttactaccatatgatgaaagaagagcccatcattttcagcactagtgatgggaaggagtatacatatccagactctcttgaagatgagtatccaccctggctcagcgagaaggaagccatgaacgaagacaatagattcataaccatggatggtcagcagttttactggcctgtgatgaatcatagaaataaattcatggcaatcctccagcatcacaggtga

SEQ ID NO: 10832 - DNA, 732 bp, unidentified
  source 1..732: mol_type = other DNA
  misc_feature 1..732: note = Synthetic
attagttctacgagcatcgacacaattatcttgatcgtgtttctttccgggcaagccatggaccaatttataaaacaagatgagactggtgatttaattgagacaggaatgaacgttgcaaatcatttcctatccgcccccattcagggaaccaactcgttgagcaaggccacaatcatccctggcgttgcaccagtactcattggcaatccagagcaaaagaacattcagtaccccaccacatcacatcagggatccaagtcaaagggcagaggctcaggggccaggcccatcatagtctcatcctccgaaggaggcactggagggactcaggttcctgagccccttttcgcacaaacaggacaaggtggcattgtcaccaccgtttatcaggatccaactatccaaccaacaggttcatatcgaagtgtggaattggctaagataggaaaagagagaatgattaatcgatttgttgaaaaaccaagaacctcaacgccggtaacagaatttaagaggggggccgggagcggctgctcaaggccagacaatccaagaggagggcatagacgggaatggagcctcagctgggtccaaggagaggtccgggtctttgagtggtgcaaccccatatgctcacctatcactgccgcagcaagattccactcctgcaaatgtgggaattgccccgcaaagtgcgatcagtgcgaacgagattatggacctccttag

SEQ ID NO: 10833 - DNA, 732 bp, unidentified; identical to SEQ ID NO: 10832
  source 1..732: mol_type = other DNA
  misc_feature 1..732: note = Synthetic

SEQ ID NO: 10834 - DNA, 33 bp, unidentified; identical to SEQ ID NO: 1509
  source 1..33: mol_type = other DNA
  misc_feature 1..33: note = Synthetic

SEQ ID NO: 10835 - DNA, 60 bp, unidentified; identical to SEQ ID NO: 1510
  misc_feature 1..60: note = Synthetic
  source 1..60: mol_type = other DNA

SEQ ID NO: 10836 - DNA, 159 bp, unidentified
  source 1..159: mol_type = other DNA
  misc_feature 1..159: note = Synthetic
agggttagtagtcagcggcatcgtcggtgtgctttgtgggttagcagttataatcatctgcatgttcatttttgcttgctgctacagaaggcttcaccgacagaaatcagacccactgctgaacctctatgtttaatttttgattttccagagccatga

SEQ ID NO: 10837 - DNA, 291 bp, unidentified
  source 1..291: mol_type = other DNA
  misc_feature 1..291: note = Synthetic
atttggtgttttatgatgtcgcatcaacaggtgcaaatggatttgatcctgatgcagggtatatggacttctgtgttaaaaatgcagaattactcaaccttgctgcagttaggatcttcttcctcaatgccgcaaaggccaaggctgctctctcgcgtaagccagagaggaaggctaaccctaaatttggagagtggcaggtggaggttatcaataatcattttcctggaaacaggaacaacccaattggtaacaacgatcttaccatccacagattatctgggtatttag

SEQ ID NO: 10838 - DNA, 21 bp, unidentified
  source 1..21: mol_type = other DNA
  misc_feature 1..21: note = Synthetic
atgcagaacaacagcatgtaa

SEQ ID NO: 10839 - DNA, 201 bp, unidentified
  source 1..201: mol_type = other DNA
  misc_feature 1..201: note = Synthetic
atggttctgcgccagctgtcacgacaagcttcagtgaaagttggtaaaacctggactggaacaaaaaaaagagctcagaggatttttatttttattttagagcttttgctggaattttgtagaggtgaagacagtgtagacgggaaaaacaaaagtaccactgctttacctgctgtaaaagactctgtaaaagactcctag

SEQ ID NO: 10840 - DNA, 1188 bp, unidentified
  misc_feature 1..1188: note = Synthetic
  source 1..1188: mol_type = other DNA
atggccacttttacagatgcggagatagatgacatatttgagaccagtgggactgtcattgacagcataattacggcccagggcaaatcagctgagaccgtcggaagaagcgcgatcccgcagggcaagaccaaagctctaagcacagcatgggagaagcacgggagcgtccagccacacgccagtcaggacgcccctgaccaacaagacagaacagaaaaacagccatccacacctgagcaggcgactccacacaacaacccgccgatcacatccactgaaccgcctcccactcaggccgcaagcgagaccagcgacacacagctcaagaccggagcaagcaactcccttctgtccatgctcgacaaactgagcaataaatcgtccaatgctaagaagggcccatggtcgggtccccaagaagggcatcaccaacctccggcccaacaacacgggaaccagccgagctatggaagcaaccagggaagaccgcagcatcaggccaaggccgtccctggaaaccggggcacagacgagaacacagcatatcatggacaacggaaggagtcacaaccatcagctggtgcaacccctcatgcgccccagtcagggcagagccaagacaatactcctgtacctgtggatcgtgtccagctacctgccgactttgcgcaggcgatgatgtctatgatggaggcattatcacagaaggtaagtaaagttgatcatcagctggacctagtcttgaaacagacatcctccattcctatgatgcgatctgaaatccaacagctcaagacatctgttgcgatcatggaagctaacttaggcatgatgaaaattctggaccctggttgtgctaacgtttcatccttaagtgatctccgggcagtagcccgatcccacccagtcctagtttcaggccccggagacccatctccttacatgacacaagggggcgaaatgacgctcaataaactctcacaaccggtgcagcacccctctgaattgattaagtctgccactgcaagtgggcctgacatgggagtggagaaggacactgtccgcgcattaatcacctcgcgcccgatgcatccaagctcctcggctaagctcctgagcaagctagatgcagccaggtcaatcgaagagatcaggaagatcaaacgccttgcgctgaatggttga

SEQ ID NO: 10841 - DNA, 1158 bp, unidentified
  misc_feature 1..1158: note = Synthetic
  source 1..1158: mol_type = other DNA
ttgcccgttctctttcttagtatgaatccagtatgcctgcctgtaattgttgcgccctacctgttttggctggcggctattgccgcctcgtgtttcacggcctcagttagtaccgttgtcagcgccaccggcttggccctctcacttctactcttggcagcagtggccaactcatctgccgctgcacaaaggaaactgctgacaccggttacagttcttactgcggttgtcactttctttgcaatttgcctaacatggaggattgaagacccaccttttaattctattctgtttgcattgctggccgcagctggcggactacaaggcatttacgttctggtgatgcttgtgctcctgatactagcatacagaaggagatggcgccgtttgactgtttgtggcggcatgatgtttttggcatgtctagttgtcctcatcgtcgacgctgttttgcagctgagtcccctccttggagctgtaactgtggtttccatgacgctgctgctactggctttcgtcctctggctctcttcgccagggggcctaggtactcttggtgcagcccttttaacattggcagcagctctggcactgctagcgtcactgattttgggcacacttaacttgactacaatgttccttctcatgctcctatggacacttgtggttctcctgatttgctcttcgtgctcttcatgtccactgagcaaggttcttctggcacgactgttcctatatgctctagcactcttgttgctagcctccgcgctaaccgccggtggcagtattttgcaaacaaacttcaagagtttaagtagcactgaatttatacctcatttgttctgcatgttattactgattgtcgctggcatactctttattcttgctatcctgaccgaatggggaagtggaaatagaacatacggtcccgtttttatgtccctcggcggcctgctcaccatggtagccggcgctgtgtggctgacggtgatgactaacacgcttttgtctgcctggattcttacagcaggattcctgattttcctcattggctttgccctctttggggtcattagacgctgccgttactgctgctactactgccttacactggaaagtgaggagcgcccaccgaccccatatcgcaacactgtataa

SEQ ID NO: 10842 - DNA, 1185 bp, unidentified
  misc_feature 1..1185: note = Synthetic
  source 1..1185: mol_type = other DNA
ttgctctattcacccttacttttcttcttgcccgttctctttcttagtatgaatccagtatgcctgcctgtaattgttgcgccctacctcttttggctggcggctattgccgcctcgtgtttcacggcctcagttagtaccgttgtgaccgccaccggcttggccctctcacttctactcttggcagcagtggccagctcatatgccgctgcacaaaggaaactgctgacaccggtgacagtgcttactgcggttgtcactttctttgcaatttgcctaacatggaggattgaggacccaccttttaattctcttctgtttgcattgctggccgcagctggcggactacaaggcatttacgttctggtgatgcttgtgctcctgatactagcgtacagaaggagatggcgccgtttgactgtttgtggcggcatcatgtttttggcatgtgtacttgtcctcatcgtcgacgctgttttgcagctgagtcccctccttggagctgtaactgtggtttccatgacgctgctgctactggctttcgtcctctggctctcttcgccagggggcctaggtactcttggtgcagcccttttaacattggcagcagctctggcactgctagcgtcactgattttgggcacacttaacttgactacaatgttccttctcatgctcctatggacacttgtggttctcctgatttgctcttcgtgctcttcatgtccactgagcaagatccttctggcacgactgttcctatatgctctcgcactcttgttgctagcctccgcgctaatcgctggtggcagtattttgcaaacaaacttcaagagtttaagcagcactgaatttatacccaatttgttctgcatgttattactgattgtcgctggcatactcttcattcttgctatcctgaccgaatggggcagtggaaatagaacatacggtccagtttttatgtgcctcggtggcctgctcaccatggtagccggcgctgtgtggctgacggtgatgtctaacacgcttttgtctgcctggattcttacagcaggattcctgattttcctcattggctttgccctctttggggtcattagatgctgccgctactgctgctactactgccttacactggaaagtgaggagcgcccaccgaccccatatcgcaacactgtataa

SEQ ID NO: 10843 - DNA, 36 bp, unidentified; identical to SEQ ID NO: 1478
  source 1..36: mol_type = other DNA
  misc_feature 1..36: note = Synthetic

SEQ ID NO: 10844 - DNA, 30 bp, unidentified; identical to SEQ ID NO: 1528
  source 1..30: mol_type = other DNA
  misc_feature 1..30: note = Synthetic

SEQ ID NO: 10845 - DNA, 27 bp, unidentified
  source 1..27: mol_type = other DNA
  misc_feature 1..27: note = Synthetic
atgaaaaacgacgatttcacaacatag

SEQ ID NO: 10846 - DNA, 42 bp, unidentified; identical to SEQ ID NO: 1530
  misc_feature 1..42: note = Synthetic
  source 1..42: mol_type = other DNA

SEQ ID NO: 10847 - DNA, 45 bp, unidentified; identical to SEQ ID NO: 1531
  misc_feature 1..45: note = Synthetic
  source 1..45: mol_type = other DNA

SEQ ID NO: 10848 - DNA, 894 bp, unidentified
  misc_feature 1..894: note = Synthetic
  source 1..894: mol_type = other DNA
ctggttgtggaggtgcttgattcgtcgtccgagctccccaagtcccacctgcctcccctagtcacagaggccttttctccgccgcgccccaccgagtccgctccaaaaccgccttctgccatggtacgtccaaccgaggccgaggttaagaaatccctgagcaggcttccagcagcacgcaaaagagcaggtaaccgggcccacctggccacctaccgccggctcctcaagtactccaccctgcccgatctatggcggtttctaagtagccggccccagaaccctccccttggacaccacagattattctttgaggtgactctagggcacagaattgccgactgcgtaattctggtatcgggtgggcatcagcccgtatgttacgttgtagagctcaagacttgtctgagtcaccagctgatcccaaccaacaccgtgagaacgtcacagcgagctcaaggcctgtgccaactctccgactcgatccattacatcgctcactcggcccctccgggtaccgaggcgtggactatcacgcccctgctgatatttaagaatcagaaaacactaaagacagtatactctgaatcacccggggcgtttcccacgccggtgcacaccaccgaaggaaaattgtgcgcctttctcactgctagagaaaatgctgacatcagaaaggtcctatctaaggtacccaaaaaaccgaagatggacagaggcgggaagattctgggccccacacccggaaaacgtgctgtttattcacaagcccaccatggaagaaacaagaagggtcgcccttggactgcgcagccaactcgtgcgaaatcgagaacgaaagacaaaggcacacctgctttccctagagctggaccggcttgttcaggtccatga

SEQ ID NO: 10849 - DNA, 1185 bp, unidentified
  misc_feature 1..1185: note = Synthetic
  source 1..1185: mol_type = other DNA
ttgctctattcaccgttacttttcttcttgcccgttctctttcttagtatgaatccagtatgcctgcctgtaattgttgcgccctacctgttttggctggcggctattgccgcctcgtgtttcacggcctcagttagtaccgttgtgaccgccaccggcttggccctctcacttctactcttggcagcagtggccagctcatatgccgctgcacaaaggaaactgctgacaccggtgacagttcttactgcggttgtcactttctttgcaatttgcctaacatggaggattgaggacccaccttttaattctcttctgtttgcattgctggccgcagctggcggactacaaggcatttacgttctggtgatgcttgtgctcctgatactagcgtacagaaggagatggcgccgtttgactgtttgtggcggcatcatgtttttggcatgtgtacttgtccttatcgtcgacgctgttttgcagctgagtcccctccttggagctgtaactgtggtttccatgacgctgctgctactggctttcgtcctctggctctcttcgccagggggcctaggtactcttggtgcagcccttttaacgttggcagcagctctggcactgctagcgtcactgattttgggcacacttaacttgactacaatgttccttctcatgctcctatggacacttgtggttctcctgatttgctcttcgtgctcttcatgtccactgagcaagatccttctggcacgactgttcctatatgctctcgcactcttgttgctagcctccgcgctaatcgctggtggcagtattttgcaaacaaacttcaagagtttaagcagcactgaatttatacccaatttgttctgcatgttattactgattgtcgctggcatactcttcattcttgctatcctgaccgaatggggcagtggaaatagaacatacggtccagtttttatgtgcctcggtggcctgctcaccatggtagccggcgctgtgtggctgacggtgatgactaacacgcttttgtctgcctggattcttacagcaggattcctgattttcctcattggctttgccctctttggggtcattagatgctgccgctactgctgctactactgccttacactggaaagtgaggagcgcccaccgaccccatatcgcaacactgtataa

SEQ ID NO: 10850 - DNA, 36 bp, unidentified; identical to SEQ ID NO: 1225
  misc_feature 1..36: note = Synthetic
  source 1..36: mol_type = other DNA

SEQ ID NO: 10851 - DNA, 1269 bp, unidentified; identical to SEQ ID NO: 10630
  source 1..1269: mol_type = other DNA
  misc_feature 1..1269: note = Synthetic

SEQ ID NO: 10852 - DNA, 1128 bp, unidentified
  misc_feature 1..1128: note = Synthetic
  source 1..1128: mol_type = other DNA
atgcatccggtgctgcggcagatgcgacctcagacgcccaccaccaccgccgcggcggcagtaaacctgagcggaggcggtgacagggaggaggaggagctggctttagacctggaagagggagaggggctggcccggctgggagcgccgtccccagagagacaccctagggttcagctcgtgagggacgccaggcaggcttttgtgccgaagcagaacctgtttagggaccgcagcggtcaggaggcggaggagatgcgcgattgcaggtttcgggcgggtagagagctgagggcgggcttcgatcgggagcggctcctgagggcggaggatttcgagcccgacgagcgttctggggtgagcccggcccgcgctcacgtctcggcggccaacctggtgagcgcgtacgagcagacggtgaacgaggagcgcaacttccaaaagagctttaacaatcacgtgaggaccctgatcgcgagggaggaggtgaccatcgggctgatgcatctgtgggacttcgtggaggcctacgtgcagaacccggccagcaaacctctgacggcccagctgttcctgatcgtgcagcacagccgcgacaacgagacgttccgcgacgccatgttgaacatcgcggagcccgagggtcgctggctcttggatctgattaacatcctgcagagcatcgtggtgcaggagaggggcctcagcttagcggacaaggtggcggccattaactattcgatgcagagcctggggaagttctacgctcgcaagatctacaagagcccttacgtgcccatagacaaggaggtgaagatagacagcttttacatgcgcatggcgctgaaggtgctgacgctgagcgacgacctcggcgtgtaccgtaacgacaagatccacaaggcggtgagcgccagccgccggcgggagctgagcgacagggagctgatgcacagcctgcagagggcgctggcgggcgccggggacgaggagcgcgaggcttacttcgacatgggagccgatctgcagtggcgtcccagcgcgcgcgccttggaggcggcgggctaccccgacgaggaggatcgggacgatttggaggaggcaggcgagtacgaggacgaagcctga

SEQ ID NO: 10853 - DNA, 1392 bp, unidentified
  source 1..1392: mol_type = other DNA
  misc_feature 1..1392: note = Synthetic
ctgaaaacttatcccagaaaacgcactgtcgtaacaatggacacgcactggcgctgctatacgcgccagtgcgtgcactgtcttttcctcacgtcgctggtggtaatgggtatgggcttcggaacgctcttcgcatactcgaggtgggaatgcccgcaatgcaagcccgcgcctccgtgtccgacgccgccaatgctgccgtgtacgtctttcccagaagggcttccccccacggcagtcgctgccgacgtcgtcgacaaaacgggcagttcctgccagcatgtcagcgagatacagggcaacgatgttgtgttccacattccaggcgcctcgaggcagctcgaatacatttctgtgtctgcctcgggaaccgactcgagatcatgttccttgttctctcacacgcgcaaccacagcgctgtatgtgcacgaacatacctcgtggggtcaggattcggaattcgcgaggtgcgaatcgaagactcggggcaatatctggtaacgtcggcgggctcggaaggtgtcgcgtctgcgtgttttgcgctgacggtgctcccgacgccttctgagcccgagctgacagtgaccgcgctctcgcacgcgagcgactcatgcatgttgcgcctcgtatgcactgccgcgggccaggacgctcagcttcggatcactgggaactttcctccgagttctctgcgctccacgctgcacggaagaacctcggacaaaagttatctactactcaacgtgaaagtgcccacaacagaacgctaccggttccgttgcaccaacacgaacgagaacggcgcgatgagctctgcagaagttctcatcgacgggaactgtgctgcgttcgaggaagaactcccatacagcgaggacagcatacgctgtgcgtgttctcgaaagacctcacttgagctcttgcagtgttaccaacggtggcaaacacagcgcactgcctacatgtcgatgatcgcagaggagcgccgctactgcgaggaaaacattaagaacgctcgcaaagatccgcccgtgctcgcctccgtcgcggtgattgtctcggctacactcaacgtgctggcagccgtcgtgctggcgtggcgcagcctgtgccgggcactgcattcgctactggcaacggcaatgtgtcgccagtcgcctccaccgtattgcgcggcagagccgccaccgccttattgcgcagtcgcatccatgggaactagagctacaaactccggcaccgcgagcaatggcgccacgggcgctagcgccgcaagtgtcagattcactgtggccgacgggctgccagagctagctaccgtgcgtacggttgccgccccggaagctatcgtgcacggggacgagcatgctacgctagtggcttttgtctaa

SEQ ID NO: 10854 - DNA, 4188 bp, unidentified
  source 1..4188: mol_type = other DNA
  misc_feature 1..4188: note = Synthetic
aagccctcgagacctccccccatctccctcttaccttgtgtcatggcctcaaatgagggtgtggaaaacagacccttcccctatctgacggtggatgccgacctgctctcgaacctgcggcagtcagcggctgaggggttgtttcatagctttgacctgctggtgggcaaggatgccagagaggcgggcatcaagtttgaggtgctactcggggtctacacgaacgccatccaatatgttcgcttcctggagacggcactggccgtgtcctgtgtgaacacggaattcaaagacctgagtcgtatgacggatggcaagattcaatttcgaatctccgtccccaccattgctcacggggacggaaggagacccagcaagcagcggacattcattgtggtcaaaaattgccacaaacaccacattagtacggaaatggaactgtccatgctggatctggagatcctgcatagtatccccgagaccccggtcgagtacgcagagtacgtgggggctgtcaagaccgtggcctcggccctacagtttggggtcgatgccctggagaggggcctcattaacaccgtcctgagtgtgaagcttcgccatgcccctcccatgtttatcctgcagaccctggcggatcccaccttcactgagagggggttctccaagactgtcaagtctgacctcattgccatgttcaagaggcatctgctggagcactccttcttcctggaccgggccgagaacatgggctccgggttttctcagtacgtgcgaagccgtctctctgagatggtagcggccgtgtccggggagagcgtgctcaagggggtcagtacctacacgaccgccaaggggggagagccagtggggggggtgtttattgtcaccgacaacgttctgcgccagctcttgaccttcctgggtgaggaggccgacaaccagattatggggccctcgagctatgcttcttttgtggtacggggggagaacctggtcactgccgtgagctacgggcgcgtgatgcgtacgtttgagcatttcatggctaggatcgtggactcaccggaaaaagccggaagcaccaagtctgacctgccggctgtggccgcaggggtcgaggatcagccccgggtgccgatctcagccgccgtcatcaagctgggcaaccacgcggtggccgtggaaagcctgcaaaagatgtacaatgacactcagtccccataccccctcaacagaagaatgcagtacagctactatttcccagtgggcctgtttatgcccaatcccaagtacacgacctccgccgccatcaaaatgctggacaaccccacacagcagctaccggtggaggcatggatcgtaaacaagaataaccttctcctcgcgtttaacctacagaatgctctcaaggttctctgtcacccccgactccacacacccgcccataccctaaacagcctcaacgcggccccggccccgcgagacaggcgcgagacctactccctgcaacacaggaggcccaatcacatgaatgtgcttgttattgtggacgagttctatgataacaagtatgcagcccccgtgacagatatagctctcaagtgcgggctgcccaccgaagacttcctccacccgtccaattatgacctgctgcggctggagctgcaccccctttatgatatttacattggcagggatgccggggagagggccaggcacagggctgtgcaccggctaatggtgggtaacctgccgactcccctggccccagctgcattccaagaggcccgggggcagcagtttgagaccgccacatctctggcccacgtggtggatcaggccgttattgagactgtgcaggatactgcctatgacactgcctatccagccttcttctacgtagtcgaggctatgatccacgggtttgaggaaaagtttgtcatgaacgtgcctttggtgtccctgtgcatcaacacctactgggaacggtcagggaggcttgcctttgtgaacagcttttccatgatcaagttcatctgccgccacctgggaaataacgccatctccaaggaggcctattccatgtatagaaaaatctatggggaacttatagccctagagcaggccctgatgcgcctggccgggtcagatgttgtgggggatgagagcgtgggtcagtatgtctgcgctctcctggaccctaacctgctccccccggtggcctacacagacattttcacccatcttctcaccgttagtgaccgggccccccagattattatcggaaatgaggtttacgctgacaccctggccgcgccccagtttattgagagggttggaaacatggatgagatggctgcccaatttgtggccttgtacggctaccgggttaacggagaccacgaccacgatttccgtctgcacctaggcccttatgtagatgaggggcatgcggatgtgctggaaaagatcttttactacgttttcctcccaacctgcaccaatgcccacatgtgcggcctcggggtggactttcagcacgtggcccagaccctggcctacaacgggccagccttcagccaccattttaccagggacgaggacatcctcgacaatttggagaatgggacgctcagggatctgctggagatctccgacctccgccccaccgtgggcatgatcagggacctcagcgcctcattcatgacctgccccactttcacccgtgccgtgcgtgtgtcggtggacaatgacgttacgcagcagctggccccgaatcccgccgacaagcggacagagcagactgttttggtgaacgggctggtggcctttgccttctccgagaggacccgggccgtcacccagtgtctctttcacgccattcctttccatatgttttacggggacccgcgagtggctgccaccatgcaccaggatgttgccacctttgttatgcgcaatcctcagcagcgggccgtggaagccttcaaccggccagagcagctctttgcagagtaccgggagtggcaccgctcgcccatgggcaaatacgcggccgaatgtcttccttccctcgtttcaatcagtggaatgaccgccatgcacatcaagatgtcccccatggcctatattgcccaggccaagctcaagatccacccaggggtggccatgaccgtggtcaggaccgatgagatcctctctgaaaacatattgtttagctccagggcctcaacatccatgttcattgggaccccaaatgttagccgccgggaggccagggtggacgcggtaacctttgaggtgcatcacgagatggcctccatcgacaccgggcttagttatagctcgaccatgactccggccagggtggcggccatcactactgacatgggtatccacacccaagacttctttagcgtctttccggccgaggcctttggcaaccagcaagtcaatgactacatcaaggccaaggtgggcgctcagcgcaatgggacgctgcttcgggaccccaggacatacctggcaggtatgactaatgttaatggagctccaggactctgccacggccagcaggccacctgtgagattatcgtaacaccggtcacggcagacgtggcttattttcaaaagtccaactctccaaggggacgggccgcctgtgtggtctcctgtgaaaactacaatcaggaggttgccgaggggctcatctatgaccattctcgcccggatgccgcctatgaataccggagcactgtgaatccctgggcatctcagctgggttctctgggtgacatcatgtacaactcctcctatcgccagacggccgtcccgggcctctacagcccctgccgggcatttttcaacaaggaggagcttctgcgcaacaacaggggactctacaacatggtcaacgagtacagccagcgacttggagggcacccagccaccagcaacacagaggtgcagtttgtagtgattgctggcactgacgtgtttctggagcagccctgcagctttctgcaggaggcattccccgcactctcagcctcctcccgggcactcatcgatgagtttatgtctgtcaaacagacccacgcccccatccattacggacactatataattgaagaggtggcgccggtacgaagaatattaaagtttggaaataaggtggttttttga

SEQ ID NO: 10855 - DNA, 93 bp, unidentified; identical to SEQ ID NO: 1550
  source 1..93: mol_type = other DNA
  misc_feature 1..93: note = Synthetic

SEQ ID NO: 10856 - DNA, 10305 bp, unidentified
  misc_feature 1..10305: note = Synthetic
  source 1..10305: mol_type = other DNA
atgtctaaaaaaccaggaggacccgggaagccccgggtcgtcaatatgctaaaacgcggcataccccgcgtattcccactagtgggagtgaagagggtagtaatgaacttgctagatggcagagggccaatacggtttgtgttggctctcttagctttcttcaggtttacagcacttgccccgaccaaggccttgatgaggcgctggaagagcgtgaacaagacaacggccatgaaacatctgaccagttttaagaaagaattaggaacactgattgatgtggtgaacaaaaggggcaaaaaacaaaagaaaagaggtggcagtgaaacatccgtgcttatgctcattttcatgctgattggatttgccgctgccttaaagctttccaccttccagggcaagataatgatgactgtgaacgctacggacattgctgatgtgatcgccattccaaccccgaagggacccaatcaatgctggattcgagccattgacattggatttatgtgtgatgacaccatcacttatgaatgcccgaaattggaaagtggaaatgaccctgaagacattgactgctggtgtgacaaacaagctgtgtacgtaaactatggaaggtgcacacgtgctcgccattcaaagcgcagtcgtcgttccatcacagtgcagactcatggtgaaagcactttggtcaacaaaaaggatgcctggctggattccacgaaggccacgcgttatctcaccaaaacagagaactggattataagaaatcctggttacgcgctggtggccgttgtccttggctggatgctgggcagcaacactggacaaaaagttatttttacagtgcttttgctcctcgttgctcctgcctacagttttaactgtctgggaatgagcagccgtgatttcattgaaggtgcttcaggagctacatgggtcgatttggtgctggagggcgacagttgcatcaccatcatggccgctgacaaacccacccttgacataagaatgatgaacattgaagccaccaatcttgcactggttagaaattactgctatgcagctactgtgtcagacgtttctacggtgtcaaactgtcccactacaggggagtcacacaacacgaagcgggcagatcacaattacttgtgcaaacgaggtgtgaccgacagaggctggggtaatggatgtggcttgtttggtaaggggagcattgacacatgcgcaaagttcacctgctctaactcagctgcggggagacttatcttacctgaggacatcaaatatgaagttggggtttttgttcacggatcaacggactcaaccagtcatggaaattattctacccaaattggagctaaccaagcagtcaggttcaccatttcaccaaacgctccagccatcacagcaaagatgggcgactatggagaagtcactgtggagtgtgaaccgaggagtggactgaatacagaggcctactacgtcatgaccattggaacgaaacactttctagtgcatcgtgagtggttcaatgatttgctcttgccatggacatcacctgcaagcacggaatggaggaatagagaaattctcgtggagtttgaagagccacatgccaccaaacaatcagtggttgccttgggttcacaggaaggagctttgcaccaagctctggctggagccataccagtcgagttttcgagcagcacacttaaactcacttcaggacaccttaagtgtcgcgtgaaaatggagaaattgaaactgaaaggaaccacttatgggatgtgcacagaaaaatttactttctcaaagaatccagccgacaccggtcatggcacggtagtactagaactgcagtacaccgggagtgatggaccatgcaaaattccaatatcctctgtagcaagtctcaatgacatgacgcctgtcggaagaatggtgacagctaatccatatgtagcttcatcaactgccaatgctaaagttctggtggagattgaaccacccttcggagactcatacattgtggtaggcaggggagacaagcagatcaatcaccactggcataaggagggtagttcaattggcaaagccttcagcacaaccttgaagggagcacagagattggcagctcttggagacacggcgtgggactttggatcagtaggcggagtcttcaattcaatcggaaaggcagtacaccaagtctttggaggagcatttagaaccctctttggaggaatgtcatggatcagcccaggtctgctgggggcgttactgctatggatgggggtcaatgctagagataaatcaattgctttggctttcctagcaacaggaggcgttttgttgttcctggccacaaatgtccatgctgacactggttgcgcgattgacatcaccaggagggagctcaagtgtggcagcggaatattcatacacaatgatgttgaagcctggattgaccgctacaagtacctgccagagacccccaagcaactggctaaagtggttgaaaacgctcacaagagcggaatatgtgggatacggtcagtgaatagatttgaacatcaaatgtgggaatctgtgcgtgatgaactcaatgctttactcaaggaaaatgccattgatttgagtgttgtcgtggaaaaacagaaaggcatgtacagagcagcacccaataggctgagactcactgtggaagaacttgatataggctggaaggcctggggtaagagtttgctttttgcggcggaattggccaattcaacgtttgtggttgatggacctgaaacagctgaatgtcctaattcaaagagggcatggaacagctttgaaattgaagactttggatttggcataacatccaccaggggttggcttaaactcagagaggaaaatacctcggagtgtgacagcaccattattgggaccgcagttaagggcaaccatgcagtacacagtgacctttcctactggattgagagtggactcaatgggacatggaaacttgagagagccatttttggagaggtaaaatcctgcacctggcccgagacacacacactatggggtgatgcagtggaagaaacggagttgataatcccagtgactctcgccggcccacgcagcaagcacaacagaagagaaggatacaaggttcaagttcaaggtccgtgggatgaagaagacataaaattggactttgactactgcccaggaacaaccgtcacagtgagtgaacattgtggaaaacgaggtccctcagtacgcaccacaactgacagcgggaaactcgtcacggactggtgttgtaggagctgcacgcttcctcctttaagatttaccacggccagtggatgttggtatggaatggagataagacctatgaagcatgatgagtccactctagttaaatcaagggttcaagcatttaatggagatatgattgatccttttcagttaggccttctggtgatgtttctggccacccaggaggtcttgaggaagaggtggacggccagacttactctgccagcagcggttggggctctgctagtcctcctccttgggggcattacctacactgatctagtgcggtatctcatattggtgggttcagcatttgcagaatcaaacaacggaggtgatgtcattcatttggcactcattgctgtattcaaggtacagcccgcttttcttgttgccagcttgacacgcagtagatggactaatcaagagaatctcgtcctggtcttgggagcggccttctttcagatggcagcttcagacctggagttgacaattccaggtttgttgaactcagctgctacagcttggatggtgttgcgagcaatggcttttccgtcaacctcagcaatagccatgcccatgctagcaatgcttgctccgggaatgagaatgcttcaccttgacacatataggatagtgctcttgctgattggcatttgcagcttgctgaatgagagaaggaggtctgtggagaaaaagaaaggagctgttttaattggtctagccctgacttcgactggatatttttcaccaacaatcatggcagcaggccttatgatatgcaaccctaacaagaagagaggatggcccgccacagaggtgttaacagcagtgggactgatgttcgccattgttggaggactcgctgagctagacattgattctatgtcagtcccttttaccatagctggcctcatgttagtgtcctatgttatctcgggaaaagccacagacatgtggcttgaaagagcagcagatgtgtcatgggaagcgggggcagcaataacaggtaccagcgaaagactggatgtccaattggacgatgatggagactttcatctgctcaatgaccctggagttccatggaaaatctgggttttaagaatgacatgcttaagcgtagctgccatcactccaagggccattttgccatccgcgtttgggtattggctgactctgaagtacacaaaacgagggggtgttttttgggatacgccttccccaaaagtgtatcccaagggggatacgacgccaggagtctaccgaataatggccagaggtatcctgggaaggtaccaagctggggtaggagtcatgcatgagggtgtgttccacacgctgtggcacacaactagaggagctgccataatgagtggtgaaggaagattgacaccatactggggcaatgtgaaagaggacagagtgacctatggtggcccatggaaattagatcaaaaatggaatggagtggatgacgtccagatgatagtggtggaaccaggaaagccagcaataaacgtgcagaccaagcccgggatttttaagacagcacatggagaaattggagccgtgagcttggattacccgattggaacttcaggatccccaatagtcaatagcaatggagaaatcattggcctttatggaaatggagtgatactaggtaatggggcctacgtcagtgctattgttcaaggagaaagagtagaggaaccagtgccagaggcctacaatcctgagatgctaaagaaaaggcaactaaccgtgctggacctgcacccaggtgctgggaaaacacgacgcatactcccccaaataattaaagatgccatccaaaaaagactacgaacagctgttcttgcaccaacgagggtggttgcagcagaaatggcagaagctttgaggggccttccagttaggtatttgactccagctgtacaaagagaacacagtggaaacgagatagtggatgtgatgtgccatgcgacactaacacatcgattgatgtcgccgctaagagtcccgaattacaacctgtttgtcatggatgaagcccatttcacagatccagccagtatagcagctcgtggatatattgccacccgtgttgaagctggagaggccgcggccatctttatgacggccacccctccaggcacatctgacccattcccggacaccaattcaccagtccatgatgtatccagtgaaatcccagacagagcatggagcagtggatttgagtggataaccgactatgctggaaagaccgtctggttcgtggcaagcgtaaaaatgagcaatgagatcgcgcagtgcttgcaacgagcagggaagcgagttatccaattgaacaggaagtcctatgatacggaatacccgaaatgcaaaaatggtgattgggactttgtgataacaactgacatctcggaaatgggagcaaattttggggcaagcagagtgattgattgtcgcaagagtgtcaagccaacgatcttggacgaaggagagggaagagtcattctcagtgtgccgtcagccatcactagtgccagtgctgcccaacggagaggtagagtgggcaggaatccaagtcaaataggagatgagtaccactatggaggcggaaccagtgaggatgacaccatgctggcgcactggactgaagcaaaaattcttttggacaacatccacctcccaaatggcctagtagctcagctgtacggtcccgaaagagataaaacttacaccatggatggagagtaccgactcagaggcgaagaacgcaagacattcctcgagctcataaaaacagccgatttgccggtgtggcttgcttacaaggtagcgtcaaatggcatccagtacaatgacaggaaatggtgttttgatggaccccgatccaacattatcctcgaagacaacaacgaagtggaaatcataacaagaataggagaaagaaaagttttgaagccacgatggttagatgcacgcgtgtattcagaccaccagtccttaaaatggttcaaggactttgcagctgggaagcggtcggcgatcggattttttgaagtgctaggccggatgccagagcattttgcagggaaaacacgtgaagctctggacaccatgtacctggtggcaacatcagaaaaaggaggcaaagcgcatagaatggctcttgaagaactacctgatgctctggaaaccataacactcattgcagcgttgggagtcatgaccgcagggttttttctcctcatgatgcaaagaaaaggaattggtaaactgggactcggagcactcgtcttggtagtggccacttttttcctttggatgtcagacgtttctggcaccaaaatagctggtgtgttgctgcttgcgctgcttatgatggttgtgttaatccctgaacctgagaaacagcgttcccagacggacaaccaactggcagtattcttgatatgtgtgctgcttgttgttgggttggtggctgcaaatgaatatgggatgttggaaaggacaaaaactgacataagaaacctatttgggaagtcactaattgaggaaaacgaggtccatatccctccctttgattttttcaccctggatttgaagcctgctactgcttgggctttgtacggaggaagcacagttgtgttgactccactgataaaacatctggtgacatcacagtatgttaccacctcattggcatcaataaatgcccaagcagggagcttgtttacattgcctaaaggaattcctttcactgattttgacttgtctgtagcactggtgtttcttggttgctggggacaagtgacgctcaccaccttgataatggcaacaatactggtaaccctccactacggatatcttttacctggttggcaagcagaggctttgagggctgcacagaagcgcacagccgctggtatcatgaaaaacgcagttgttgatggcatagtcgcgacagatgttccagagctggaaagaacgaccccacagatgcagaaaaggctaggccagattctactcgtcttggccagcgtggcagcagtatgcgtgaaccccagaataactaccatccgtgaagctggaatactctgtaccgcagcagctctcaccctgtgggacaacaacgccagcgcggcttggaattccaccacggctactgggctgtgccatgttatgcgtggaagctggatagcgggagcttcaatagcctggactctcataaaaaatgcagaaaaaccagcgttcaaaagaggaagagcaggaggaagaactctcggagagcaatggaaagaaaagctaaatgccatgggtaaagaagaattcttcagctatcggaaagaagccatcttggaggtggatagaaccgaagccagaagggccagaagagagggaaacaaggtaggaggccacccagtgtcacgagggacagcgaaactcagatggttggttgaaagacgctttgtccagcccataggaaaagtagtggatctggggtgtggcagagggggctggtcatactacgcagcaaccatgaagaacgtccaggaagtgagaggatacacgaaaggtgggccaggccatgaagaacccatgttgatgcagagctatgggtggaacatcgttactatgaaaagtggcgttgatgttttctacaaaccatctgaaatcagtgacacccttttgtgtgacataggagagtcatcacctagtgctgaaatagaagaacaacggaccctgcggattttggaaatggtgtctgactggctaagccgtggtccaaaggaattttgcataaagatactctgcccgtacatgcccaaggtgattgaaaaactggagagcctgcaacgcaggtttggaggtggattggtacgcgtccccctttctcgtaactccaaccatgagatgtactgggtcagtggagcctcggggaacatcgtgcacgcggtgaacatgaccagtcaggtgctcattggaagaatggacaagaagatttggaaaggcccaaaatatgaggaagatgtcaacctgggcagcggcacgagagcagtaggaaaaggtgtgcagcacacggattacaagaggatcaaatccagaatagaaaaactgaaggaggagtatgcagccacgtggcacacggatgataaccacccgtatagaacttggacttatcatgggagttatgaggtgaagccatcggggtcagccagcacgttggtaaatggagtggtgcggcttttgagcaaaccatgggacgctatcactggagtcaccaccatggccatgactgataccacaccatttggccagcagcgagtgttcaaagagaaggttgacacaaaagctcctgagcctccccaaggagtgaagactgtgatggatgagaccaccaactggctgtgggcttatttggctaggaacaaaaaagccagactgtgcaccagagaggagtttgtgaaaaaagtgaacagccacgccgccttgggagccatgtttgaagagcaaaaccagtggaagaacgcacgagaagctgtggaagacccaaagttctgggaaatggtggatgaggaaagggaatgccacctccgaggggaatgccgaacctgcatatataacatgatgggcaaacgtgagaaaaaacccggagaatttggaaaggccaagggaagcagagccatctggttcatgtggctgggagccagattcttggagtttgaagctctaggattcctcaatgaagaccattggatgagtagagagaattcaggaggaggagttgaaggagctggtattcagaagctgggatacatcttgagagatgtggctcaaaagcctggagggaaaatttatgccgatgacacagctggttgggacacccgcatcacacaagctgaccttgagaacgaagctaaagttctggagttgatggaaggtgagcagcggactttggcaagagcaatcattgagctgacatacaggcacaaagtggtcaaggtcatgcgcccggcagctggaggaaagactgtgatggatgtcatttcacgcgaagatcaaagaggaagtggacaagtagtgacctatgctttaaacacattcaccaacatcgctgtgcaattggttagactcatggaagccgaagcggtcataggtccagatgacattgaaagcattgaaaggaaaaagaaatttgcagtccgcacatggctttttgagaacgcagaagaaagagtgcagcgcatggctgttagtggtgatgactgtgttgtcaaaccattggatgatagattttccactgctttgcatttcttgaacgccatgtcaaaggtgagaaaagacatccaggagtggaaaccctcacaaggctggtatgactggcaacaagtccccttctgttcgaatcatttccaggaagtcatcatgaaagatgggaggaccttggtggtgccctgcagaggacaggacgagctgattggaagagcacgaatatcccctggctcaggatggaacgtcagggacacggcatgcttagcaaaagcatatgcacagatgtggcttgtgttgtacttccatcgacgggatctgcgcctgatggccaacgccatatgctcttcagtcccagttgactgggttccaaccggcaggactacttggtccatccatggaaaaggagaatggatgacaacagaagacatgctaagcgtgtggaaccgtgtgtggattttggaaaatgaatggatggaggacaagaccacggtttccgactggacggaagtcccatatgtagggaagagagaagacatctggtgcggaagtctcatagggaccaggaccagggcaacatgggctgagaacatctacgccgccatcaaccaagtgaggtcagtcatagggaaagaaaaatatgtagactacgtgcagtcgctgaggaggtatgaagaaactcatgtgagtgaagatagggtcttgtaa

SEQ ID NO: 10857 - DNA, 3594 bp, unidentified
  misc_feature 1..3594: note = Synthetic
  source 1..3594: mol_type = other DNA
atgtctaaaaaaccaggaggacccgggaagccccgggtcgtcaatatgctaaaacgcggcataccccgcgtattcccactagtgggagtgaagagggtagtaatgaacttgctagatggcagagggccaatacggtttgtgttggctctcttagctttcttcaggtttacagcacttgccccgaccaaggccttgatgaggcgctggaagagcgtgaacaagacaacggccatgaaacatctgaccagttttaagaaagaattaggaacactgattgatgtggtgaacaaaaggggcaaaaaacaaaagaaaagaggtggcagtgaaacatccgtgcttatgctcattttcatgctgattggatttgccgctgccttaaagctttccaccttccagggcaagataatgatgactgtgaacgctacggacattgctgatgtgatcgccattccaaccccgaagggacccaatcaatgctggattcgagccattgacattggatttatgtgtgatgacaccatcacttatgaatgcccgaaattggaaagtggaaatgaccctgaagacattgactgctggtgtgacaaacaagctgtgtacgtaaactatggaaggtgcacacgtgctcgccattcaaagcgcagtcgtcgttccatcacagtgcagactcatggtgaaagcactttggtcaacaaaaaggatgcctggctggattccacgaaggccacgcgttatctcaccaaaacagagaactggattataagaaatcctggttacgcgctggtggccgttgtccttggctggatgctgggcagcaacactggacaaaaagttatttttacagtgcttttgctcctcgttgctcctgcctacagttttaactgtctgggaatgagcagccgtgatttcattgaaggtgcttcaggagctacatgggtcgatttggtgctggagggcgacagttgcatcaccatcatggccgctgacaaacccacccttgacataagaatgatgaacattgaagccaccaatcttgcactggttagaaattactgctatgcagctactgtgtcagacgtttctacggtgtcaaactgtcccactacaggggagtcacacaacacgaagcgggcagatcacaattacttgtgcaaacgaggtgtgaccgacagaggctggggtaatggatgtggcttgtttggtaaggggagcattgacacatgcgcaaagttcacctgctctaactcagctgcggggagacttatcttacctgaggacatcaaatatgaagttggggtttttgttcacggatcaacggactcaaccagtcatggaaattattctacccaaattggagctaaccaagcagtcaggttcaccatttcaccaaacgctccagccatcacagcaaagatgggcgactatggagaagtcactgtggagtgtgaaccgaggagtggactgaatacagaggcctactacgtcatgaccattggaacgaaacactttctagtgcatcgtgagtggttcaatgatttgctcttgccatggacatcacctgcaagcacggaatggaggaatagagaaattctcgtggagtttgaagagccacatgccaccaaacaatcagtggttgccttgggttcacaggaaggagctttgcaccaagctctggctggagccataccagtcgagttttcgagcagcacacttaaactcacttcaggacaccttaagtgtcgcgtgaaaatggagaaattgaaactgaaaggaaccacttatgggatgtgcacagaaaaatttactttctcaaagaatccagccgacaccggtcatggcacggtagtactagaactgcagtacaccgggagtgatggaccatgcaaaattccaatatcctctgtagcaagtctcaatgacatgacgcctgtcggaagaatggtgacagctaatccatatgtagcttcatcaactgccaatgctaaagttctggtggagattgaaccacccttcggagactcatacattgtggtaggcaggggagacaagcagatcaatcaccactggcataaggagggtagttcaattggcaaagccttcagcacaaccttgaagggagcacagagattggcagctcttggagacacggcgtgggactttggatcagtaggcggagtcttcaattcaatcggaaaggcagtacaccaagtctttggaggagcatttagaaccctctttggaggaatgtcatggatcagcccaggtctgctgggggcgttactgctatggatgggggtcaatgctagagataaatcaattgctttggctttcctagcaacaggaggcgttttgttgttcctggccacaaatgtccatgctgacactggttgcgcgattgacatcaccaggagggagctcaagtgtggcagcggaatattcatacacaatgatgttgaagcctggattgaccgctacaagtacctgccagagacccccaagcaactggctaaagtggttgaaaacgctcacaagagcggaatatgtgggatacggtcagtgaatagatttgaacatcaaatgtgggaatctgtgcgtgatgaactcaatgctttactcaaggaaaatgccattgatttgagtgttgtcgtggaaaaacagaaaggcatgtacagagcagcacccaataggctgagactcactgtggaagaacttgatataggctggaaggcctggggtaagagtttgctttttgcggcggaattggccaattcaacgtttgtggttgatggacctgaaacagctgaatgtcctaattcaaagagggcatggaacagctttgaaattgaagactttggatttggcataacatccaccaggggttggcttaaactcagagaggaaaatacctcggagtgtgacagcaccattattgggaccgcagttaagggcaaccatgcagtacacagtgacctttcctactggattgagagtggactcaatgggacatggaaacttgagagagccatttttggagaggtaaaatcctgcacctggcccgagacacacacactatggggtgatgcagtggaagaaacggagttgataatcccagtgactctcgccggcccacgcagcaagcacaacagaagagaaggatacaaggttcaagttcaaggtccgtgggatgaagaagacataaaattggactttgactactgcccaggaacaaccgtcacagtgagtgaacattgtggaaaacgaggtccctcagtacgcaccacaactgacagcgggaaactcgtcacggactggtgttgtaggagctgcacgcttcctcctttaagatttaccacggccagtggatgttggtatggaatggagataagacctatgaagcatgatgagtccactctagttaaatcaagggttcaagcatttaatggagatatgattgatcctttttcagttaggccttctggtgatgtttctggccacccaggaggtcttgaggaagaggtggacggccagacttactctgccagcagcggttggggctctgctagtcctcctccttgggggcattacctacactga

SEQ ID NO: 10858 - DNA, 108 bp, unidentified
  source 1..108: mol_type = other DNA
  misc_feature 1..108: note = Synthetic
ctgcttagtactatgcagaaacccccgagcaaattaaaattgatgaagattaagaaaaagagggattttctcaggaaaaatcttttttcttaccttcatctcatttaa

SEQ ID NO: 10859 - DNA, 111 bp, unidentified
  source 1..111: mol_type = other DNA
  misc_feature 1..111: note = Synthetic
atccattcattggtcatgagcataccctgtacgatatatcacccggacatgtatacgcaaaaagtaaacgtatggtcgagcaactggtcacgaaagccaataattctgtaa

SEQ ID NO: 10860 - DNA, 1311 bp, unidentified
  source 1..1311: mol_type = other DNA
  misc_feature 1..1311: note = Synthetic
atggcgcaaagccgtataactagagaggacatccaaaagttggaggatgcaaaaaagcagatagaaatccagctatcatcctcaatccaaaaattggccactgagacagaacaatttgggcctgaccctgacccgatccagctacaggctgtgcgacaaaggtctagtgttattgaaggttacaaggaaaaactgagagatctagaaggtcagctaagtattgcatatgcaacttttgctgatgaggaggaagagaggaaaaagaagagagaagtacccggtgttgaagaaggtgactatctttcccaaaaatcatctctgagatatggtaatgtaattgacctcaaccctctcaacctggaggaaccagccgggcaaacagcaaattggaatcgtatatttgagtacattgctaccattactcaagtacttcttctcaaaggtctttatatcctgacaacccgtggaagacagacaagcaaggataacaagggtacccggatgaagctcaaagatgactcttgcatggagacaatcaatgggattcaaagacataagtttttgtacatctcactccctactagtcagtcatcaatccaggatgatgagttgacaccaggaaggtttaggacaattgtttctgggctcttgcctaatgaaatcaaaagcaagaaactcatgagtcctgtcatgggtgtgattgggtttttaaacctcacagaggtctggatggatatcattgatagaatcatgacagaccaatgtgactatatgactcaagataaatctaatccaactgcaagcacaaacagggcttactttaaggagaggcagaatacaattaatagcctcaatcttcctgatctaaaacagttaagaacagatgcagaaaggaaacactacctaccagatgacatagaaactgagtgtgtgccttggatttttgcaaatgcaccagacagatgtcccccgacagtcttacttgttgctgggatacctgagcttggtgcattctttgcattaatgcaagacataaggagtgggattttggcatctaacttgagaggaacagctgaggaaaagatagcaaggaagtcctccttttaccaatcatatataagaaggacacagtcaatgggcctaaattgtgaccaaaagataatccatatttatatggattatcttgggacattctgtgttgatcacttcaatctaggggatgatatggaccctgatcttaagatcaaggctcaggcccttctagataagaaagtgaaagagatttcaacacaagaacctataaaattatag

SEQ ID NO: 10861 - DNA, 144 bp, unidentified
  source 1..144: mol_type = other DNA
  misc_feature 1..144: note = Synthetic
ctgaaaacgaaagacacgaaaacttttacgctgagattgatgactttgccccctcagttcttaccccaaccggcagtgactcaggggcaggtgaggaagatgatgacggactctaccaggtgcccacccactggccccccttga

SEQ ID NO: 10862 - DNA, 144 bp, unidentified; identical to SEQ ID NO: 10861
  misc_feature 1..144: note = Synthetic
  source 1..144: mol_type = other DNA

SEQ ID NO: 10863 - DNA, 1857 bp, unidentified
  source 1..1857: mol_type = other DNA
  misc_feature 1..1857: note = Synthetic
gtggagagggcacacagaccccgggtgggatccatggctggatttccaggaaaggaggccggcccgcccggcggctggcgaaaatgtcaggaggatgagtcccctgaaaacgaaagacacgaaaacttttacgctgagattgatgactttgccccctcagttcttaccccaaccggtagtgactcaggggcaggtgaggaagatgacgacggcctctaccaggtgcccacccactggccccccttgatggctccgaccggactgtctggggagagggtgccgtgccggacccaggctgccgtgacatctaatactggaaactctccgggtagccggcacacatcgtgcccctttaccctgcccaggggagcccagccaccagcacccgcacaccaaaagcctactgcccctaccccgaagccccgtagccgggagtgtggccccagcaagacgccagaccccttctcctggttccgcaaaacttcgtgcacagaaggaggtgcggactccacgagccggagcttcatgtaccagaaaggctttgaggagggcctggccggccttgggctcgatgacaaatctgactgtgagtctgaggatgagtctaatttccgcaggccctcttctcattccgcgttaaaacaaaagaatggtggcaagggtaagccttctggtctcttcgaacacctggccgcccatgggcgcgagtttagtaagttatccaagcatgctgcccagctgaagcggctaagtgggagtgtgatgaatgttctgaatctggatgatgcccaagacacccgccaggccaaggctcagaggaaggagagcatgcgggttccaattgtgacccacctaacaaatcatgtaccagtaatcaaacctgcctgttccctatttttggaaggtgcccctggtgtgggaaagactactatgctgaatcatttgaaggctgtctttggggacctgaccattgtagtccctgaaccgatgcggtactggactcatgtgtatgaaaatgccattaaggccatgcacaagaatgtgactcgggcgaggcatggaagggaagacacgtcggctgaggttttagcatgccagatgaaatttaccacccctttcagagtcttggcctctaggaagcggagcttgctggttaccgagtctggtgccaggtcagtcgcgcccctggattgttggattttgcatgatcgccatttgctgtcggcctccgtggttttccctctaatgctgctccggagccagcttctctcctatagtgactttattcaagttttggccacgtttaccgcagacccgggggacaccatagtctggatgaagttaaacgtggaggagaacatgcgccgcctgaagaagcgagggaggaaacatgagtcaggactggatgctggctacctgaagagtgtcaacgatgcatatcacgccgtttactgtgcctggctcctaacacagtattttgcccccgaggacattgtgaaggtatgtgccggtctaacaacaatcacgacagtatgtcatcaaagccacacccccataattcgaagtggtgtggccgagaagctgtataagaacagcatctttagtgtacttaaggaagtcatacagcctttccgagccgacgcggtgttgttggaagtttgtcttgcgttcacccgaacgctagcctaccttcagtttgtgcttgtggacctctcagagtttcaggacgatttacctggatgctggacggagatttacatgcaggcattgaagaatccggcaatacgatctcagtttttcgattgggctggtctgagcaaggtgatctctgattttgagaggggaaatcgggactag

SEQ ID NO: 10864 - DNA, 144 bp, unidentified
  source 1..144: mol_type = other DNA
  misc_feature 1..144: note = Synthetic
ctgaaaacgaaagacacgaaaacttttacgctgagattgatgactttgccccctcagttcttaccccaaccggtagtgactcaggggcaggtgaggaagatgacgacggcctctaccaggtgcccacccactggccccccttga

SEQ ID NO: 10865 - DNA, 90 bp, unidentified; identical to SEQ ID NO: 1563
  misc_feature 1..90: note = Synthetic
  source 1..90: mol_type = other DNA

SEQ ID NO: 10866 - DNA, 120 bp, unidentified; identical to SEQ ID NO: 1564
  source 1..120: mol_type = other DNA
  misc_feature 1..120: note = Synthetic

SEQ ID NO: 10867 - DNA, 1515 bp, unidentified
  misc_feature 1..1515: note = Synthetic
  source 1..1515: mol_type = other DNA
atgagacgtgcggtgggagtgccgccggtgatggcgtacgccgagggtcctcctccttcttacgaaagcgtgatggaaacagcggatttgccggcaacgctgcaggcgctccacgtccctccccgttacctggggcctacggaagggcggaacagcatacgttactcggagctggcgcctctatacgacaccacccgggtttacctggtggacaacaagtcggcggacattgcctccctgaactaccagaacgaccatagtaactttcaaaccacggtggtacaaaataatgactttaccccgacagaggccggtacccagaccatcaattttgacgatcgctccaggtggggcggcgacctgaaaaccattttgcgcaccaatatgcccaacatcaatgagtttatgtctaccaacaagtttcgggcgcgggtgatggtagaaaaagtgaaccggaaaaccaacgctcctcgttacgagtggttcgagttcactttgccagagggcaactattcggaaactatgactatagaccttatgaataacgcgatcgtagacaactacttagcagtaggacgtcagaacggcgtgctggaaagcgacattggggtgaagtttgacacgcgcaacttccggttgggttgggatcccgtaaccaagttggtgatgcccggcgtgtacaccaacgaggcctttcacccagacattgttttgctacctggttgcggcgtggatttcacgcaaagtcgtctgaacaacttgctaggaatacgcaagcgaatgccctttcaaaaaggtttccaaatcatgtatgaggatttggagggcggcaacattcctgctctattagatgtggaaaagtacgaagctagcataaaagaagcacaggagatccgtggagccgacttcaagcccaatcctcaagacttggaaatcgtgcccgtggaaaaagacagcaaggaaagaagttacaatctcctagagggagataaaaataacactgcctaccgcagctggtttttggcctacaactacggagatgcagagaaaggagtaaagtcttggaccttgttaacaaccacggatgtgacctgtgggtcgcagcaggtgtactggtcccttcccgacatgatgcaagatccagtaacgtttcgaccgtccacgcaagtcagcaactaccctgtagtgggggtggaattactgccagtacatgccaagagtttttacaacgagcaggccgtgtattctcagcttattcgccagtccaccgcgcttacgcacatcttcaatcgttttcctgagaatcagatactagtgcgtccgcccgctccgaccattaccaccgtcagtgaaaacgttcccgccctcacagatcacggaaccctgccgctgcgcagcagtatcagtggagttcagcgcgtgaccatcactgacgcccgccgtcggacctgcccctacgtgcacaaagctctgggcatagttgctcccaaagtgctgtctagccgcacgttttaa

SEQ ID NO: 10868 - DNA, 147 bp, unidentified
  misc_feature 1..147: note = Synthetic
  source 1..147: mol_type = other DNA
atcgattccatgatgttcatacattgtgttgtttttccagatttgtccaatccttcaaaaacgattaatgccccacgagacattttcgtaaacctaacatattttttacaatttatgcgtataataaaactgaaaataaatatatag

SEQ ID NO: 10869 - DNA, 2880 bp, unidentified
  source 1..2880: mol_type = other DNA
  misc_feature 1..2880: note = Synthetic
agggagagcttaacttgtatgtgccttaccgccagagaacgcgcgaagatggccaccccctcgatgatgccgcagtgggcgtacatgcacatcgccgggcaggacgcctcggagtacctgagcccgggtctggtgcagtttgcccgcgccaccgacacgtacttcagcctgggcaacaagtttaggaaccccacggtggccccgacccacgatgtgaccacggaccggtcccagcgtctgacgctgcgcttcgtgcccgtggatcgcgaggacaccacgtactcgtacaaggcgcgcttcactctggccgtgggcgacaaccgggtgctagacatggccagcacttactttgacatccgcggcgtcctggaccgcggtcccagcttcaaaccctactcgggcacagcttacaacagtctggcccccaagggtgcccccaactccagccagtggcttgcaaaagacaccaatgctggcgatcaagcattaaaaacccacacacatggcgtagctgctatggggggaacagatatcacagcaaagggtttgcaaattggtgttgacacgactgaaaacaagaatgagcctatttatgcaaatgaaatataccagccagaacctcaggtaggagaggaaaacttgcaagatgttgaaaacttttatggaggcagagctcttaaaaaagaaaccaaaatgaaaccttgctatggctcgtttgccagacccacaaatgaaaaaggcggtcaagccaaatttttaactgacggcgatggtcagctaactaaaaatcatgatatcacaatgaatttctttgacactcctggaggaacagttggtcaggatactgaacttgaagcagacattgttatgtatgctgagaatgtgcatctggaaactccagacacgcatgtggtgtacaaaccaggaacttctgatgagagttcagaagcaaatttggttcagcagtccatgccaaacaggcccaactacatcggcttcagggacaactttgtgggtctcatgtactataacagcactggcaacatgggtgtgctggctggtcaagcatctcagttgaatgctgtggtcgacttgcaagacagaaacacagagctgtcttaccagctcttgctagattctctgggtgacagaaccagatactttagcatgtggaactctgcagtggacagttatgatcctgatgtcaggattattgaaaatcacggtgtggaagatgaacttccaaactattgcttcccattggatggagctggcactaatgctacctaccaaggtgtaaaagttaaaaatggccaagatggagatgtaaacgcagattgggaaaaagatccaaatcttgcttcacgaaaccaaatatgcaagggtaacatcttcgccatggagatcaacctccaggccaacctgtggaagagttttctgtactcgaatgtggccctgtacctgcccgactcatacaagtacacgccggccaacgtcacgctgcccgccaataccaacacctacgagtacatgaacggccgcgtggtagccccctcgctggtggacgcctacatcaacatcggcgcccggtggtcgctggaccccatggacaacgtcaacccattcaaccaccaccgcaacgcgggcctgcgttaccgctccatgcttctgggcaacggccgctacgtgcccttccacatccaagtgccccaaaagttctttgccatcaagaacctgctcctgctccccggctcctacacctacgagtggaacttccgcaaggatgtcaacatgatcctgcagagttccctcggaaacgacctgcgcgtcgacggcgcctccgtccgcttcgacagcgtcaacctctacgccacattcttccccatggcgcacaacaccgcctccaccctggaagccatgctgcgcaacgacaccaacgaccagtccttcaacgactacctctcggccgccaacatgctctaccccatcccggccaaggccaccaacgtgcccatctccatcccctcgcgcaactgggccgccttccgcggctggagtttcacccggctcaagaccaaagaaactccctccctcggctcgggtttcgatccctactttgtatactcgggttccatcccctacctcgacgggaccttctacctcaaccacaccttcaagaaggtctccatcatgttcgactcctcggtcagctggcccggcaacgaccggctgctcacgccgaacgagttcgagatcaagcgcagtgtcgacggggagggctacaatgtggcccaatgcaacatgaccaaggactggttcctcgtccagatgctctcccactacaacatcggctaccagggcttccacgtgcccgagggctacaaggaccgcatgtactccttcttccgcaacttccagcccatgagcaggcaggtggtcgatgagatcaactacaaggactacaaggccgtcaccctgcccttccagcacaacaactcgggcttcaccggctaccttgcacccaccatgcgtcaggggcagccctaccccgccaacttcccctatcctctcatcggccagacagccgtgccctctgtcacccagaaaaagttcctctgcgacagggtcatgtggcgcatccccttctccagcaacttcatgtccatgggcgccctcaccgacctgggtcagaacatgctctatgccaactcggcccacgcgctcgacatgaccttcgaggtggaccccatggatgagcccaccctcctctatcttctcttcgaagttttcgacgtggtcagagtgcaccagccgcaccgcggcgtcatcgaggccgtctacctgcgcacgcccttctccgccggcaacgccaccacctaa

SEQ ID NO: 10870 - DNA, 837 bp, unidentified
  misc_feature 1..837: note = Synthetic
  source 1..837: mol_type = other DNA
atggaggcctgtccacacatacgctacgccttccagaatgacaagctgttgctccagcaggctagtgtagggcggctcaccttggtcaacaagaccaccatcctgctgcgcccgatgaagaccacaactgtggacctaggcctctatgcccgcccacccgagggtcatgggctcatgctgtggggcagcacctcccgtccggtcacgtctcatgttggcatcatcgatcccggctacacgggggaactccggctaatcctccagaatcagcggcgctacaactccacgctgcgtccatcggagctcaaaatccacctggctgccttcagatatgccaccccccagatggaggaggacaagggtcccatcaaccacccccagtaccccggggacgtgggcctggacgtctctttgccaaaggacctggccctcttcccccatcagaccgtctcagtgacactcaccgtgccccccccttctatccctcaccacaggccgacaatctttggcaggtcgggcctggccatgcagggtattctagtgaagccctgcaggtggcgccggggtggggtggacgtcagcctgaccaactttagtgaccagaccgtgttccttaacaagtaccggcgcttctgtcagcttgtttaccttcacaagcaccacctcacctccttctacagcccccacagtgacgcgggggtccttggccccagatctctctttaggtgggccagctgcaccttcgaggaggtgccgagcctggccatgggtgatagtgggctgagcgaggcgctcgaggggagacaggggagggggtttggatcctcgggtcaatga

SEQ ID NO: 10871 - DNA, 837 bp, unidentified
  misc_feature 1..837: note = Synthetic
  source 1..837: mol_type = other DNA
atggaggcctgtccacacatacgctacgccttccagaatgacaagctgttgctccagcaggctagtgtagggcggctcaccttggtcaacaagaccaccatcctgctgcgcccgatgaagaccacaactgtggacctaggcctctatgcccgcccacccgagggtcatgggctcatgctgtggggcagcacctcccgtccggtcacgtctcatgttggcatcatcgatcccggctacacgggggaactccggctaatcctccagaatcagcggcgctacaactccacgctgcgtccatcggagctcaaaatccacctggctgccttcagatatgccaccccccagatggaggaggacaagggtcccatcaaccacccccagtaccccggggacgtgggcctggacgtctctttgccaaaggacctggccctcttcccccatcagaccgtctcagtgacactcaccgtgccccccccttctatccctcaccacaggccgacaatctttggcaggtcgggcctggccatgcagggtattctagtgaagccctgcaggtggcgccggggtggggtggacgtcagcctgaccaactttagtgaccagaccgtgttccttaacaagtaccggcgcttctgtcagcttgtttaccttcacaagcaccacctcacctccttctacagcccccacagtgacgcgggggtccttggccccagatctctctttaggtgggccagctgcgccttcgaggaggtgccgggcctggccatgggtgatagtgggctgagcgaggcgctcgaggggagacaggggagggggtttggatcctcgggtcaatga

SEQ ID NO: 10872 - DNA, 837 bp, unidentified; identical to SEQ ID NO: 10871
  source 1..837: mol_type = other DNA
  misc_feature 1..837: note = Synthetic

SEQ ID NO: 10873 - DNA, 537 bp, unidentified
  source 1..537: mol_type = other DNA
  misc_feature 1..537: note = Synthetic
atgccttacagacgctatcgcagacgccgaagaagaccgacacggagatggaggcaccggaggtggagacgctactttcgatatcggtatcgacgcgctcctcgccgccgccgcacaaagtggggaggacatggcacagaaagatttaaaaccaacatcggagaccccagcaccataccctgccccttcgaacccggggaccgcttccacagcgggatacaagacccctccaaggtacaaaacaccgtcctcaacccctgggactatgactgtgatgggattgttagaaaagatactctcaaaagacttctcgaactccccacagagacagaggaggaggagaaggcgtacccactccttggacaaaaaacagagaaagagccattatcagactccgacgaagagagcgttatctcaagcacgagcagtggatcctctcaagaagaagaaacgcagagacgaagacaccacaagccaagcaagcgacgactcctcaagcacctccagcgggtggtaaagaggatgaaaacactgtga

SEQ ID NO: 10874 - DNA, 324 bp, unidentified
  misc_feature 1..324: note = Synthetic
  source 1..324: mol_type = other DNA
atgccttacagacgctatcgcagacgccgaagaagaccgacacggagatggaggcaccggaggtggagacgctactttcgatatcggtatcgacgcgctcctcgccgccgccgcacaaaggtaaggagacggaggaaaaaagctccggtcatacaatggttccctcctagccggagaacctgcctcatagagggattttggccgttgagctacggacactggttccgtacctgtctcccctttaggcggttaaatggactagtattcccgggtggaggttgtgactggagccagtggagtttacaaaacctttacaatgaaaaa

SEQ ID NO: 10875 - DNA, 51 bp, unidentified; identical to SEQ ID NO: 1578
  misc_feature 1..51: note = Synthetic
  source 1..51: mol_type = other DNA

SEQ ID NO: 10876 - DNA, 75 bp, unidentified; identical to SEQ ID NO: 1579
  misc_feature 1..75: note = Synthetic
  source 1..75: mol_type = other DNA

SEQ ID NO: 10877 - DNA, 69 bp, unidentified
  misc_feature 1..69: note = Synthetic
  source 1..69: mol_type = other DNA
atgccgcaccatcagcactcccactctccaatccatcctctaatcagtggtcgctctagaccccattaa

SEQ ID NO: 10878 - DNA, 24 bp, unidentified
  source 1..24: mol_type = other DNA
  misc_feature 1..24: note = Synthetic
atgctacgagaatctaacagctga

SEQ ID NO: 10879 - DNA, 888 bp, unidentified
  misc_feature 1..888: note = Synthetic
  source 1..888: mol_type = other DNA
atgcgtcgtctgacagatagttttattctcggtcttgctaagggtgccgttattccggggctgtatccgtttagaatgacagaggggaggtcctccctcgaacagataggcgttgtgataaccgttgcgatttcctttttgttgacttttaaaaaatttgatccacgcttttataaacccataggtgatttcaagattgtgtttctgtctttaatggcggcgaaactgccatcattcttgtctgcagtggtcatgatctgcttgattttttccgagatgaggttgagaatgattttaagtcgttgtgtcctgattatgccgtcttattcccccgctgtgtttacggggatgatggtgtctttattttttaagagtcaaatgttcgatgattattctgtcttgacgacgactgcgtttctcctgccgtttactctgagatatggatggatgatacgatcatctggatttcttattagtttgcaaaaatatcgtccgattttgaagtcaacgtcgtttcgtgaagttgatttgaaataccttgtaaagtttacggtcgaatttttgttattatttacgatactctggatcggaaaaatcttcttgagtatgccaaaatctaatcatcttttttttctgacggtggtcaacaacgtgttttttaaactaaatgttttcaaagctgctgcgtgcgcaatggtggcgatcttgtcgggactgatgatgaacgtctgcctatatcgaattatctttgaagcctttttaggtctcgggtttagttcgattatgttgactttgagcagcgatctgaaagacagatctttttatgcgggtgatttattgaacggctttttttgtttagtcgtgtgttgcatgtattttggtgtgtga

SEQ ID NO: 10880 - DNA, 15 bp, unidentified
  misc_feature 1..15: note = Synthetic
  source 1..15: mol_type = other DNA
aggatgatacattaa

SEQ ID NO: 10881 - DNA, 249 bp, unidentified
  source 1..249: mol_type = other DNA
  misc_feature 1..249: note = Synthetic
attgcaatattccttctcgtaggcacacaatctaatattgataaaatctccattctcttctctgtatttattatcttgtctcggtggctgattaggctgtggtctatcgttgttgaatctattttggtcattaaatctttcatttcttcctggtatatttctatcacctcgtttggttggatttttgtctatattatcgtttgtaacatcggtacgggtattcatttatcacaaaaaaaacttctctaa

SEQ ID NO: 10882 - DNA, 51 bp, unidentified; identical to SEQ ID NO: 1585
  source 1..51: mol_type = other DNA
  misc_feature 1..51: note = Synthetic

SEQ ID NO: 10883 - DNA, 33 bp, unidentified; identical to SEQ ID NO: 1587
  source 1..33: mol_type = other DNA
  misc_feature 1..33: note = Synthetic

SEQ ID NO: 10884 - DNA, 222 bp, unidentified
  source 1..222: mol_type = other DNA
  misc_feature 1..222: note = Synthetic
atgacagccggttcctcttcctcaaggcgcgccgcgccgacaacgccgtcgtgtacctgcgcttcgtgcagcacttttactacgtggtgcgcgcggacgcggtggccgacatcgctcagccgctggcgtggacgcgcgcgctcgggcccatgtccgtggtcagcatcgacgagatcgtggcgcgctcggcgaaaattccggagcgccagcgctcggagatag

SEQ ID NO: 10885 - DNA, 30 bp, unidentified; identical to SEQ ID NO: 1590
  misc_feature 1..30: note = Synthetic
  source 1..30: mol_type = other DNA

SEQ ID NO: 10886 - DNA, 129 bp, unidentified; identical to SEQ ID NO: 1591
  misc_feature 1..129: note = Synthetic
  source 1..129: mol_type = other DNA

SEQ ID NO: 10887 - DNA, 672 bp, unidentified
  misc_feature 1..672: note = Synthetic
  source 1..672: mol_type = other DNA
ttgagtaagatggtttacaaattagtcttactcttttgtatcgcatctctcgggtattcggtagaatacaagaatactatatgtcctcctcgacaagattaccggtactggtactttgtcgccgaactcactattggtgtaaattacgacattaattctacaattattggtgagtgtcatatgagtgaaagctatatcgacagaaatgctaacatagtgttgactggatacggactaaaaataaacatgaccatcatggatacggatcagagatttgtggcagcggctgagggtgttggtaaagataataaactatctgttctgttgtttaccactcagcggctagataaagttcatcataatattagtgtgacaataacatgtatggaaatgaattgtggaactacaaaatacaatagcgatcttccggaatcaattcataaatcatcatcgtgtgatataactataaatggatcatgtgtgacatgtgttaacttagagactgatccaacaaagattaatccccattacttacaccccaagaataaatatctttatcataattctgagtatagtatgcgtggtagttatggcgtgacatttatagatgaattaaaccagtgccttcttgacataaaagaactaagttatgatatttgttatagagagtaa

SEQ ID NO: 10888 - DNA, 90 bp, unidentified
  misc_feature 1..90: note = Synthetic
  source 1..90: mol_type = other DNA
atacaagaatactatatgtcctcctcgacaagattaccggtactggtactttgtcgccgaactcactattggtgtaaattacgacattaa

SEQ ID NO: 10889 - DNA, 24 bp, unidentified
  misc_feature 1..24: note = Synthetic
  source 1..24: mol_type = other DNA
atgttggctgttttttctctttaa

SEQ ID NO: 10890 - DNA, 93 bp, unidentified; identical to SEQ ID NO: 1601
  source 1..93: mol_type = other DNA
  misc_feature 1..93: note = Synthetic

SEQ ID NO: 10891 - DNA, 54 bp, unidentified; identical to SEQ ID NO: 1602
  misc_feature 1..54: note = Synthetic
  source 1..54: mol_type = other DNA

SEQ ID NO: 10892 - DNA, 54 bp, unidentified; identical to SEQ ID NO: 1602
  source 1..54: mol_type = other DNA
  misc_feature 1..54: note = Synthetic

SEQ ID NO: 10893 - DNA, 1233 bp, unidentified
  misc_feature 1..1233: note = Synthetic
  source 1..1233: mol_type = other DNA
atggagtgtaatttaggaaccgaacatcctagtacagatacgtggaatcgtagtaaaacggaacaagcggttgtggacgcatttgatgaatcgttgtttggtgatgtagcatcggatattggatttgaaacgtcgttatattcacatgcagttaaaactgctccgtctccgccttgggtagctagccctaaaattttatatcaacagttaatacgggatcttgatttttcagaagggccgcgtttactatcatgtcttgaaacctggaacgaggatttattctcatgttttcctattaatgaggacctatattccgatatgatggttttatccccggatccagatgacgttatctcaaccgtttcaaccaaagaccatgttgaaatgtttaatttaacaacccggggttccgttcgattgcctagtccaccaaagcaaccgacggggcttccagcttacgttcaggaggtccaggattcgtttaccgtagaactacgcgcccgggaagaagcatacacaaaactactagttacttattgtaaatcgattatacgttatctccaaggaacggcgaaaaggacgacaataggtcttaatatacaaaaccctgaccagaaagcttacacgcaactcaggcaaagtattctacttagatattatcgtgaggtggcaagtttggcgcgtcttctgtacctacatttatatttaaccgtaacgcgtgaattttcctggcgtttgtacgccagtcaatctgcacacccggacgtgtttgcggctttaaaattcacctggaccgaacgtcgacagttcacgtgtgcgtttcatcctgtattatgcaaccacggcattgtgttattagaagggaaaccactaacagcgtctgccttgagggaaataaattaccgccgccgagaactgggactgcctctagttagatgtggtcttgttgaagaaaacaaatctccgttggttcaacaaccctcattttcggttcatttaccacggtcggtgggttttcttacccaccacattaagcgtaagttagacgcatatgcggtcaaacatcctcaagaaccgagacatgtacgagcggatcatccttacgcaaaagttgttgaaaatagaaactacggtagtagcatcgaagctatgattttagcacctccgtccccatccgagatcctgccgggggacccaccacgcccacccacgtgtgggtttttaacgcgttaa

SEQ ID NO: 10894 - DNA, 18 bp, unidentified
  misc_feature 1..18: note = Synthetic
  source 1..18: mol_type = other DNA
atgacatttaccagttaa

SEQ ID NO: 10895 - DNA, 765 bp, unidentified
  misc_feature 1..765: note = Synthetic
  source 1..765: mol_type = other DNA
atggagtcctacctagtagacacctatcaaggcattccttacacagcagctgttcaagttgatctaatagaaaaggacctgttacctgcaagcctaacaatatggttccctttgtttcaggccaacacaccaccagcagtgctgctcgatcagctaaaaaccctgacaataaccactctgtatgctgcatcacaaaatggtccaatactcaaagtgaatgcatcagcccaaggtgcagcaatgtctgtacttcccaaaaaatttgaagtcaatgcgactgtagcactcgatgaatatagcaaactggaatttgacaaactcacagtctgtgaagtaaaaacagtttacttaacaaccatgaaaccatacgggatggtatcaaaatttgtgagctcagccaaatcagttggcaaaaaaacacatgatctaatcgcactatgtgattttatggatctagaaaagaacacacctgttacaataccagcattcatcaaatcagtttcaatcaaagagagtgagtcagctactgttgaagctgctataagcagtgaagcagaccaagctctaacacaggccaaaattgcaccttatgcgggattaattatgatcatgactatgaacaatcccaaaggcatattcaaaaagcttggagctgggactcaagtcatagtagaactaggagcatatgtccaggctgaaagcataagcaaaatatgcaagacttggagccatcaagggacaagatatgtcttgaagtccagataa

SEQ ID NO: 10896 - DNA, 99 bp, unidentified; identical to SEQ ID NO: 1610
  misc_feature 1..99: note = Synthetic
  source 1..99: mol_type = other DNA

SEQ ID NO: 10897 - DNA, 678 bp, unidentified
  source 1..678: mol_type = other DNA
  misc_feature 1..678: note = Synthetic
atggctttacaattatttaatccagaagactactatgatattttatttcctggagtgaatgcctttgttaacaatattcactatttagatcctagacattggggcccgtccttgttctccacaatctcccaggctttttggaatcttgttagagatgatttgccagccttaacctctcaggaaattcagagaagaacccaaaaactatttgttgaaagtttagcaaggtttttggaagaaactacttgggcaatagttaattcaccagctaacttatataattatatttcagactattattctagattgtctccagttaggccctctatggtaaggcaagttgcccaaagggagggaacctatatttcttttggccactcatacacccaaagtatagatgatgcagacagcattcaagaagttacccaaaggctagatttaaaaaccccaaatgtgcaatctggtgaatttatagaaagaagtattgcaccaggaggtgcaaatcaaagatctgctcctcaatggatgttgcctttacttttagggttgtacgggactgtaacacctgctcttgaagcatatgaagatggccccaacaaaaagaaaaggagaaaggaaggaccccgtgcaagttccaaaacttcttataagaggaggagtagaagttctagaagttaa

SEQ ID NO: 10898 - DNA, 138 bp, unidentified; identical to SEQ ID NO: 1612
  misc_feature 1..138: note = Synthetic
  source 1..138: mol_type = other DNA

SEQ ID NO: 10899 - DNA, 702 bp, unidentified
  misc_feature 1..702: note = Synthetic
  source 1..702: mol_type = other DNA
atgagtaaagatattcccacgccttacatgtggagctttcaaccccaaatgggactggcggccggcgcggctcaagactattctagcaaaatgaattggttaagcgccggaccccacatgatttccagggtgaatggggtacgagcccggcgtaaccaaatactgctagaacaagccgctctcaccgctacaccacgtaatcaacttaaccctccctcttggccagctgccctgatatatcaggaaaatccccctcctaccactgtacttttgcctcgcgacgcccaggccgaagtccatatgactaacgctggggcacagcttgcgggcggtgcacgtcacagtttcaggtataaaggtcgcactgagccctatccgtctccagctataaaaagagtactcatcagagggaaaggtattcagctgaacgacgaagtcacatcgccattgggagtcagacccgacggagtgtttcagctcggagggtccggacgttcctcctttaccgctcgtcaagcctacctgacactacagagctcatcctcagctccgagatctggtggtattggaactctccaatttgtggaggaatttactccatctgtttacttcaatcctttttcgggctcgcctggacactatcctgacgccttcatacccaactttgacgcagtgagtgaatctgtggatggctatgattaa

SEQ ID NO: 10900 - DNA, 30 bp, unidentified; identical to SEQ ID NO: 1616
  misc_feature 1..30: note = Synthetic
  source 1..30: mol_type = other DNA

SEQ ID NO: 10901 - DNA, 90 bp, unidentified; identical to SEQ ID NO: 1617
  source 1..90: mol_type = other DNA
  misc_feature 1..90: note = Synthetic

SEQ ID NO: 10902 - DNA, 2310 bp, unidentified
  misc_feature 1..2310: note = Synthetic
  source 1..2310: mol_type = other DNA
atggacagagaagaacccgcggaatcagagtgcaccttaagagctcttgtagaagagtacaatggagcatgcaaggaagcaccgaaagagatgtcgaagcaattcacagactacaacacattcaaaaggtataccacaagcaagaaggatcatgcaccccagatgagactagtgtattcagtgagaaaaccatggccaatcagcatgactcccagcaaggagatccctctggtgttcaacgggaccaaactaaaagatactatcctggacctaggagaatccaagagaaccagggcaaacatagtagtaccagattactggtccaagtacggaagccagaccagcctagaagtagttaacgccattctatatgcggaagacttgaaagtacagagatttttcagcacagaatggggtgagatccgctacggaagaatgctccccttcagaaagcctgtacaggcatgtcccactatagaggaggtaaatccggcttctataccacatactctgctgcaagtgttctgcccccaatacaccactctagacagcaagaggaaagcacacatgggagcagtagagaagctgaaaagagtcatggaacccatttgtaaggtgcagacacaagaatctgcagtacacattgccagatctcttattgacagcaacaaaaagtggctgcccaccgttgtagaccacacccccaggactgctgagatggcacatttcttgtgcagcaaatatcactatgtgcataccaacacacaagatctaagcgacacgcgctccatagacaatctatgcggagaacttgtgaagagatctctgaagtgcagatgcccaaaggagactctggtcgccaacctagacaagatcaccatacaagggagaccgatgagggaagtgcttgctgaccacgatggggagctcccctacctgggaatatgccgagtggctatgggtctcagtacacaccacacaatgaagattaggagcaccaagttctctatccttaacagtgaccaccctcgcattgaggtgaaaaaggtcttctcattgagcccggatgtgcaagtgaccataccttataggagattcaaagggaaagcgaaggtctatttccaaaacgaccagattcaaggatatttcagctgcacagacaggcagatagatgagatcaagattagtgcccccaagaacgcacccctactagaacccctacttgacatctgctactatggatccttcatagaaccgggctttgaacagaccttcggattttacccagccggaaagagagaatttgtggacagtttcttcatgcatcactccaaagaccacaaggccttcttgatccacatgggccttgacaaggatctgagcctccctctgtcaccagaactcaattggaaagagccagctcttagcaaagtctgccgtgtgacagagctagacagcaccgtacagccgtacacctctgccactagagagtttgtgctgggagaaacgctcaatgtatacacccaacatgagaatggacttgaactgctcatatgccccacagagataaggagtacgagaggtcctcttcctccaggaaccaacctgagcggcagtgaattcatagatatataccaagaccctttcagcagagccaaaagcctgctgaagtccaccatactgcacgcagagagatgcaaagagttcgttggcaacatgctcgaagagtaccaagaccctgcagagacgaccgtgcaaagtctagtgcccattaacacttgggggaaaagtgccaagagaaagctacaagaggaaatcaccagcgatccagactggcaccagtgtccaagaaagcgagcaaagatgtcttaccttgctataatagcaggtagtatccaagacagagacaagaagcaaacaaatgttcctcgggctttcatgcttaggggatcgcaaatagagtacgacatgaaagccaccagagggcttgtggtggacaccaccaataggatcatagtagggggtgaaacagtcctgagagagggcaaaggagggcccgaagggtatgtccaaacaggggtgtttgaggagcaacccaggtgctacctagtagacactccagaccacggattgtcgatgggcctctccagattctgtgtacactctcaaggtcggtactttcaatacgagaagaagatctctatatgggaggagaccgacaacatcaaagcgactatcgactcccagagggacctgaagagaaggagggatatagaggagatggtcagcaagagggcaaggattgtgtag

SEQ ID NO: 10903 - DNA, 105 bp, unidentified; identical to SEQ ID NO: 1619
  source 1..105: mol_type = other DNA
  misc_feature 1..105: note = Synthetic

SEQ ID NO: 10904 - DNA, 1365 bp, unidentified
  misc_feature 1..1365: note = Synthetic
  source 1..1365: mol_type = other DNA
atggctacagaccagatggacatctcgggccctcctccaaagaaacagcatgtggacacagagagtcagatcccaaagatgtacgagatgatcagggaccagatgcgcactttggcatcgacacacaaaatccccctgaacattgaccacaactgcgaggttatcgggtccatcataatggctgcctgtacaaacaacagagacctgagaccagtggataagtactggtttctaatgggccctgcaggggcggaagttatgaccgaagtggagattgacattcaaccacaacttcaatgggcaaaaggagctgtccatgacccgaaatacaaggggcaatggtatccattccttgcacttctacagatctccaacaagaccaaagataccatcttgtggcagaaataccccgtcacccaggagctagagattagcaactcccttgagatctacgccaacggtcacggcatcaaagaccggcttaagaacagcaggcccaggtctgtcgggcctctcgtccaccttctccacttgaagaggctccaagaaaatccaccaaagaaccccaaaacaaagaagcccttagaatcccctgctgtcaatgggatacggaagagcatcgtcgggcacctcaagcgccaatgcatcggtgagacccaaaaggcaatgatcaaccagtttgagatggggaggtgggagtctctatccacatttgctgcctctctgctggcaataaagcctcggatcgagaaccacttcgtgctgacgtacccactgatagccaactgcgaggattttgccggggcaacgctgtctgacgagtgggtgtttaaggcgatggagaagatctcgaacaagaaaacactacgagtttgcgggccagatgagaagtggatcagcttcatgaaccagatctacatccacagtgtattccagaccacaggcgaagatctgggagttttagagtgggtgttcggaggcaggttctgccagaggaaggaatttggccggtactgcaagaagtctcaaaccaaggtcatcgggctgttcaccttccaatacgagtactggtcaaagcctctgaagtctgccccaagatcgatagaagggtcaaaaaggggccagatctcgtgcagaccttctttcaaaggaaagcgcccctcttacaacaatttcaccagcatagacgccctgcagtctgcctctgggtctcaaaccgtcagcttctatgatcaagtcagagaagaatgccagaagtacatggacctaaaagtggaggggacaacctgcttctaccgaaagggcggccatgtagaggtggaattccctgggagcgcccactgcaacacatacctgttcggttga

SEQ ID NO: 10905 - DNA, 15 bp, unidentified
  misc_feature 1..15: note = Synthetic
  source 1..15: mol_type = other DNA
atggtaaaattataa

SEQ ID NO: 10906 - DNA, 999 bp, unidentified
  source 1..999: mol_type = other DNA
  misc_feature 1..999: note = Synthetic
ctggctagacgtcctactcctaaaaaaatgaacatagttactgattcggaaaatcgtttaaagaagaatagctatatagaaaatactaatcagggaaacattctgatggatagcatcttcgtatccaccatgccggtagaaacattgtttggatcgtacataactgatgacaacgatgattatgaacttaaggatttactcaatgttacatataacattaaaccggtcatagtccctgacatcaagttggattctgtattagatagagatggaaattttagaccagctgactgtttcttggttaaactgaaacatagtgatggattcaccaaaggagctctctatcttgggcatagtgcaggatttacggcaacaatctgcttaaaaaatgagggggtttcagggctttacattccaggtacttccgtagttcggtccaatatctgtcaaggagatactatcgtcagtagatcatctagaggagttcaatttcttccacaaataggaggagaagctattttcttgattgtttcactttgtcctaccaagaagttagtagaaacaggattcgttattccagaaatatcgtcaaatgataacgccaaaatcgctgctcgcattctatcagagaaacgcaaggacatcattgcgcatattaatactctaatacaatacaggcaacaattggaattggcttactataattcctgcatgttaactgagtttctgcattattgtaattcgtatgctgataccatcaaagaatcacttctaaaagaaacaattcaaaaagatatcaatatcatacatacaaatatcactaccctattgaatgagacagccaaggttatcaagttagtaaaatctctggtagataaagaagatactgatattgtgaataatttcattaccaaagaaattaaaaactgtggaggtgttaaaaacagagacaaaatagttaatagtttgtctctatcaaacctggactttcgtttgtaa

SEQ ID NO: 10907 - DNA, 10245 bp, unidentified
  source 1..10245: mol_type = other DNA
  misc_feature 1..10245: note = Synthetic
atgaccacttctaaaggaaaggggggcggtccccctaggcgcaagcttaaagtgaccgcaaataagtcgcgaccagcaacgagcccaatgccaaagggcttcgtgctgtcgcgcatgctggggattctttggcacgccgtgacaggcacggccagacccccagtgctgaaaatgttctggaaaacggtaccactgcgccaggcggaggctgttctgaagaagataaagagagttatcgggaacttgatgcagagccttcacatgagagggcgtcgcaggtcaggtgtggactggacttggatttttttgacgatggcgttgatgaccatggccatggcaaccaccatccaccgggacagggaaggatacatggttatgcgggccagtggaagggacgctgcaagccaggtcagggtacaaaacggaacgtgcgtcatcctggcaacagacatgggagagtggtgtgaagattcaatcacctactcttgcgtcacgattgaccaggaggaagaacccgttgacgtggactgcttctgccgaggtgttgatagggttaagttagagtatggacgctgtggaaggcaagctggatctagggggaaaaggtctgtggtcattccaacacatgcacaaaaagacatggtcgggcgaggtcatgcatggcttaaaggtgacaatattcgagatcatgtcacccgagtcgagggctggatgtggaagaacaagcttctaactgccgccattgtggccttggcttggctcatggttgatagttggatggccagagtgactgtcatcctcttggcgttgagtctagggccagtgtacgccacgaggtgcacgcatcttgagaacagagattttgtgacaggaactcaagggaccaccagagtgtccctagttttggaacttggaggctgcgtgaccatcacagctgagggcaagccatccattgatgtatggctcgaagacatttttcaggaaagcccggctgaaaccagagaatactgcctgcacgccaaattgaccaacacaaaagtggaggctcgctgtccaaccactggaccggcgacacttccggaggagcatcaggctaatatggtgtgcaagagagaccaaagcgaccgtggatggggaaaccactgcgggttttttgggaagggcagtatagtggcttgtgcaaagtttgaatgcgaggaagcaaaaaaagctgtgggccacgtctatgactccacaaagatcacgtatgttgtcaaggttgagccccacacaggggattacttggctgcaaatgagaccaattcaaacaggaaatcagcacagtttacggtggcatccgagaaagtgatcctgcggctcggcgactatggagatgtgtcgctgacgtgtaaagtggcaagtgggattgatgtcgcccaaactgtggtgatgtcactcgacagcagcaaggaccacctgccttctgcatggcaagtgcaccgtgactggtttgaggacttggcgctgccctggaaacacaaggacaaccaagattggaacagtgtggagaaacttgtggaatttggaccaccacatgctgtgaaaatggatgttttcaatctgggggaccagacggctgtgctgctcaaatcactggcaggagttccgctggccagtgtggagggccagaaataccacctgaaaagcggccatgttacttgtgatgtgggactggaaaagctgaaactgaaaggcacaacctactccatgtgtgacaaagcaaagttcaaatggaagagagttcctgtggacagcggccatgacacagtagtcatggaggtatcatacacaggaagcgacaagccatgtcggatcccggtgcgggctgtggcacatggtgtcccagcggttaatgtagccatgctcataacccccaatccaaccattgaaacaaatggtggcggattcatagaaatgcagctgccaccaggggataacatcatctatgtgggagaccttagccagcagtggtttcagaaaggcagtaccattggtagaatgtttgaaaaaacccgcaggggattggaaaggctctctgtggttggagaacatgcatgggactttggctcagtaggcggggtactgtcttctgtggggaaggcaatccacacggtgctggggggagctttcaacaccctttttgggggggttggattcatccctaagatgctgctgggggttgctctggtctggttgggactaaatgccaggaatccaacgatgtccatgacgtttcttgctgtgggggctttgacactgatgatgacaatgggagttggggcagattatggatgtgccattgacccagaaaggatggaaatccgctgtggagaagggcttgttgtgtggaaagaggtgtcggaatggtatgacggctacgcctatcacccagaatcacctgacacgcttgcacaggctctcagagaggcctttgagagaggcgtttgtggggtcgtgccccaaaacagacttgaaatggccatgtggagaagcactgctccggaactcaacttggtgctgagtgagggagaagcaaacttgaccatcgtggtagacaaaacagatccggcagactataggggaggcactcccatggttctaaagaagactggaaaagagagcaaggtgtcctggaagagctggggcaagtcaatcttgtggagtgttcctgatagccccaggcgcatgatgatgggggttgacggagttggggagtgccccttgtataggagagcaacaggagtgttcacagtggcagagtttggagtgggcctacgcacgaaagtgttcttggatctgcgtggtgaagcttcaaaagagtgtgacacaggagtgatgggagcagccgtgaagaatggaaaagccatccacacggaccaaagtatgtggatgagctcctttcggaatgacacgggcacgtacatccatgagcttattctcactgatctcaggaactgcacatggccagcaagtcacactattgataatgatggagttttagactcccatcttttcttgccagtcacccttgctgggcccaggtcaaagtacaacaggatacctgggtacagtgaacaagtaagaggaccatgggaccagactcctctgagggtggtccgggaccattgccctggaacaagtgtgaggattgacagccattgtgacaagagaggagcttcagttagaagcaccacagaaagtggaaagatcattccagagtggtgctgccgggcctgtgagctaccaccggtgacattccgtagtggcacggattgttggtacgctatggaaatcaggccagtccattcgcagggcggcttggtgcgttccatggtagttgctgacaatggtgccttgcttagtgagggaggagttcctggtctagtggcagtgtttgtattgatggaattccttttgagaaggcgtccgggatctgtcacgtccattttgtggggaggcatactaatgctgggcttgctggtcacgggtctcgtgagagtggaggagatcgtgcgctatgtcatagcagttggggtcactttccacttggaattgggaccagagaccatggttcttgtgatgctgcaggcggtcttcaacatgcgcacatgttatctcatggggtttcttgtcaagagggtgatcaccacacgtgaggtggtgactgtttacttcttgctattggtccttgagatggggataccggagatgaacttcggacacctctgggaatgggctgatgcactggccatggggttgctcataatcaaggccagtgcgatggaagatcgcagaggtttgggattcttgctggctgggctcatgacacaaagacacctagtcgctgtccatcatggtttgatggtatttctcactgtggccttggcggtagtgggacggaatatctacaatggacaaaaagagaggaaaggactgtgtttcacagtccccctggcctcactacttggtggctccggctccggattgcgcatgctggccttgtgggaatgtcttgggggtcgtggcagacggagcctcagtgagccccttactgtggtgggggtcatgctggccatggccagtggactactacgacattcatcccaagaggctcttttggccctttctgcaggatcctttctcattttgatgctgatcctggggacccgtagactccagctaacggcggaatgggccggagtggtggagtggaaccctgagttggtcaatgagggaggtgaggtaagcttgaaggtcagacaggatgccatggggaacttgcacttgacagaggtggaacgggaggagcgtcgtttggccttatggcttgtgttcggcctactggcatcggcttatcattggtccggaatattggtcacaatgggggcttggacagtttatgagctcttctcatccacgcggagaactgacctggttttttcagggcagttgcctgaccaaggggaaaaacgttcctttgacatcaaggaaggcgtataccgcatatacgcccctgggctcttctggggttaccgccagataggtgtgggatatggaacgaaaggagtcttacacaccatgtggcatgtgacaagaggagccgccctcagcgtggagggggccacatcaggaccatactgggcggatgtgcgtgaagacgtggtctgctatgggggggcctggggcttggacaaaaaatggggaggcgaagtcgttcaggtacacgcattccctccggacagtggacacaaaatccatcaatgccagccaggaaagctgaaccttgagggggggagagttctgggggccatcccgatagacctcccacgtggtacttcaggtagcccaatcatcaatgcacagggagatgtgctgggtctgtacggcaatggtctgaaatcaaatgatgtttacatcagtagcattgctcagggcaatgttgaaaagagtcgccctgagatgccattggcagtccagggtggcaaatggacatctaagggcagcatcacagttttggatatgcatcccgggtcgggaaagacacacagagtccttcccgaactgattcgtgagtgcattgacaaaaggttgaggactgttgtattggcgccaacacgggtggtcctgaaggaaatggaaagggccttgcaggggaaacgtgtcaagtttcattcggcagcagttgacaatgcttcttcatcatcgggagctattgttgatgtcatgtgtcatgccacctacgtcaaccgccggctcttgccacaagggagacagaactgggaggtggccataatggatgaggcacattggaccgacccacacagcatagctgcccgaggccatctttactccttggccaaggagaacagatgtgcactcgtgctgatgactgctaccccacctggcaagagcgaggcgttccctgaatccaaaggagccatagtgagtgaggaaaaacccattcccgaaggagagtggagagatggctttgattggataacagaatttgagggtcgaacagcctggtttgtgccatcgatagccaagggaggcgccatagcacggacactgagacagaaagggaaaagcgtgatctgtctgaacagtaagacctttgacaaggattatggcagagtccatgaggaaaaacctgacttcgtcgtgacaactgacatctcagaaatgggggccaatctagatgttaatcgggtcatagatggtagaactaacatcaaacccgaggagatagatggaaaggtggaattgattggcacgagacgagtgacgacagcatcagctgcgcaacgcagagggcgagttggaaggcatgaaggacgcacggacctctatgtgtattctgggcagtgtgatgatgatgacagctccttagtgcagtggaaagaagcgcagattctgcttgacaacattactacagtgagaggaccagttgccactttttatggtccagagcaagggaaaatgctcgaggtggcggggcacttccgcttgacggaggaaaaaagaaagcacttccggcaccttctgacaaactgtgacttcacgccctggctcgcatggcacgtggctgcaaacactgcctgtgtgacggaccggaaatggacctgggaaggtcccgacgagaatgccattgatggtccaggcggcgaactggtcacgttcagaagccccaatggagcggaacggaagctgaagccaatctggaaggacagtagaatgttccgggaggggagagatgtggcagacttcatccagtacgcttccggtcgtaggagtgccgtggacatcctgactggacttggtggagtcccagacctgctgcggttgcgctgcacagcggcgtgggatgttgtctacacactgcttaatgagaccccagggagtcgcgccatgaaaatggcggagagagatgctcctgaggcgatgctgacacttttggaggtagcggttctgggcatcgccacactgggggtggtttggtgtttcattgtccggacgtcagtcagcagaatggttctgggcaccctggtgttggcagtggctctcatcctgttgtggttgggaggaatggactatggaaccatggcaggagtggctctcatcttctatttgctcctcacggtactgcaaccagaaccgggaaagcagcgtagtggagaggataaccgactggccttcctgttgattggactggggagcgtggtgggccttgtggcagccaatgagctgggctatctggaacaaacgaaaactgacatttcaggactctttagacgtgaggaccagggagggatggtttgggacgcatggacgaacatcgacatacagcctgcccgatcctggggaacttatgtgctcattgtctccctctttactccatatatgctccatcagctacaaacaaaaatccagaggctggtgaacagctcagttgcagcgggaacacaggccatgagagaccttgggggaggcaccccattctttggtgtagctggacatgtcgtggcactcggtgtgacctctttggtaggagcgacgcccacctcccttgcattgggtgttgccttggctgccctccatttggccgtggtcacatctgggctggaggctgaactgacccagagggcgcaccgggcatttttctcagccatggtaaagaatccaatggtggatggagagatcatcaaccccattccggatggagacccaaaaccagctttgtatgagaggaagatgagtttgtttctcgccatcggcctgtgcatagcggccgtagccttgaacaggactgccgcggcgatgacagaagctggcgcagtggctgtggcggctttgggacagttgctgaggcccgaagaggagagctggtggaccatgcccatggcttgcggaatggctggactggtgcggggaagcctatggggcttactgccagttcttcaccgcatctggctcagaacccagggagctagaaggggtggagcagagggaagcacccttggtgacatttggaagcagcggctgaactcatgcaccaaagaagaattttttgcctacaggcgcacaggggtcatggagacaaaccgagaccaagctcgtgaattgcttcgccgaggtgagactaacatggggttggcagtatcgcgaggctgtgccaaactagcttggctagaggaaagggggtacgcgacactcaaaggagaggttgtggaccttggttgtggaagggggggctggtcatattatgccgcctcaagaccatccgtcatggctgtgagagcttacaccattggagggaagggccatgaagcaccacgccttgtgacgagtcttggatggaatctcataaagttcaggagtgggatggatgtgttctcaatggcgaccacaagagcagacacaatcttgtgtgacattggggagagcagtccagatccggagaaggaaggggctcggagccgaagagtgattcttttgatggaacaatggaaagccagaaacccagacgccgcggcagtcttcaaggtgttggccccgtataggccagaggtgctcgaggctctgcacagatttcagctacaatgggggggggggcttgtgagagtccctttctcacggaattccacccatgaaatgtactattccacggccgtcacaggaaatcttgttaattcagtcaatgtgctctcgcggaagctcctggctagatttggggagacgagaggacccatccaggtgcctgagatcgacctgggaactggaaccaggtgtgtgacgctagctgaggacaaagtgaagcccagggacgtggcggagcgcattggagccttgagggaacagtactcagagtcgtggcacgaagacaaagaacatccctaccggacatggcaatactggggcagctatcgcactccggctaccggatcagcggcatccctgatcaacggagtggtgaagctgctaagctggccttggaatgcacgggaggatgttaccagaatggccatgacagacacaacggcctttgggcagcagcgagttttcaaagaaaaggttgacacaaaggcccaagagccgcagccaggcaccagagtgatcatgagagctgtgagtgactggctgttggagcatctaagccgccgagccaaagtgaggatgtgtaccaaagatgagttcatagcgaaggtgaggtccaacgctgctctaggtgcatggtcggatgaacagaataagtggagctcggcaaaagaggcagtggaagatccagaattttggaaattggtggatgaagagcgctccagacacttgaaaggtcagtgccgacattgtgtgtacaacatgatgggaaagagagagaagaagctaggtgagtttggagttgcaaaaggcagcagggccatctggtacatgtggcttggaagccgcttccttgagtttgaggtccttgggtttcttaatgaggagcattgggcttccagagaggtgagtggagctggggtggaaggaactagtctcaactatctgggctggctgctaagagaacttggaatgaaagacggtggcaaactgtacgccgacgataccgctggctgggacactcggatcaccaatgcagatttggaagatgaagagcagatccttcggtacatggaaggagaacaccatgtgctggcaaaaacaatacttgaaaaggcttaccatgccaaagtggtcaaggttgccaggccctcaccccaagggggatgtgtgatggacgtgatcacaaggagagaccagaggggatcaggacaggtcgtcacatacgccctcaacaccatcacaaacatgaaagtccaactcatccgcatgatggaaggagaaggagtcataggaccagctgactcacaggaccctcgtctgaaaagggtagaaacctggttgaaggagcacggagttgaaagactagggaggatgcttgtgagtggagatgattgtgtcgtcaagcccatcgatgacaggttcggaaaggcgctgtacttcctgaatgacatggccaaggttcgtaaggatgtgggagagtgggagccctcgatgggcttcacagagtgggaggaggtccctttctgttcacatcacttccatgaacttgtgatgaaggatggacgctctctcatagtgccatgcagagaccaagatgagctggttggcagggcaagggtgtcaccaggatgtggatggagtgtgcgagagacggcctgcctgtccaaggcgtacgggcagatgtggcttctcaactactttcatcgcagagaccttcgcacccttggtttcgccatatgttctgctgttcccgtgagttgggttcccatgggtcgcaccacttggagcatccacgcgagtggtgaatggatgacaacagaagacatgctgcgcatctggaacaaagtctggattttggacaaccctcacatggaagataagcagacagtggatgagtggagagacatcccctatctgccaaaaacacaggacctggtatgttcctcacttgttgggagaaaggagagggcagaatgggctaagaacatctggggctcagtggagaaggtcaggaagctcattggaccagaagactacagagactacttatcaagcatggacagacatgacctgcactgggagctcaagctagagagctcgataatctaa

SEQ ID NO: 10908 - DNA, 132 bp, unidentified
  misc_feature 1..132: note = Synthetic
  source 1..132: mol_type = other DNA
ataggccagatgattactatgatattttatttcctggagtacaaacctttgttcacagtgttcagtatcttgaccccagacattggggtccaacactttttaatgccatttctcaagctttttggcgtgtaa

SEQ ID NO: 10909 - DNA, 2133 bp, unidentified
  misc_feature 1..2133: note = Synthetic
  source 1..2133: mol_type = other DNA
atgaacctgttcaccccacgctcagagatcaatcccaccaccactcaggagctactatacgcctacacaggaccggcgcccgttgcttatggcacaagaaccagagcagtattagagaacataatcagaccttaccaatacttctacaaagaacccaatgtccagagagctctagacatcaagacaggatgcaaggagccagaagatataaatgtggaaggtcctagcagtggatttcacaccgcaagtgtgttaaagctagctgacaatttctttagaaaatacaggcctgctatggaaaaattgaagtactggatacttgtaaagcttccgaagctcaagtatgcagagctgagcaagggcaggcagacctacagttttatacacaaaaggaacctcccagcacctatcgccctagaagagacagtggagttcttagaacaaaatctaagaagaaaaataggcccaaccctcctatcttactgccaggcgattgcagacgtgatggagctagatgagaccacttatgaaggcgcgagagatcccaggccctgggacatccagctagaagagatcgactcagatgaagaagaccctctgttcagacaagtaggtagggaagagacctacaccatcaagttcagcagagaagaactatgggaccagatgagaaccttgaatactatgtgcaaacacctagagagagggaggttaaacagaaggaccatagctacccccagcatgttgataagagggtttgtaaaaattgtagaggatgcagccaaagagatcctcgagaatgtccctacctctggagtgccagtgggaggagaagaaaaattggccaagctcgccagcaagcaaacctttcacacagcagtcacaggagagctgagcggcgatcaagaaaagttcaatgagtgtttggacccagatgcaatgcgcctcatgtggaccgtgttcttgagaaagctagggtgccctgactggataatggagttgttcaatataccatttatggtattcaagtcaaagttagcagacatgggagaaggattagtatacaccaaagggaaactcactgacagaaaaccattgggagaaatgccttcagagtttgacgatcttgtgaggaatgtggtgggcaacagcatttcgtgcaggctgggaatgttcatgggaatgtacaacctcacgtcgactctgcttgcactgatctcaatagagagagaagagctcacaggatcgcacgtggagagtagtgatgacttcatccacttcttcaactgcaagacacatgaagagatgttcaaacaggcggagacactccgactgactttgaaactagttggcatcaacatgtctccttccaaatgcatattgatcagccctgcagggataggagagttcaactccaaattccatcaccgtgactttgtggggaacgtggccaccgaactaccagcattggttccgaatgggacaaacccaatgacagacttggcaatgggcctaaatgtgatcaagcattctgtcaacaccggtcaaatgaacctatgcactggagcattagccatgagaatcttcaaccatgcctacaaatatgcatatatggcattaggggtaaccagaaggacccgattcatggaagaaaatgcaatcacccctctgctgacaaatcagggggcctccccagtacacagcttctccaccatgcatctggacgaagtggcactcagacgccatctgggccttctagacgaagagaccctgaggagaatactgaacccgaacaacccagttactcaaaagggggacccttccatgttctttagaatagagaacaagatgccccagatcatggaagactacagtgtgcctagctgctttaaatacaccttgtctcggaatagaaccattcaggacaaaccccacaaggctttactaaacaaagaagagagatatcaaagagtgacctctatcataaacaagctgttccccgaggtgctcatccaagaggcatctgctccaggcacggtcagagagagccttaagagaaggcttgagctggtggtggagaggtctgacctggacgaggagaggaagaagaggatcctttccaggatcttctga

SEQ ID NO: 10910 - DNA, 1410 bp, unidentified
  misc_feature 1..1410: note = Synthetic
  source 1..1410: mol_type = other DNA
atgaatccaaatcagaagataataaccattggatcaatctgtatggtagttgggataattagcttgatgttacaaattgggaacataatctcaatatgggtcagtcattcaattcagacagggaatcaacaccaagctgaaccatgcaatcaaagcattattacttatgaaaacaacacctgggtaaatcaaacatatgtcaacatcagcaataccaattttcttactgaaaaagctgtggcttcagtaacattagcgggcaattcatctctttgccccattagcggatgggctgtacacagtaaggacaacggtataagaatcggttccaagggggatgtgtttgttataagagagccgttcatctcatgctcccacttggaatgcagaactttctttttgactcagggagccttgctgaatgacaagcactccaatgggaccgtcaaagacagaagccctcacagaacattgatgagttgtcctgtgggtgaggctccctccccatataactcaaggtttgagtctgttgcttggtcggcaagtgcttgccatgatggcaccagttggttgacaattggaatttctggcccagacaatggggctgtggctgtattgaaatacaacggcataataacagacactatcaagagttggaggaacaacatactgagaactcaagagtctgaatgtgcatgtgtaaatggctcttgctttactgtaatgactgacggaccaagtaatgggcaggcctcatataagatcttcaaaatggaaaaagggaaagtagttaaatcagtcgaattgaatgcccctaattatcactatgaggagtgctcctgttatcctgatgctggcgaaatcacatgtgtgtgcagggataattggcatggctcaaatcggccatgggtatctttcaatcaaaatttggagtatcaaataggatatatatgcagtggagttttcggagacaatccacgccccaatgatggaacaggcagttgtggtccggtgtcccctaacggggcatatggagtaaaagggttttcatttaaatacggcaatggtgtttggatcgggagaaccaaaagcactaattccaggagcggctttgaaatgatttgggatccaaatgggtggactggaacggacagtagcttctcggtgaaacaagatatcgtagcaataactgattggtcaggatatagcgggagttttgtccagcatccagaactgacaggattagattgcataagaccttgtttctgggttgagctaatcagagggcggcccaaagagagcacaatttggactagtgggagcagcatatctttttgtggtgtaaatagtgacactgtgggttggtcttggccagacgatgccgagttgccattcaccattgacaagtag

SEQ ID NO: 10911 - DNA, 10257 bp, unidentified
  source 1..10257: mol_type = other DNA
  misc_feature 1..10257: note = Synthetic
gtgaacaagttttttgatcagtggataatgactaaaaaaccaggaaagtccggcaatcgtcggactgtcaatatgctaaagcgcggagcatcccgcgcacttggcccactagccaagtttaagaggatgttttccagcctgctggatgggagaggaccattacggatgatcctagcccttctggctttctttaagtttacagcacttagaccaacggctggactgctgaggagatggatgacagtggacaagttacacgccattgctctactccgcagcttcaaacgtgacattgcaaccatgaccaacaccatcaacagaaggaagaagagaggaggggagttaaccctcctcctgccactcctggtatgttctggcatggcgctcaaggtcacaacttacaacggatccccactcttgaacatcaccaaatatgacgtagggaaagtccttacaatcaccacaaccagtggagagaaccgttgtgtggttcaagccatggatgtcggggaagactgtgatgacagaatcacgtattcatgccctgccattctaaacaccgaagaacctgatgacgttgactgctggtgtgacaagactccagcctatgtcacttacggcagatgcaccaagacaagacaccacaagagatcaaggcgctccaccaacatagcaggccaccaagacaaccatttggaatccagatccaatgtgtggatggacacccaaaaagcaaccaattacttgacaaagactgaaaattggattctcagaaacccaggctacgcccttgtagcagtcgttatgggctggagcctcggcacttcgaggcctcaaaaagtgattttcaccataatgcttttgctcattgctccggcgtatagcctcaggtgccttggggttgaaaacagagacttcattgaaggggtgtcaggtggcacatgggtggatgtggtcctggagcacaatgggtgcgtcacaatcatggccccagacaagccaaccatcgacgttcatctcgtcagtacgaaggtcaaatctccagcgaccattaggacctactgcaccaaggcgaccgtgactgacttgtttgttgagaaccggtgccccagtatgggggaggcccataaccccaaagctgctgatgcggcctttgtgtgcaagaaaagcttcagtgatagaggttggggaaacggttgcggcctttttggaaaggggagcctggaaacgtgtgccaggttcacctgtgacaccaccgccacaggttacatcatccaaaaggagaacttggaatacacaatcctcacgagtgtgcatgcctcccagcaaacagaacatcatctcaacgatacggtcggagaagcgaacaaacactcgtcaaggacggtcgtcacagccacagctccttcacgaaccacagatctcggggattacggcacggtcactatggattgtgagccccgaggtggccttgattttgacaactattacctgatgcaggttgaggacaacagctggctcgtgaacagagagtggttccatgacattaatctgccatggcaaggaggctcagtgggctcttggagaaaccgagagagcctaattgagtttggtgagacacatgccacaaagcaggaaattctggcgcttggttcccaagttggttcccttcaagtagctttagcaggggcaatgaccacaaaatatcagaacagtgaagccacgattactagtggacacctcaagtgccgttttaaattggacaaactcaagatcaaagggaccacctatgctatgtgcaaaggctcttttgcgtttactaaaacgccagctgacaccgggcatggaacagttatggtcgagttatcctactcagggaccgacggcccctgtaggattccgctgttcatatcgcagtcactcagcaacattgaacctgtgggccgtctcgtcacagtcaatccgatagtttccacttcggaaactcagaagaaagtcatgatagaagtggagcccccctttggtgactcgttcatcatagcaggaacaggcgaaccgcgggtacactatcattggagaaagtcgggtagttccataggagctgccttctcaactactatgaaaggtgctaagcgtcttgcagttttgggcgatgccgcctgggattttggttccgttggtggtatcattacatctgtgggcaaagcggttcaccaggtatttggaggaatgttccggaccctctttgggggcatgtcatgggtgacgcaggttctccttggtgctctatgcttatggctcggcatcaacgccagggagaagaccatagccatgatgtttttggcagttggaggaatacttgtcttcctggcgacctcagtctcagcggaagttggatgctcatttgacatggaccgcaaagaaatgaaatgcggccaaggggtctttgtctttaatgatgccgagagctggtacactaagtataagttccatccagagtctcccaaaaggctggctggttcaatccttaaagccagcacggaaggacagtgtggactccgctctgtttccagacttgagcacatcatgtggaagagcatttctcatgaactcaacgccatcctttttgagaacgcagccaaccttaccgtggtcgtccgtgacacggactactaccgaagagcaccattaaccttgccaattggtgatgaattacctttcggctggaagaaatggggaaaacacatcctctatgatgtgccagtccaaaactcaacattcactatagatggacccgtaaatgcggaatgtcctgaagagaaaaagtcatggaacggattccgggttgatgactttgggttcgggcttttctctacatcagtttggcttgacatacgaggacagtaccaccttgattgtgacacaaagatggttggcgccgccgcaaaaggagacaaagcagtgcatggagatctaggctattggatagaaagttctaagtccaccaactggacgttagaacgagcctacttcaacgaaatcaaatcgtgcacttggccaatcacccacactctctggaatggtggcgtggaggagtcagacctgattatccctcgctccaaagccggcccagtgtctcatcacaacacacgcaggggctacaagacccaaatcaaaggaccatggaacctgactcctcttgaaataaaatttgagaattgtccaggaacctcggtcgacatcactccagaatgtggaaacagagggccctcgctacggaccaccactgcgagtggaaaggtgatcaccgactggtgttgccgcagctgtacaatgccccccttgaccttcagggctccagacggctgttggtatggaatggaaattaggccaaagcatgaaaaggaagaaacactcatgaagtcatcagtagctgccggggaatggcagggtattgacaacttctcacttgggattctcgttctggcggtcagcatccaggagggacttcgtaaacgcattctagggaagcacaccctttggatgatcgccgctacattcttcgccatgctgctaggtgaactcacttatgtggacatagcgagatatgcaatcctagtaggagcggctttcgctgaacaaaattcgggcggtgatctcctgcatctcgtcctagtagcgacattcaaagtcagacccgtggctcttctcggatatttgtgtcgtggaagctggtgccgccgccaatctctgctcctgtccatcagtgccgttctcattcatttggctcttgaggggctgtcctgggaatatatgagtgttgtagaatcggcatcagttgcgctgctgctcgtacgcgctgtcgtagccacagaagcttccaacatttgcctcccactcatagccctactctctccagcaggaacttacacagtactaggagtcttcagattctcgatgggccttctcatatgttgcaccgtcttgaaatgtcggcggactgctgccgtgaagaaagctgcagtccccatagctgccctccttttcagggacctaggtgtgagccccgttgtggcgttggcttttgcctacctaggaagcacgtccaagcgcagctggcccatcaacgagtcgctagccgctttagggatcttgtgcgccctctttggggccgcttctgaggctgaacttaaccttgctgggcctctagcagctggaggactcctcctcttggcatacgtggtttctgggcgcggcaatgacttgtacatagagaaagcatgcaacatcagctggtccacggaagcagctgtcacaggtgaatcactcaaccttgacgttaagctggatgaacaaggtgacttcgccctcatagaggatgaaggacctcccctcaataaagtggttatcaagatacttctcatggccattagtgggctatacccggtagccgtcccattcgcgataggagcctggtatttgctggagaaatccagtaaacgttctggagccttgtgggacatcccggctcccgttgagaggagtagagctaccggagaagacggggtttaccggatctacgcaaggaggctctttggatcaggccagataggagttggagttatgaaagatggaacatttcataccatgtggcacgtcacacgaggggcagcccttgtcctaggtgaaggaatcctggagccacattgggctgatgtgcgccatgacatgatcgcgtacaacggcaattggaagcttactaataaatggaacggggaggaatttgtccagctcatagcagtagaacctggcagcagagtacaacacgttcaaaccaagccaggtaagttcaaaactcaagacggagagataggtgccctggatttggatttcgcagcaggaacttccggctctcccattgttaacagtgaaggagaggtcatagggctctatggcaatggggtgttgattcatggagagcactatgtcagcgccataacgcaaatagaagaagggataggtgagtcaaagaccgagatggaagacaggtggttcaagaaacggagcctcacagtcttggacttacaccctggcgcaggtaagaccaggcgaattctaccttccatcgtggaggaatgtgttacaaggcgtttgaggacactggtgctcgcacccacaagagtcgtggcatcagagatgcatgacgcgctgcgtaagttgcctgtcagataccacaccccggctgtctccgcagaaagaacaggcacagaaattgttgacctgatgtgccactcaaccttcaccatgaggctactgcaaggcattagagttccaaattacaacatgtacataatggatgaagcacacttccttgacgcggccagcgttgcagctaggggttacattgagactagagtcaatcttggggaagctggggccatttttatgacagctacccccccaggcacctcggaagcctttccccagtcgaatgcccccattcatgatgaggaagtaaggattccagataaggcttggagcgccggctatgaatggataaccaactacggagggaaaactgtgtggtttgttccttcaatcaagcaaggcatggaattggccctatcacttcaaaaagctggtaagagagtagtacaactcaatagaaagacctttgagactgactaccccaagtgcaaaaaggacaactgggactttgtcatcacgacggatatatcagagatgggagctaacttcaacgcagacagggtaatagattccaggaaaacgataaaacctgtccttgttgatggaagagttgttctccagggacccatagccatcacggctagctcggccgcccaacggaggggaagagtggggagaagatctgatcgcctcggtgatgtgtatgcctacagtggccacaccaatgaagataactcagaccacgccacttgggtggaagcgcgcatgctcttggacaacatacatgttcaaggggctgtggtagctcagttgtacacgccagagagagaaaaagtggatgccttcgaaggtgagtacaagctcccccttcgagatcgcaaatgcttttccgagctcattagaacaggcgaactccctgtttggttggcctatcaggccgcagccgctggaatggagtatgcagatcgcagctggtgttttgacggacccattgagcacactcttctcgaaaacaacatggaagtcgagatttggaccaaaactggacagcagaaggtactgagacctcgatggctggatgggagagtcaatgcggatcctatggccctcaggagtttcaaggacttcgccgcaggcaaaaggagtgccgctttcatcctggactcctttgcaacccttcccagtcatctgggaggtcggtttcaagaagcccttgacacagcattcatattagcgagagccgaacctggaagtagaagccacaaagaagccctgggtaacgccccggaaatgctcgagacatttcttctgatagccctgtcaaccctgattactttggggattgtcatggttcttgtcagaggcaaaggtccgggaaaactcgccttcggcatggctatcatagcaggcatggtttggcttctatggactgcctcagtccacccagggaagatagctgcagctacggtcatagtctttctcctcctcattgtgctcatccccgagcctgagaaacaacgctcggtgcaggacaaccatctagctatggtcatgcttggcatagcgaccatcatgagtgtagtggccgccaatgaaatgggttggcttgagaggaccaaaaaagaccttgggataggtattgaggtcccagacacgcaaatgccagcttggcgccttgacatcaggccagccacagcatggtctttgtacgccgccatgacagccctcctcacgccccttttccagcacctcatcctgactcgatatgccaacatttcactcatggcaatagcagctcaagcaggagcgcttttcagcatggggagcggaatacccttctcaaaccttgacatgagcgttcctattattggtctcgggtgctggcttcagatcactcccttgagtctcatggccactggggtccttttgggcctccattacatgttcctgctccccggccttcaagccatcgccgcacgtgatgctcagcgcaggacggcggctggggtcatgaagaatcctgttgttgacggcatggtggttacagatattcccccgctggatggagtaacaccactgactgagaaaaagctgggacagatactcctaattggagttggtgtggcaggagtggtggttgccagggatatcagggcttggagtgagttaggtgtcttagctagtgcaggtgttgccaccctgattgaaggaggggccgggaagtactggaacgccaccacggcttcagctctttgcaacttgttcagagggaactacctggccggaatccccttgacttacactgtcattcgcaattccagtttgacaaccaagcgaggtgggggcagcggggagacactcggcgagaagtggaaattcctcctaaaccgtctcaacacttatgacttcatgcattaccgccgcagccacatcacagaagtcaatcgcgaacccgcccgggctgccatgagatctggtgacctacacaggggggctgctgtttccaggggctcagccaagctgcgctggatgcacgaaagaggctatgtcaagctctcagacaaagtggttgacctaggttgtgggagaggcggctggtgttactatgcagccacaataaaggatgtgaaggaagtcaaaggctacactaaaggaggaagagggcatgaggaaccggtcatgacccagtcatacggctggaaccttgttaccatgaagagtggcgtggacgtgcactacaaagagccagagagctgtgacaccttgttatgtgacattggtgaaagcagcagctctgtcacaatagagagcaacaggaccctcaaggtccttgaattggctgaaggatggctcaaaaggaatccggccgcttctttctgtgtcaaagtgttgtgtccgtacaccccttccgtcgtagaaaaactgacgaccctccaacatgtgtacggaggaagtgtggtccgtaacccactgtcccgcaactcgtcacacgagatgtactgggttagtgggtacaggggcaacctggtgcacacaatcaactccacttcaagtcttcttcttaggcgcatggaaggtaagtttgtggaacctcggtacgaggaggatgtcaacttgggaagcggcacccgttccgtctgcatcgtccctccggctccctgctgtgagaaagtggccatgcgtgtgaacagactaaaagcggaacaccgggctacatggcatgaagacccagaacatccatacaggacctggcactaccacggtagctacgaagtgcagccaaccggttccgcctcaagtactgtgaacggagtcatgaggttgctaacaaaaccatgggacgtgatttcagaggtgacaaagatgtctatgacagacaccaccccatttggccaacaaagggtgtttaaggagaaggttgacacaaaagctccagaaccagctgacggagtcgccatggccacaatcataacctccgagtggctatggtcttacctcgctaggaacaaaagaccgcgaatctgcaccaaggaagaattcatcaacaaagtcaggtcaaatgcagcattgggccccgtgtttcatgaagaaaacaagtggaaggacgcgcttgaagcagtttccgaccctcatttctgggacttagtcgacgcagaacgcaagaaccatctccaaggcaagtgcatgtcgtgtgtgtacaacatgatggggaaaagggagaaaaaacaaggagaattcgggaaagcgaaaggtagtcgtgccatttggtacatgtggctaggggctaggttcctagagttcgaagctctcggctttcttaatgaagaccactggctgggacgggaaaattcaggaggaggcgtcgaaggcctggggctgcagagactcgggtatgtgcttgaggagctaggaagcaaaaacgggatcctttacgccgatgatacagccggatgggacaccagaatcaccataaatgaccttgaaaatgagagccacatcaccgagtacatggaaggagagcataaaaagctcgcaaaggctgtcattgaccttgcctacagacacaaagtggtgcgcgtcatgaggccaagtaagaacgggacggtgatggacatcatctcacgtgaagaccaacgagggagcggacaggtcgttacttacgccctgaacacattcacgaatcttgttgtacaattggtgagaatggcggaagcagagggcatcctctcacccaatgacataggggagcttgatgcgacaaccaaggtccagctccgcaggtggctggagagaaatggtgaggaccggctcaaacgcatggctgtcagtggagacgactgtgtggtcgctgcttttgatgaacggtttgctgaggcactacacttcctgaatggcatgtcaaaggttaggaaggacatcagagaatgggaaccatccaaaggttggaaaaattgggaggacgtccctttctgctcgcatcactttcataaggtcctcatgaaggacggtcgtcatctggtggtgccatgcagaaaccaggatgagctcataggtagggcccgggtcatgcccggagtctgtgatatccgcagttctgctggactggccaaggcctatgcgcagatgtggagcctcatgtacttccatcgtagggatctacgcctaatttccaacgccgtgtgctcagcggttcccattgattgggttccgaccggaagaacaacgtggtctattcacggaaaaggtgagtggatgacgacagaggacatgctcgaagtttggaaccgggtgtggattagagacaacccccacatggaagataagactgaagtgaccaaatggcaggatgttccctatttgggcaaaagagaagatctatggtgtggctcgctcattggacacaggcccagaacgacttgggcagaaaacatccgaagaactgtggagcaggtgcggaggatcataggaggggaacgttactctgattatatgggaacccaaaagcggtatgaattggaaaatgtacccgcttttgaaggagtcatttaa

SEQ ID NO: 10912 - DNA, 10233 bp, unidentified
  source 1..10233: mol_type = other DNA
  misc_feature 1..10233: note = Synthetic
atgaccaaaaaaccaggaaggcccggtagaaatcgggccgtcaatatgctaaagcgcggtgcgtcccgcgcgcttggtccaatgatcaagcttaagaggatgctttttggcctgctggatgggagggggccgctcaggatggtcttggccattctggcgttcttcagatttacagcattgaaaccaacggcaggactattgaagaggtggggcatgatggacaaagtacatgccttgtctcttttgaaaggatttaagaaagatttggcttccatgaccgacttcgtgcaccttcccaaaaagaagagtggggtttccataattgggaggatgctggttttttcattcacagcagcggtcagagtcaccctagaaaacggcatgtctttgatgaaaattcaaaaggctgacgttggaaaggtcatcaccatacgcactgaccgaggtgaaaacaggtgcatagtgcaagcaatggatgtgggcgaggattgtgaggacacgatgaagtatctctgcccagccatcgaaaacccttcagaacctgatgacattgactgttggtgtgacaaggcagacgccatggtgacctacgggagatgttcaaaaactcgacattctaggaggtcacggcgttcaacgaatatagctggacacgccgattcaagattggacagcagaggttctgtgtggatggacaccaaaaaagccacaagctatctgacgaaagcagagagctgggcccttcgcaaccccggatacgctctggttgctgctgtattgggatggagccttggaacctcaaacgcccagaaggtgatattcaccgtcatgattttattgattgccccggcctatagcatcagatgtgtgggggttgagaatcgggacttcattgaaggggtgtccggaggaacttgggtggacgtggtcctggagcacgggggatgtgtgaccattatggccccagacaagcccacaatagatttggaactaacatcaacgatagccaaatcgatggcagtgactagaacttactgtgtgcaagctcaagtttcggaactgtccgtggaaactagatgtccaaccatgggcgaagcgcacaattccaagtcaagcgacgctgcctacgtgtgcaagaaaggattcagtgacagaggctggggaaatggatgtgggctctttgggaaaggtagcatggagacatgtgcaaagttttcatgtcagaccaaagcggaagggaggattattcaacgggagaacttggaatataccatccacatgaacgtccacgcctcacaggagaccggccatttcatgaatgacactatcgccagtgagaacaagcacggagccaagatatccattacagccacgggcccttcacgaacggctgatttaggggactacggcatggtgaccttggattgcgaaccaagagccgggcttgattttgacaatttgtacctacttacacttggaaggaacagctggcttgtcaatagagactggtttcacgatgtaaaccttccatggataggaggagcagaaggtcattggaaaaacagagagtccttggtggagttcggaaaaacccatgccaccaagcgagaagtgctagccctaggttcacaagaagggacattgcaagtggctctagcgggcgccatgatagcgaaatttggttcaaatgtggcaactataaatagtggacatctaaagtgcaggctgaaattggacaaactcaaaataaaaggcaccacgtaccacatgtgtaagggctcgtttgctttcacaaaaacgccttctgacacaggccacggcacggtgctgctagaattgacttattctggatcagatgggccatgcagggtgcccatatcaatgtctgtgagcctgagcaacatagagcccgttggtaggatggtaactgtaaaccccatagtgctatcctcttccccccagaaaacaatcatgatcgaagtggaaccaccatttggagactccttcatcatcgctggaacaggcgaaccaagggcgcactaccactggaggaaatcaggaagcagcattggggcagcgtttgctaccaccatcaagggagccaggcgacttgccgtgatcggtgatgacgcatgggacttcggctctgtgggaggaatattaaactcagttgggaaagctctacaccagatttttggaggaatgttcagaactctctttggaggcatgtcttggtttacccaaattatgattggggccttgtgctgttggctggggatcaacgcccgggacagaaccatcgctgtcacattcttggcagtgggaggagtccttgtgtttctcgctacttctgtgaacgcggattccggttgtgctcttgatctgaagagaaaggaattcaagtgtggaaatggaatatttgtgttcaatgacgcggaagcatggtcccactcatatcgatatcatcccagtacacccaagaagttagccggctccatagttagagccattgaggaaggacaatgtggagtcagatcagttggcaggttggaacatgaaatgtggagagccaatgctagggagataaacgccatccttcttgagaatgaaaagaacctgagtgttgtcgtcttggaaagtgaatactacagaaaggccaagaacctgatgcccataggcgacgaaatgccatttggatggaagagctggggaaaaaagttttttgaggaaccacaattgcaaaaccaaacgtttgtggttgatggcagagtgggaaaggagtgccctgaagagaaaagatcatggaataatttcagaatcgaggacttcgggtttggcgttttcactacatcagtgtggatggaacaacgcacagaatacactgaggactgtgatcagaaagtgattggagccgcggtcaaaggagaattagccgctcatagtgatctaggctattggattgagagcaggtcaaaaaacggtagctgggaacttgaacgtgcttatctactagaatcaaaatcatgcagctggcccgcgacccacacactttggaatggaggagtggaggaatcagagttgataatacccaagagtagagcaggcccagtgtcacaccacaacaccagaaaaggctaccataaccaaattaaaggaccatggcaccttaccccattggagatcaggtttgaaagttgcccaggaacgaccgttgtgactaccgaggaatgtgggaatagaggaccctctctaaggacaaccactacaagcggaaaggtaatttcagagtggtgttgcaggtcatgcacaatgcccccattgagttttagaaccgccgatggttgctggtatgggatggaaattaggccattgaaagaacgagaagagaccatggtaaagagccacgtgagtgccggcagaggggacggcgtcgacaacttatccttgggattgttggtgttgacgattgctctccaggaagtgatgcgcaagagaatcttaggacgtcacataacctggatggtgatagctgtgttcatggcaatgattctagggggactcagttaccgtgatttgggaaggtacttggttttggttggcgccgccttcgctgagcggaactcaggaggggacttgctccacttagtgctggtggctacattcaaagtcaaaccgatggccttactaggcttcgtgcttggggggaggtggtgtcggcgacagtcgctcctactctccattggcgcagtcctagtgaattttgcactggagttccagggaggatactttgagctagttgattcactcgcgctagctctattgtttgttaaggctgtggtccagactgacacgacttcggtatcgctcccgctgctggcagctcttgccccggctggatgctacacggttttggggacacaccggttcattatgctaaccttggttttggtgacattcctggggtgtaaaaagaccgcctctgtgaaaaaagccggaacggctgcggttggggtggttctgggcatggttggaatgaaaacaattcccatgttgggaatgctgatggttaccagcagggcaagaagaagctggcctctccatgaggccatggctgcagttggcattctatgtgccctctttggagccctggcggaaactgaggttgacttggctggaccgttggccgcggctgggctcatcgtcatggcttatgttatctcaggcagaagcaatgatctgagtatcaaaaaagttgaggatgtgaaatggagtgatgaagcagaagtcactggagagagtgtcagctaccacgtgagcctagatgttcgaggagacccaacattaacggaggactcaggacctggactggaaaaggtgctgctgaaggttggattaatggcaattagcgggatttaccccgtggccattcccttcgccttgggagcttggttctttctagaaaagaggtgcaagcgcgcgggagctctttgggacatcccttccccgcgggaagcaaagccagccaaggttgaggacggagtctaccgcatcttttctaggaagctgtttggcgaaagccaaattggagcaggcgttatggtaaagggcactttccacaccatgtggcatgtcacgagaggagcagtattgaaagctggtgaaggccttttggaacctgcctgggctgatgttaggaaagatttaatatgttatggtggaaattggaaattggaggaacattgggatggaaatgaagaagtgcagctcatagcccttgaaccggggaagaaagtaaggcacattcaaacgaaacctggaatcttcaaaaccagtgagggagaaatcggggctctcgaccttgactgcatggctggaacttctgggtctccaatcgtgaacaagaacggggaagtggttggactgtatggaaatggtgttctcattaaaggggatcgctacgtgagcgcgatatctcagaaggaaaacgtggggcaggaagacggagcagagattgaggacaactggttcagaaaaagagagctgacggtccttgacttgcaccctggagcggggaaaacgcgaagagtgcttccccaactggtgcgggaggccgtgaagaaacggctccgaacagtgatcttggcccctacccgtgtggtggcttcagaaatgtatgaagccttaagaggagagcctattagatacatgactccagcggtgcagagtgagagaactggaaatgaaatagtcgatttcatgtgtcactcgactttcaccatgaaactgttccaaggagtcagagttcccaattacaatttgtacatcatggatgaagcccattttcttgatccggctagcgtggctgctaggggatatatagaaacaagagtgagcatgggagatgctggagccattttcatgacagctacaccaccaggaaccactgaggcttttcccccctctaattccccaatcatagatgaggaaacaagaataccagacaaagcctggaattcagggtatgaatggataattgagtttgatggaagaacagtgtggttcgtgcatagcataaagcagggagctgagatcggaacatgcctccaaaaggcagggaaaaaggtgctctacttgaataggaagacctttgagagtgagtaccccaagtgtaaaagtgagaaatgggattttgtaataacaactgacatatctgagatgggggcaaacttcaaagcggacagagtgatcgaccctagaaaaaccattaagcccatactgctggatggaagagtgagcatgcaaggtccaatagccatcactcccgcttcagcggcacaaagaagaggaaggattggtagaaaccctgaaaagcttggagacatctatgcttacagtggaaatgtgagctcagacaacgaaggacacgtgagctggacagaagctagaatgttgttggacaacgtccatgttcaaggaggagtggtggcccaactgtatacgcctgaaagggaaaaaactgaagcgtatgaaggagagtttaaattgaaaacaaaccaaagaaaagtcttctccgagctcatacggactggggacctcccagtgtggctggcgttccaagtggcctcagcaaatgtcgagtaccatgacagaaagtggtgcttcgacggaccaaacgaacacctgttattggaaaacaaccaggaaatagaagtgtggactaggcaaggacaaaggagagtgttgaaaccacggtggttagacggtagaattacttctgaccacttgaacttgaaaagctttaaggaatttgcatccgggaaaaggtcagccttgagcatccttgacttgattgcggtcctcccaagccacctcaatctgagacttcaagaggccctagacactgctgccattttgagccgctctgagccagggagtagaagttacaaagcagccttggagaattctcctgagatgatagaaacctttctgctgtgtgctttggtatgcctaatgaccataggcctggtggtagttctggttagaggaaaaggaccagggaagttggcgtttgggatggtttccatcggcgtgatgacctggctgttgtggtctgcaggagtcgacccagggaagatcgcagctgccgttatcctggtctttctgctgctcgtggtgctgattcctgaacctgaaaagcagaggtctgtgcaggacaaccagttagctatgctcatgttactcatagcgaccatcctaggaggggtggcagcaaatgaaatgggatggctggaaaaaacaaaagcagatctgtcatgggttgtgagagggaggagctcgaccaccaccccggtggttgaattggacatgaaacctgccactgcttggacactgtacgcgttggcaacaacgcttctcactcccctttttcagcatttgattgtcactaaatatgccaatatttctttgatggctattgcttcacaagctggaaccctctttagcatggacagtggtatccccttctcctccattgagttgagtgtgcctttgctcgcccttgggtgctggacccagataacaccctgtagtcttattctcgcatgcgtgctcttgtcaacgcactatgcgattttgctccccggcatgcaggcacaggcagctcgagatgcccagagaaggacagcagccggcataatgaagaacgcagtggttgatggcatcgtggctacagacataccgccccttgatggagctggacccctgacagagaagaaactgggccagttactcttgttcgcagcggccgtcaccggggtggtcataacaagatcgccacgttcttggagcgagttgggtgtgttgggatcggcagttggctcgaccctcattgaaggtagtgctgggaagttctggaatgccaccaccgttacggccatgtgcaatctttttagagggagctatttggctggtgtgccactgacgtacacgattatccgaaacagcaatccaagcaacaagagaggtggtggcatcggagaaacactaggagaaaaatggaaagcacggttaaaccagatgaataccttggaattccaccgatacagacggagccacatcatggaagttgaccgagagccagcgagagctgccctcaagtcaggggactttactagaggagctgccgtatcaagagggagtgccaaattaaggtggatgcatgagcgaggatacatccgactgcatgataaagttgtggacctgggctgtggaagaggcggttggtgctactactcagcgacagtaaaagaagtgaaagaggtcaaaggatacacaaagggaggaagaggacatgaggagccagtgttgacacaaagttatggatggaacattgtgcagatgaaaagtggtgtggatgtcttctataaggaagcggaaccctgtgacgttgttctctgtgacataggtgaatgtagtagttccccggctgtagaggctgaccgctccacaaaggtactggaattggcagagaggtggctagaaagaaatgatggggccgacttttgcatcaaagtgctttgtccatacatgcctgaagtagtggaaaaattgagtaagttgcagctcaggtatggagggtgcttggtgagaaaccctctttccagaaactcgacacatgagatgtactgggtgtcagggtacaaaggaaacttgattggtgtcataaactcgacatcagcactgctgttgaggaggatggagatcaagtttgctgaaccaagatatgaagaagatgtcaacctcagctgtggtaccagggctgtcagcatagcgccaccaaagtttgactacaaaaagatagggcagagagtggaaagactaaaagccgagcatatgagtacatggcactatgattgtgaacacccttacaggacgtgggcataccatggcagttatgtcgtgaagccttcaggaagcgcctcctcccaggtgaacggcgtggtcaagctgttgtcgaaaccatgggatgtgagctcagaagtcacgggaatgtccatgaccgacacaaccccctttggccaacagagagtgttcaaggaaaaagttgacaccaaggcgcctgaacccccagcgggagctgaaatggcctccgttatagtttcagagtggctatggaaacgcttgaacagagagaaaaaaccacgtctgtgcaccaaggaagagtttgtcaggaaagttaggggcaatgcggcgctgggcccggtgtttgaagaagaaaaccagtggaaggacgctgcagaggctgttcaagacccgggattttggaacttggttgacatggagcggaaaaaccatctggaagggaagtgtgaaacatgtgtgtataacatgatgggcaaacgtgaaaagaagaggggagaattcggaaaagcaaaaggaagcagagcaatatggtatatgtggcttggtgctaggtttcttgaattcgaagccttagggtttttgaacgaagaccattggatgagcagaggaaactcaggaggaggagttgaaggactcggaatccagaaactggggtacgtcatgagagagatcggagaaaaaggggggatcctctatgctgacgacacagctgggtgggacacccgaatcaccgagtgtgacttgaggaatgaagcgcacatcatggaatacatggaaaatgaacatcgaaagctagcgcgtgccatctttgaacttacctacaaacacaaagttgtgaaagtgatgagaccaggaaaaggagtaccccttatggacatcatttcacgagaagaccagagaggaagtggccaggttgtgacctatgccctgaacactttcacaaacttggtggtgcagcttataagaatggcagaagcagagtgcgtcctcacgcccgaagacctacatgaaatgtcccaatcggccaagttgagactcttaaaatggctgaaagaagaaggatgggaacgactcacgaggatggctgttagtggagatgactgcgtggtggctgctcctgatgcaaggttcggtgcggccttgacgttcctgaatgccatgtcaaaaattaggaaggacatcaaagaatggacgccctcgaaaggatggaagaattgggaggaagttccattctgctcccaccacttccacagacttcaaatgaaagatggtagagagctagtggtaccatgtcgttctcaagatgagctaattggaagggccagggtgacgcagggtcctggagacctcatgagctcagcatgtctggccaaggcctatgcccagatgtggcagctgctgtatttccacagaagagacttaaggttgatgggaaatgccatatgctcggctgttccagttgattgggtcccgacggggcgcacaacgtggtccatccatggtaaaggagaatggatgacttctgagaacatgctggaagtgtggaaccgggtgtggattgaggaaaatgagcacatggaagacaaaactccagtacgggagtggactgacattccgtacctagggaaaagagaagatccatggtgtggttcatacataggctaccggcctcgttcaacttgggcagaaaacatcaaggtaccagtgaacgtgatccgggttaagattggagggaacaagtatcaagactatctgggaacacagaagaggtatgagagtgagaagagagttgagttccgaggagttctgtag

SEQ ID NO: 10913 - DNA, 1410 bp, unidentified
  misc_feature 1..1410: note = Synthetic
  source 1..1410: mol_type = other DNA
atgaatccaaatcaaaagataataacgattggctctgtttctctcaccatttccacaatatgcttcttcatgcaaattgccatcctgataaccactgtaacattgcatttcaagcaatatgaattcaactcccccccaaacaaccaagtgatgctgtgtgaaccaacaataatagaaagaaacataacagagatagtgtatctgaccaacaccaccatagagaaggaaatgtgccccaaactagcagaatacagaaattggtcaaagccgcaatgtgacattacaggatttgcacctttttctaaggacaattcgattaggctttccgctggtggggacatctgggtgacaagagaaccttatgtgtcatgcgaccctgacaagtgttaccaatttgcccttggacagggaacaacactaaacaacgtgcattcaaatgacacagtacatgataggaccccttatcggaccctattgatgaatgaattaggtgttccatttcatctggggaccaagcaagtgtgcatagcatggtccagctcaagttgtcacgatggaaaagcatggctgcatgtttgtgtaacgggggatgataaaaatgcaactgctagcttcatttacaatgggaggcttgtagatagtattgtttcatggtccaaaaaaatcctcaggacccaggagtcagaatgcgtttgtatcaatggaacttgtacagtagtaatgactgatgggagtgcttcaggaaaagctgatactaaaatactattcattgaggaggggaaaatcattcatactagcacattgtcaggaagtgctcagcatgtcgaggagtgctcctgctatcctcgatatcctggtgtcagatgtgtctgcagagacaactggaaaggctccaataggcccatcgtagatataaacataaaggattatagcattgtttccagttatgtgtgctcagggcttgttggagacacacccagaaaaaacgacagctccagcagtagccattgcttggatcctaacaatgaagaaggtggtcatggagtgaaaggctgggcctttgatgatggaaatgacgtgtggatgggaagaacgatcagcgagaagttacgctcaggatatgaaaccttcaaagtcattgaaggctggtccaaacctaattccaaattgcagataaataggcaagtcatagttgacagaggtaataggtccggttattctggtattttctctgttgaaggcaaaagctgcatcaatcggtgcttttatgtggagttgataaggggaagaaaagaggaaactgaagtcttgtggacctcaaacagtattgttgtgttttgtggcacctcaggtacatatggaacaggctcatggcctgatggggcggacatcaatctcatgcctatataa

SEQ ID NO: 10914 - DNA, 2274 bp, unidentified
  source 1..2274: mol_type = other DNA
  misc_feature 1302: note = n is a, c, g, or t
  misc_feature 1..2274: note = Synthetic
atggatgtcaatccgaccttacttttcttgaaagttccagcgcaaaatgccataagtactacattcccttatactggagatcctccatacagccatgggacaggaacaggatacaccatggacacagtcaacagaacacatcaatattcagaaaaggggaagtggacaacaaacacggaaactggagcgccccaacttaacccaattgatggaccactacctgaggacaatgaaccaagtggatatgcacaaacagactgcgtcctggaagcaatggctttccttgaggaatcacacccaggaatctttgaaaattcgtgtcttgaaacgatggaagttattcaacaaacaagagtggacaaactgacccaaggtcgtcagacctatgactggacattgaacagaaatcagccggctgcaactgcgctagccaacactatagaggtcttcagatcgaatggactgacagctaatgagtcgggaaggctaatagatttcctcaaggatgtgatagaatcaatggataaagaggagatggaaataacaacacacttccaaagaaaaagaagagtaagagacaacatgaccaagaaaatggtcacacaacgaacaataggaaagaagaagcaaagattgaacaagagaagctatctgataagagcactgacattgaacacaatgactaaagatgcagagagaggtaaattaaaaagaagagcaattgcaacacccggtatgcagatcagagggttcgtgcactttgtcgaaacactagcgagaaatatttgtgagaaacttgaacagtctgggcttccggttggaggtaatgaaaagaaggctaaactagcaaatgttgttagaaaaatgatgactaattcacaagacacagagctctctttcacaattactggagacaacaccaaatggaatgagaatcaaaatcctcgagtgtttctggcgatgataacatacatcacaagaaatcaacctgaatggtttagaaacgtcctgagcattgcacccataatgttctcaaataaaatggctagactagggaaaggttacatgttcgaaagcaagagcatgaagctccgaacacaaataccagcagaaatgctagcaagtattgacctgaaatactttaatgaatcaaccagaaagaaaattgagaaaataaggcctctcctaatagatggcacagtctcattgagtcctggaatgatgatgggcatgttcaacatgctaagtacagtcttaggagtctcaatcctgaatctcgggcaaaagaaatacaccaaaacnacatactggtgggacggactccaatcctctgatgacttcgctctcatagtgaatgcaccaaatcatgagggaatacaagcaggggtgaatagattctacagaacctgcaagctagtcggaatcaatatgagcaaaaagaagtcctacataaataggacagggacatttgaattcacaagctttttctatcgctatggatttgtagccaattttagcatggagctgcccagctttggagtgtctggaattaatgaatcggctgatatgagcattggggtaacagtgataaagaacaatatgataaataatgaccttgggccagcaacagcccaaatggctcttcaactattcatcaaagactacagatacacgtaccggtgccacagaggggacacacaaattcagacaaggagatcattcgagctaaagaagctgtgggagcaaacccgctcaaaggcaggacttttggtgtcggatggaggatcaaacttatacaatatccggaatctccacattccagaagtctgcttgaaatgggagctaatggatgaagactatcaggggaggctttgtaatcccctgaatccatttgtcagtcataaggaaattgagtctgtaaacaatgctgtggtaatgccagctcacggtccagccaagagcatggaatatgatgctgttgctactacacactcctggacccctaagaggaaccgctccattctcaacacaagccaaaggggaattcttgaagatgaacagatgtatcagaagtgttgcaatctatttgagaaattcttccctagcagttcgtacaggagaccagttggaatttccagcatggtggaggccatggtgtctagggctcggattgatgcacggattgacttcgagtctggacggattaagaaagaggagttcgctgagatcatgaagatctgttccaccattgaagagctcagacggcaaaaatag

SEQ ID NO: 10915 - DNA, 567 bp, unidentified
  source 1..567: mol_type = other DNA
  misc_feature 1..567: note = Synthetic
atggatgtcaatccgaccttacttttcttgaaagttccagcgcaaaatgccataagtactacattcccttatactggagatcctccatacagccatgggacaggaacaggatacaccatggacacagtcaacagaacacatcaatattcagaaaaggggaagtggacaacaaacacggaaactggagcgccccaacttaacccaattgatggaccactacctgaggacaatgaaccaagtggatatgcacaaacagactgcgtcctggaagcaatggctttccttgaggaatcacacccaggaatctttgaaaattcgtgtcttgaaacgatggaagttattcaacaaacaagagtggacaaactgacccaaggtcgtcagacctatgactggacattgaacagaaatcagccggctgcaactgcgctagccaacactatagaggtcttcagatcgaatggactgacagctaatgagtcgggaaggctaatagatttcctcaaggatgtgatagaatcaatggataaagaggagatggaaataacaacacacttccaaagaaaaaga

SEQ ID NO: 10916 - DNA, 294 bp, unidentified
  misc_feature 1..294: note = Synthetic
  source 1..294: mol_type = other DNA
ctggagatcctccatacagccatgggacaggaacaggatacaccatggacacagtcaacagaacacatcaatattcagaaaaggggaagtggacaacaaacacggaaactggagcgccccaacttaacccaattgatggaccactacctgaggacaatgaaccaagtggatatgcacaaacagactgcgtcctggaagcaatggctttccttgaggaatcacacccaggaatctttgaaaattcgtgtcttgaaacgatggaagttattcaacaaacaagagtggacaaactga

SEQ ID NO: 10917 - DNA, 294 bp, unidentified; identical to SEQ ID NO: 10916
  misc_feature 1..294: note = Synthetic
  source 1..294: mol_type = other DNA

SEQ ID NO: 10918 - DNA, 2274 bp, unidentified
  misc_feature 1..2274: note = Synthetic
  source 1..2274: mol_type = other DNA
atggatgtcaatccgactttacttttcttaaaagtgccagcgcaaaatgctataagtaccacattcccttatactggagatcctccatacagccatggaacaggaacaggatacaccatggacacagtcaacagaacacatcaatattcagaaaaggggaaatggacaacgaacacagagactggagcaccccaactcaatccgattgatggaccactacctgaggataatgagccgagtgggtatgcacaaacagattgtgtattggaagcaatggctttccttgaagaatcccacccagggatctttgaaaactcgtgtcttgaaacgatggaagttgttcagcaaacaagagtggataagctgacccaaggtcgccaaacctatgactggacattgaaaagaaaccagccggctgcaaccgctttggccaacactatagaggtcttcagatcgaatggtctaacagccaatgaatcgggaaggctaatagatttcctcaaagacgtgatggaatcaatggataagggagaaatggaaataataacacatttccagagaaagagaagagtgagggacaacatgaccaagaaaatggtcacacaaagaacaatagggaagaaaaaacaaaggctgaacaaaaggagctacctaataagagcactgacactgaacacaatgacaaaagacgcagaaagaggcaaattgaagaggcgggcaattgcaacacccgggatgcaaatcagaggattcgtgtactttgtcgaaacactagcgaggagtatctgtgagaaacttgagcaatctggactccccgtcggagggaatgaaaagaaggctaaattggcaaatgtcgtgaggaagatgatgactaactcacaagatacagagctctcttttacaattactggagacaacaccaaatggaatgagaatcagaaccctcggatgtttctagcaatgataacatacatcacaaggaaccaacctgaatggtttagaaatgtcttaagcattgctcctataatgttctcaaacaagatggcaagattagggaaaggatacatgttcgaaagtaagagcatgaagctacggacacaaataccagcagaaatgcttgcaagcattgacttgaaatacttcaacgaatcaacgagaaagaaaatcgagaaaataagacctctactaatagatggcacagcctcattgagtcctggaatgatgatgggcatgttcaatatgctgagtacagtcttaggagtttcaatcctgaatcttgggcagaagaggtacaccaaaaccacatactggtgggacggactccaatcctctgatgatttcgctctcatagtgaatgcaccaaatcatgagggaatagaagcaggggtggataggttctataggacttgcaaactagttggaatcaatatgaccaagaagaagtcttacataaatcggacaggaacatgtgaattcacaagcttcttctaccgctatgggttcgtagccaacttcagtatggagctgcccagctttggagtgtctgggattaatgaatcggctgacatgagcattggtgttacagtgataaagaacaatatgatggacaacgaccttggaccagcaacagctcagatggctcttcagctattcattaaggactacagatacccataccgatgccacaggggggatacacaaatccaaacgaggagatcattcgagctgaagaagctgtgggagcagacccgctcaaaggcaggactgttggtttcagatggaggaccaaacccatacaatatccggaatctccacattccggaggctggcttgaagtgggaattgatggatgaagactaccagggcagactgtgtaatcctctgaacccgtttgttagtcataaggaaattgagtctgtcaacaatgctgtggtaatgccagctcatggcccagccaagagcatggaatatgatgcagttgcgactacacattcatggattcccaagaggaatcgttccattctcaacaccagccaaagggggattcttgaggatgaacagatgtatcagaagtgctgcaatctattcgagaaattcttccctagcagttcatatcggaggccagttggaatttccagcatggtggaggccatggtgtctagggcccgaattgatgcacgaattgacttcgagtctggaaggattaagaaagaagagtttgctgagatcatgaagatctgttccaccattgaagagctcggacggcaaaaatag

SEQ ID NO: 10919 - DNA, 567 bp, unidentified
  misc_feature 1..567: note = Synthetic
  source 1..567: mol_type = other DNA
atggatgtcaatccgactttacttttcttaaaagtgccagcgcaaaatgctataagtaccacattcccttatactggagatcctccatacagccatggaacaggaacaggatacaccatggacacagtcaacagaacacatcaatattcagaaaaggggaaatggacaacgaacacagagactggagcaccccaactcaatccgattgatggaccactacctgaggataatgagccgagtgggtatgcacaaacagattgtgtattggaagcaatggctttccttgaagaatcccacccagggatctttgaaaactcgtgtcttgaaacgatggaagttgttcagcaaacaagagtggataagctgacccaaggtcgccaaacctatgactggacattgaaaagaaaccagccggctgcaaccgctttggccaacactatagaggtcttcagatcgaatggtctaacagccaatgaatcgggaaggctaatagatttcctcaaagacgtgatggaatcaatggataagggagaaatggaaataataacacatttccagagaaagaga

SEQ ID NO: 10920 - DNA, 294 bp, unidentified
  source 1..294: mol_type = other DNA
  misc_feature 1..294: note = Synthetic
ctggagatcctccatacagccatggaacaggaacaggatacaccatggacacagtcaacagaacacatcaatattcagaaaaggggaaatggacaacgaacacagagactggagcaccccaactcaatccgattgatggaccactacctgaggataatgagccgagtgggtatgcacaaacagattgtgtattggaagcaatggctttccttgaagaatcccacccagggatctttgaaaactcgtgtcttgaaacgatggaagttgttcagcaaacaagagtggataagctga

SEQ ID NO: 10921 - DNA, 294 bp, unidentified; identical to SEQ ID NO: 10920
  misc_feature 1..294: note = Synthetic
  source 1..294: mol_type = other DNA

SEQ ID NO: 10922 - DNA, 108 bp, unidentified
  misc_feature 1..108: note = Synthetic
  source 1..108: mol_type = other DNA
atgaccaaattgaagtcactaatgctactgaactggttcagagttcctcaacaggtggaatatgcgacagtcctcatcagatccttgatggagaaaactgcacactaa

SEQ ID NO: 10923 - DNA, 1695 bp, unidentified
  source 1..1695: mol_type = other DNA
  misc_feature 1..1695: note = Synthetic
ataacaatggccatcatttatctcatactcctgttcacagcagtgaggggggaccagatatgcattggataccatgccaataattccacagaaaaggtcgacacaattctagagcggaatgtcactgtgactcatgccaaggacatccttgagaagacccataacggaaagctatgcaaactaaacggaatccctccacttgaactaggggactgtagcattgccggatggctccttggaaatccagaatgtgataggcttctaagtgtgccagaatggtcctatataatggagaaagaaaacccgagatacagtttgtgttacccaggcagcttcaatgactatgaagaattgaaacatctcctcagcagcgtgaaacattttgagaaagttaagattttgcccaaagatagatggacacagcatacaacaactggaggttcatgggcctgcgcggtgtcaggtaaaccatcattcttcaggaacatggtctggctgacacgtaaaggatcaaattatccggttgccaaaggatcgtacaacaatacaagcggagaacaaatgctaataatttggggagtgcaccatcctaatgatgaggcagaacaaagagcattgtaccagaatgtgggaacctatgtttccgtagccacatcaacattgtacaaaaggtcaatcccagaaatagcagcaaggcctaaagtgaatggactaggacgtagaatggaattctcttggaccctcttggatatgtgggacaccataaattttgagagcactggtaatctagttgcaccagagtatgggttcaaaatatcgaaaagaggtagttcagggatcatgaagacagaaggaacacttgagaactgtgaaaccaaatgccaaactcctttgggagcaataaatacaacactaccttttcacaatgtccacccactgacaataggtgaatgccccaaatatgtaaaatcggagaaattggtcttagcaacaggactaaggaatgttccccagattgaatcaagaggattgtttggggcaatagctggttttatagaaggaggatggcaaggaatggttgatggttggtatggataccatcacagcaatgaccagggatcagggtatgcagcagacaaagaatccactcaaaaggcatttaatggaatcaccaacaaggtaaattctgtgattgaaaagatgaacacccaatttgaagctgttgggaaagaattcagtaacttagagaaaagactggagaacttgaacaaaaagatggaagacgggtttctagatgtgtggacatacaatgcagagcttctagttctgatggaaaatgagaggacacttgactttcatgattctaatgtcaagaatctgtatgataaagtcagaatgcagctgagagacaacgtcaaagaactaggaaatggatgttttgaattttatcacaaatgtgacaatgaatgcatggatagtgtgaaaaacgggacatatgattatcccaagtatgaagaagaatctaaactaaatagaaatgaaatcaaaggggtaaaattgagcagcatgggggtttatcaaatccttgccatttatgctacagtagcaggttctctgtcactggcaatcatgatggctgggatctctttctggatgtgctccaacgggtctctgcagtgcagaatctgcatatga

SEQ ID NO: 10924 - DNA, 1497 bp, unidentified
  misc_feature 1..1497: note = Synthetic
  source 1..1497: mol_type = other DNA
atggcgtcccaaggcaccaaacggtcttacgaacagatggagactgatggagaacgccagaatgccactgaaatcagagcatccgtcggaaaaatgattggtggaattggacgattctacatccaaatgtgcacagaacttaaactcagtgattatgagggacggttgatccaaaacagcttaacaatagagagaatggtgctctctgcttttgacgaaaggagaaataaatacctggaagaacatcccagtgcggggaaggatcctaagaaaactggaggacctatatacagaagagtaaacggaaagtggatgagagaactcatcctttatgacaaagaagaaataaggcgaatctggcgccaagctaataatggtgacgatgcaacggctggtctgactcacatgatgatctggcattccaatttgaatgatgcaacttatcagaggacaagggctcttgttcgcaccggaatggatcccaggatgtgctctctgatgcaaggttcaactctccctaggaggtctggagccgcaggtgctgcagtcaaaggagttggaacaatggtgatggaattggtcaggatgatcaaacgtgggatcaatgatcggaacttctggaggggtgagaatggacgaaaaacaagaattgcttatgaaagaatgtgcaacattctcaaagggaaatttcaaactgctgcacaaaaagcaatgatggatcaagtgagagagagccgggacccagggaatgctgagttcgaagatctcacttttctagcacggtctgcactcatattgagagggtcggttgctcacaagtcctgcctgcctgcctgtgtgtatggacctgccgtagccagtgggtacgactttgaaagagagggatactctctagtcggaatagaccctttcagactgcttcaaaacagccaagtgtacagcctaatcagaccaaatgagaatccagcacacaagagtcaactggtgtggatggcatgccattctgccgcatttgaagatctaagagtattgagcttcatcaaagggacgaaggtggtcccaagagggaagctttccactagaggagttcaaattgcttccaatgaaaatatggagactatggaatcaagtacacttgaactgagaagcaggtactgggccataaggaccagaagtggaggaaacaccaatcaacagagggcatctgcgggccaaatcagcatacaacctacgttctcagtacagagaaatctcccttttgacagaacaaccgttatggcagcattcactgggaatacagaggggagaacatctgacatgaggaccgaaatcataaggatgatggaaagtgcaagaccagaagatgtgtctttccaggggcggggagtcttcgagctctcggacgaaaaggcagcgagcccgatcgtgccttcctttgacatgagtaatgaaggatcttatttcttcggagacaatgcagaggagtacgacaattaa

SEQ ID NO: 10925 - DNA, 294 bp, unidentified
  misc_feature 1..294: note = Synthetic
  source 1..294: mol_type = other DNA
atgagtcttctaaccgaggtcgaaacgcctaccaaaaacgaatgggagtgcaaatgcagcgattcaagtgatcctcttgttgttgccgcaagtatcattgggatactgcacttgatattgtggattcttgatcgtcttttcttcaaatgcatttatcgtcgccttaaatacggtttgaaaagagggccttctacggaaggggtacctgagtctatgagggaagagtatcggcaggaacagcagagtgctgtggatgttgacgatggtcattttgtcaacatagagctggagtaa

SEQ ID NO: 10926 - DNA, 30 bp, unidentified; identical to SEQ ID NO: 1649
  misc_feature 1..30: note = Synthetic
  source 1..30: mol_type = other DNA

SEQ ID NO: 10927 - DNA, 21 bp, unidentified
  source 1..21: mol_type = other DNA
  misc_feature 1..21: note = Synthetic
atgcatttatcgtcgccttaa

SEQ ID NO: 10928 - DNA, 759 bp, unidentified
  source 1..759: mol_type = other DNA
  misc_feature 1..759: note = Synthetic
atgagtcttctaaccgaggtcgaaacgtacgttctctctatcgtcccgtcaggccccctcaaagccgagatcgcgcagagacttgaggatgtctttgcaggaaagaacaccgatctcgaggctctcatggaatggctaaagacaagaccaatcctgtcacctctgactaaagggattttaggatttgtgttcacgctcaccgtgcccagtgagcgaggactgcagcgtagacgctttgtccagaatgccttaaatggaaatggagatccaaacaatatggatagggcagttaagctatacaagaagctgaaaagagaaataacattccatggggctaaggaggtcgcactcagctactcaaccggtgcacttgccagttgtatgggtctcatatacaacaggatgggaacggtgaccacagaagtggcttttggcctagtgtgtgccacttgtgagcagattgcagattcacagcatcggtctcacagacagatggcaactaccaccaacccactaatcaggcatgagaacagaatggtgctggccagcactacagctaaggctatggagcagatggctggatcgagtgagcaggcagcggaagccatggaggttgctagtcaggctaggcagatggtgcaggcaatgaggacaattgggactcatcctagctccagtgccggtctgaaagataatcttcttgaaaatttgcaggcctaccaaaaacgaatgggagtgcaaatgcagcgattcaagtga

SEQ ID NO: 10929 - DNA, 51 bp, unidentified; identical to SEQ ID NO: 1652
  misc_feature 1..51: note = Synthetic
  source 1..51: mol_type = other DNA

SEQ ID NO: 10930 - DNA, 294 bp, unidentified
  misc_feature 1..294: note = Synthetic
  source 1..294: mol_type = other DNA
atgagccttctaaccgaggtcgaaacacctatcagaaacgaatgggggtgcagatgcaacgattcaagtgacccgcttgttgttgccgcgagtatcattgggatcttgcacttgatattgtggattcttgatcgtctttttttcaaatgcgtctatcgactcttcaaacacggccttaaaagaggcccttctacggaaggagtacctgagtctatgagggaagaatatcgaaaggaacagcagaatgctgtggatgctgacgacagtcattttgtcagcatagagttggagtaa

SEQ ID NO: 10931 - DNA, 30 bp, unidentified; identical to SEQ ID NO: 1655
  misc_feature 1..30: note = Synthetic
  source 1..30: mol_type = other DNA

SEQ ID NO: 10932 - DNA, 294 bp, unidentified
  source 1..294: mol_type = other DNA
  misc_feature 1..294: note = Synthetic
atgagccttctaaccgaggtcgaaacgcctatcagaaacgaatgggggtgcagatgcaacgattcaagtgacccccttgttgttgctgcgagtatcattgggatcttgcactttatattgtggattcttgatcgtctttttttcaaatgcatttatcgcttctttaaacacggtctgaaaagagggccttctacggaaggagtacctgagtctatgagggaagaatatcgaaaggaacagcagagtgctgtggatgctgacgatagtcattttgtcagcatagagctggagtaa

SEQ ID NO: 10933 - DNA, 30 bp, unidentified; identical to SEQ ID NO: 1655
  source 1..30: mol_type = other DNA
  misc_feature 1..30: note = Synthetic

SEQ ID NO: 10934 - DNA, 759 bp, unidentified
  source 1..759: mol_type = other DNA
  misc_feature 1..759: note = Synthetic
atgagccttctaaccgaggtcgaaacgtacgttctctctatcgtcccgtcaggccccctcaaagccgagatcgcacagagacttgaagatgtctttgctgggaagaacacagatcttgaggctctcatggaatggctaaagacaagaccaatcctgtcacctctgactaaggggattttgggatttgtattcacgctcaccgtgccaagtgagcgaggactgcagcgtagacgctttgtccaaaatgccctcaatgggaatggggatccaaataacatggacagagcagttaaactgtatagaaagcttaagagggagataacattccatggggccaaagaagtagcgctcagttattctgctggtgcacttgccagttgcatgggcctcatatacaacaggatgggggctgtgaccactgaagtggcctttgccgtggtatgtgcaacctgtgaacagattgctgactcccagcataggtctcacaggcaaatggtgacaacaaccaatccactaataagacatgagaacagaatggttctggccagcactacagctaaggctatggagcaaatggctggatcgagtgagcaagcagcagaggccatggaggttgctagtcaggccaggcaaatggtgcaggcaatgagagccattgggactcctcctagctccagtgctggtctaaaagatgatcttcttgaaaatttgcaggcctatcagaaacgaatgggggtgcagatgcaacgattcaagtga

SEQ ID NO: 10935 - DNA, 78 bp, unidentified; identical to SEQ ID NO: 1658
  source 1..78: mol_type = other DNA
  misc_feature 1..78: note = Synthetic

SEQ ID NO: 10936 - DNA, 1497 bp, unidentified
  misc_feature 1..1497: note = Synthetic
  source 1..1497: mol_type = other DNA
atggcgtcccaaggcaccaaacggtcttatgaacagatggaaactgatggggatcgccagaatgcaactgagattagggcatccgtcgggaagatgattgatggaattgggagattctacatccaaatgtgcactgaacttaaactcagtgatcatgaagggcggttgatccagaacagcttgacaatagagaaaatggtgctctctgcttttgatgaaagaaggaataaatacctggaagaacaccccagcgcggggaaagatcccaagaaaactggggggcccatatacaggagagtagatggaaaatggatgagggaactcgtcctttatgacaaagaagagataaggcgaatctggcgccaagccaacaatggtgaggatgcgacagctggtctaactcacataatgatctggcattccaatttgaatgatgcaacataccagaggacaagagctcttgttcgaactggaatggatcccagaatgtgctctctgatgcagggctcgactctccctagaaggtccggagctgcaggtgctgcagtcaaaggaatcgggacaatggtgatggaactgatcagaatggtcaaacgggggatcaacgatcgaaatttctggagaggtgagaatgggcggaaaacaagaagtgcttatgagagaatgtgcaacattcttaaaggaaaatttcaaacagctgcacaaagagcaatggtggatcaagtgagagaaagtcggaacccaggaaatgctgagatcgaagatctcatatttttggcaagatctgcattgatattgagagggtcagttgctcacaaatcttgcctacctgcctgtgcgtatggacctgcagtatccagtgggtacgacttcgaaaaagagggatattccttggtgggaatagaccctttcaaactacttcaaaatagccaaatatacagcctaatcagacctaacgagaatccagcacacaagagtcagctggtgtggatggcatgccattctgctgcatttgaagatttaagattgttaagcttcatcagagggacaaaagtatctccgcgggggaaactgtcaactagaggagtacaaattgcttcaaatgagaacatggataatatgggatcgagcactcttgaactgagaagcgggtactgggccataaggaccaggagtggaggaaacactaatcaacagagggcctccgcaggccaaaccagtgtgcaacctacgttttctgtacaaagaaacctcccatttgaaaagtcaaccatcatggcagcattcactggaaatacggagggaaggacttcagacatgagggcagaaatcataagaatgatggaaggtgcaaaaccagaagaagtgtcattccgggggaggggagttttcgagctctcagacgagaaggcaacgaacccgatcgtgccctcttttgatatgagtaatgaaggatcttatttcttcggagacaatgcagaagagtacgacaattaa

SEQ ID NO: 10937 - DNA, 144 bp, unidentified; identical to SEQ ID NO: 1668
  source 1..144: mol_type = other DNA
  misc_feature 1..144: note = Synthetic

SEQ ID NO: 10938 - DNA, 144 bp, unidentified; identical to SEQ ID NO: 1668
  source 1..144: mol_type = other DNA
  misc_feature 1..144: note = Synthetic

SEQ ID NO: 10939 - DNA, 2151 bp, unidentified
  misc_feature 1..2151: note = Synthetic
  source 1..2151: mol_type = other DNA
atggaagactttgtgcgacaatgcttcaatccaatgattgtcgagcttgcggaaaaggcaatgaaagaatatggggaagatccgaaaatcgaaacgaacaaatttgccgcaatatgcacgcacttagaagtctgtttcatgtattcagatttccactttattgatgaacggggcgaatcaacaattatagaatctggcgatcccaatgcattattgaaacaccggtttgaaataatcgaagggagggaccgaacaatggcctggacagtggtgaatagtatctgcaacaccacaggagttgagaagcctaaatttctcccagatttgtatgactacaaggagaaccgatttattgaaattggagtgacacggagggaagttcacacatactatctagaaaaagccaacaagataaaatctgagaagacacacattcacatattctcattcactggagaggaaatggccaccaaagcggactacacccttgatgaagaaagcagggcccgaatcaaaaccaggctgttcactataaggcaggaaatggccagtaggggtttatgggattcctttcgtcagtccgagagaggcgaagagacagttgaagaaagatttgaaatcacagggactatgtgcaggcttgccgaccaaagtctcccacctaatttctccagccttgaaaaatttagagcctatgtggatggattcgaaccgaacggctgcattgagggcaagctttctcaaatgtcgaaagaagtaaacgccagaattgagccatttctgaagacaacaccacgccctcttagattacctgatgggcctccctgctctcagcggtcgaagtttttgctgatggatgcccttaaattaagcatcgaagacccgagtcatgagggggaggggataccgctatatgatgcaatcaaatgcatgaaaacatttttcggctggaaagagcccaacattgtaaaaccacatgaaaaaggcataaaccccaattacctcctggcttggaagcaggtgctggcagagctccaagatattgaaaacgaggagaaaattccaaagacaaagaacatgaggaaaacaagccaattgaagtgggcacttggtgagaatatggcaccagagaaagtagactttgaggattgcaaagatgttagcgatctaaggcagtatgacagtgatgaaccaaagcctagatcactagcaagctggatccagagtgaattcaacaaggcatgcgaattgacagattcaagttggattgaacttgatgaaataggggaagacgttgctccaattgagcacattgcaagtatgagaaggaactatttcacagcggaagtatcccattgcagggctactgaatacataatgaagggagtgtacataaacacagctttgttgaatgcatcctgtgcagccatggatgacttccaactgatcccaatgataagcaaatgcagaaccaaagaaggaagacggaaaactaacctgtatggattccttataaaaggaagatcccatttgagaaatgacaccgatgtggtaaactttgtgagtatggaattctctcttactgatccgaggctggagccacacagatgggaaaagtactgcgttcttcggataggagacatgctcttacggactgaaataggccaagtgtcaaggcccatgtttctttatgtgagaaccaatggaacctccaagatcaagatgaaatggggcatggaaatgaggcgatgcccttttcaatcccttcaacagattgagagcatgattgaggccgagtcttctgtcaaagaaaaagacatgactaaagaattctttgaaaacaaatcagaaacatggccaattggagaatcacccaagggagtggaggaaggctccatcgggaaggtgtgcagaaccttactggctaaatctgttttcaacagtctatatgcatctccacaactcgaggggttttcagctgaatcaagaaaattgcttctcattgttcaggcacttagggacaacctggaacctggaaccttcgatcttggggggctatatgaagcaattgaggagtgcctgattaatgatccctgggttttgcttaatgcatcttggttcaactccttcctcacacatgcactaagatag

SEQ ID NO: 10940 - DNA, 759 bp, unidentified
  misc_feature 1..759: note = Synthetic
  source 1..759: mol_type = other DNA
atggaagactttgtgcgacaatgcttcaatccaatgattgtcgagcttgcggaaaaggcaatgaaagaatatggggaagatccgaaaatcgaaacgaacaaatttgccgcaatatgcacgcacttagaagtctgtttcatgtattcagatttccactttattgatgaacggggcgaatcaacaattatagaatctggcgatcccaatgcattattgaaacaccggtttgaaataatcgaagggagggaccgaacaatggcctggacagtggtgaatagtatctgcaacaccacaggagttgagaagcctaaatttctcccagatttgtatgactacaaggagaaccgatttattgaaattggagtgacacggagggaagttcacacatactatctagaaaaagccaacaagataaaatctgagaagacacacattcacatattctcattcactggagaggaaatggccaccaaagcggactacacccttgatgaagaaagcagggcccgaatcaaaaccaggctgttcactataaggcaggaaatggccagtaggggtttatgggattccttcgtcagtccgagagaggcgaagagacagttgaagaaagatttgaaatcacagggactatgtgcaggcttgccgaccaaagtctcccacctaatttctccagccttgaaaaatttagagcctatgtggatggattcgaaccgaacggctgcattgagggcaagctttctcaaatgtcgaaagaagtaa

SEQ ID NO: 10941 - DNA, 1515 bp, unidentified
  source 1..1515: mol_type = other DNA
  misc_feature 1..1515: note = Synthetic
ctgagtgacatcaacatcatggcgtctcagggcaccaaacgatcttatgaacagatggaaactggtggagaacgccagaatgctactgagatcagagcatctgttggaagaatggttggtggaattgggaggttttatatacagatgtgcactgaactcaaactcagcgactatgaaggaaggctgattcagaacagcataacaatagagagaatggttctctctgcatttgatgaaaggaggaacaaatacctggaagaacatcccagtgcggggaaggacccaaagaaaactggaggtccaatctaccgaagaagagacggaaaatgggtgagagagctgattctgtatgacaaagaggagatcaggagaatttggcgtcaagcgaacaatggagaagatgcaactgctggtctcactcacatgatgatctggcattccaatctaaatgatgccacataccagagaacaagagctctcgtgcgtactgggatggaccctagaatgtgctctctgatgcaaggatcaactctcccgaggagatctggagctgctggtgcggcagtaaagggagtcggaacgatggtgatggaactaattcggatgataaagcgagggattaacgatcggaatttctggagaggtgaaaatgggcgaagaacaagaattgcatatgagagaatgtgcaacatcctcaaagggaaattccaaacagcagcacaaagagcaatgatggatcaggtacgggaaagcagaaatcctgggaatgctgagattgaagatctcatatttctggcacggtctgcactcatcctgagaggatcagtggcccacaagtcctgcttgcctgcttgtgtgtacgggcttgccgtggccagtggatatgactttgagagagaagggtactctctggtcgggattgatcctttccgtctgctgcaaaacagccaggtctttagtctaattagaccaaatgagaatccagcacataaaagtcaattggtgtggatggcatgccattctgcagcatttgaagatctgagagtctcaagcttcatcagagggacaagagtggccccaaggggacaactatctactagaggagttcaaattgcttcaaatgagaacatggaaacaatggactccagcactcttgaactgagaagcagatattgggctataaggaccaggagtggaggaaacaccaaccagcagagagcatctgcaggacaaatcagtgtgcagcctactttctcggtacagagaaatcttcccttcgaaagagcgaccattatggcggcattcacagggaatacagagggcagaacatctgacatgaggactgaaatcataaggatgatggaaagctccagaccagaagatgtgtctttccaggggcggggagtcttcgagctctcggacgaaaaggcaacgaacccgatcgtgccttcctttgacatgagtaatgaaggatcttatttcttcggagacaatgcagaggaatatgacaattga

SEQ ID NO: 10942 - DNA, 366 bp, unidentified
  misc_feature 1..366: note = Synthetic
  source 1..366: mol_type = other DNA
atggatccaaacactgtgtcaagctttcaggacatactgctgaggatgtcaaaaatgcagttggagtcctcatcggaggacttgaatggaatgataacacagttcgagtctctgaaactctacagagattcgcttggagaagcagtaatgagaatgggagacctccactcactccaaaacagaaacgagaaatggcgggaacaattaggtcagaagtttgaagaaataagatggttgattgaagaagtgagacacaaactgaaggtaacagagaatagttttgagcaaataacatttatgcaagccttacatctattgcttgaagtggagcaagagataagaactttctcatttcagcttatttaa

SEQ ID NO: 10943 - DNA, 693 bp, unidentified
  source 1..693: mol_type = other DNA
  misc_feature 1..693: note = Synthetic
atggatccaaacactgtgtcaagctttcaggtagattgctttctttggcatgtccgcaaacgagttgcagaccaagaactaggtgatgccccattccttgatcggcttcgccgagatcagaaatccctaagaggaaggggcagcactcttggtctggacatcgagacagccacacgtgctggaaagcagatagtggagcggattctgaaagaagaatccgatgaggcacttaaaatgaccatggcctctgtacctgcgtcgcgttacctaaccgacatgactcttgaggaaatgtcaagggaatggtccatgctcatacccaagcagaaagtggcaggccctctttgtatcagaatggaccaggcgatcatggataaaaacatcatactgaaagcgaacttcagtgtgatttttgaccggctggagactctaatattgctaagggctttcaccgaagagggagcaattgttggcgaaatttcaccattgccttctcttccaggacatactgctgaggatgtcaaaaatgcagttggagtcctcatcggaggacttgaatggaatgataacacagttcgagtctctgaaactctacagagattcgcttggagaagcagtaatgagaatgggagacctccactcactccaaaacagaaacgagaaatggcgggaacaattaggtcagaagtttga

SEQ ID NO: 10944 - DNA, 33 bp, unidentified; identical to SEQ ID NO: 1660
  misc_feature 1..33: note = Synthetic
  source 1..33: mol_type = other DNA

SEQ ID NO: 10945 - DNA, 24 bp, unidentified
  misc_feature 1..24: note = Synthetic
  source 1..24: mol_type = other DNA
atggggatcacgaaagaaaaataa

SEQ ID NO: 10946 - DNA, 729 bp, unidentified
  misc_feature 1..729: note = Synthetic
  source 1..729: mol_type = other DNA
atggcacatgaaatactgattgctgaaacagaggcatttctaaaaaatgttgctcctgagaccaggacagcaataatttcagcaataacaggaggaaaatcagcctgcaaatcagcagctaaactgattaagaatgaacatcttcccctaatgtctggagaagccaccacaatgcacatcgttatgaggtgcttatatcctgaaataaaaccatggaaaaaggcaagcgacatgctgaataaagcaacttctagtttgaaaaaatcagaaggaagagacataagaaagcaaatgaaagcagctggagacttcttgggagtggagtcaatgatgaaaatgagggccttcagagatgaccaaataatggaaatggttgaagaagtatatgatcacccagacgactacacaccagacatccgaataggaacaatcacagcttggttgagatgcaaaaacaagaaaagtgaaagatacaggagtaatgtctcagaaagtggaagaacagctttaaaaattcatgaagtaagaaaagccagcacagcaatgaacgagattgctggtattactggccttggagaagaagcactatctctccaaagacaaacagaaagtttggccatattatgtaatcacacttttggaagtaatataatgagaccccacttggaaaaagcaataaaaggagttgaaggcagagttggagagatgggacgaatggcaatgaaatga

SEQ ID NO: 10947 - DNA, 549 bp, unidentified
  misc_feature 1..549: note = Synthetic
  source 1..549: mol_type = other DNA
atgtccgacaaaacagtcaaatcaacaaatttaatggcatttgtagccacaaaaatgttagagagacaagaagatttagacacatgcactgaaatgcaagtagaaaaaatgaaaacgtcaacaaaagccaggttgaaaacagaatcttcttttgcacctagaacatgggaagatgcaataaaagatgaaatactaagaagatctgtggatacctcatcgctagacaagtggccggaattgaaacaggaattagaaaatgtttcagatgcattaaaagcggattcgttatggctaccgatgaaatctctctcactatactccaaagtatcaaatcaggagcccagctcgatccctattggggaaatgaaacaccagatattgacaagactgaagcttatatgctctcgcttagagaagctggaccttaacctgagcaaagcagtcttaggaatccaaaattctgaagatcttattttgatcatatataacagagatgtttgtaaaaacactatattaatgataaaatctttgtgtaattcacttatataa

SEQ ID NO: 10948 - DNA, 741 bp, unidentified
  source 1..741: mol_type = other DNA
  misc_feature 1..741: note = Synthetic
atgtccgacaaaacagtcaaatcaacaaatttaatggcatttgtagccacaaaaatgttagagagacaagaagatttagacacatgcactgaaatgcaagtagaaaaaatgaaaacgtcaacaaaagccaggttgaaaacagaatcttcttttgcacctagaacatgggaagatgcaataaaagatggtgagcttctattcaacgggacgattctgcaagcagagtctcctacaatgacgccagcgtccgtagaaatgaaggggaagaaatttcctattgattttgctccaagaaacatagcaccaattgggcaaaatccaatatatttgtcaccatgtattcctaactttgatggaaacgtctgggaagcaacgatgtatcatcatcgtggagcaactttgacaaagacaatgaattgcaactgttttcaaagaacaatttggtgccatccaaatccttcacgtatgagattgagctatgcatttgttttgtattgcagaaatactaagaagatctgtggatacctcatcgctagacaagtggccggaattgaaacaggaattagaaaatgtttcagatgcattaaaagcggattcgttatggctaccgatgaaatctctctcactatactccaaagtatcaaatcaggagcccagctcgatccctattggggaaatgaaacaccagatattgacaagactgaagcttatatgctctcgcttagagaagctggaccttaa

SEQ ID NO: 10949 - DNA, 2298 bp, unidentified
  misc_feature 1..2298: note = Synthetic
  source 1..2298: mol_type = other DNA
aggtcaattatattcaatatggaaagaataaaagaactaagagatctaatgtcgcagtcccgcactcgcgagatactaacaaaaaccactgtggatcatatggccataatcaagaaatacacatcaggaagacaagagaagaaccctgctctcagaatgaaatggatgatggcaatgaaatatccaatcacagcagacaagagaataatggagatgattcctgaaaggaatgagcaaggacaaacgctttggagcaagacaaatgatgctgggtcggacagagtgatggtgtctcccctagctgtaacttggtggaacaggaatgggccgacaacaagtacagtccattatccaaaggtttacaaaacatactttgagaaggttgaaaggttaaaacatggaaccttcggtcccgttcatttccgaaaccaagttaaaatacgtcgccgggtggatataaacccgggccatgcagatctcagtgctaaagaagcacaagatgttatcatggaggtcgttttcccaaatgaagtgggagctagaatattgacatcagagtcgcaattgacaataacaaaagagaagaaagaagagctccaggattgtaaaattgctcctttaatggtggcatacatgttggaaagagaactggtccgcaaaaccagatttctaccggtagcaggcggaacaagcagtgtgtacattgaggtattgcatttgactcaagggacctgttgggaacagatgtacactcccggcggagaagtaagaaatgatgatgttgaccagagtttgatcatcgctgccagaaacattgttaggagagcaacagtatcagcggacccactggcatcactcttggagatgtgtcacagcacacaaattgggggaataaggatggtggacatccttaggcaaaacccaactgaggagcaagctgtggatatatgcaaagcagcaatgggtttgaggatcagttcatcctttagctttggaggcttcactttcaaaagaacaaatggatcatccgtcaagaaggaagaggaagtgcttacaggcaacctccaaacattgaaaataaaagtacatgaggggtatgaagaattcacaatggttgggcggagagcaacagctatcctgaggaaagcaactagaaggctgattcagttgatagtaagtggaagagatgaacaatcaatcgctgaagcgatcattgtagcaatggtgttctcacaggaggattgcatgataaaggcagtccgaggcgatctgaatttcgtgaacagagcaaaccaaagattgaaccccatgcatcaactcctgaggcacttccaaaaagatgcaaaagtgctgtttcagaactggggaattgaacctattgacaatgtcatggggatgatcggaatattacctgacatgactccaagcgcagagatgtcactgagaggagtgagagttagtaagatgggagtagatgaatattccagcacggagagagtggtggtgagtattgaccgtttcttgagggtccgagatcagcaggggaacgtactcttatctcctgaagaggttagtgaaacacagggaacagagaagttgacaataacatattcatcctcaatgatgtgggaaatcaacggtcctgagtcagtgcttgttaacacttatcaatggatcatcaggaattgggagactgtaaagattcaatggtctcaagatcccacaatgctgtacaataagatggagtttgaatcgttccaatccttggtgccaaaggctgccagaagccaatatagtggatttgtgagaacactattccaacagatgcgtgatgttttggggacatttgatactgtccaaataatcaagctgctaccatttgcagcagccccaccggagccgagcagaatgcagttttcttctctaactgtgaatgtgagaggctcaggaatgagaatactcgtgaggggtaactcccccgtgttcaactacaacaaggcaaccaaaaggcttacagtcctcggaaaggacgcaggtgcattaacagaagatccagacgagggaacagccggggtggaatctgcagtattgaggggattcctaattctaggcagagaggacaaaagatatggacccgcattgagcatcaatgaactgagcaatcttgcaaaaggggagaaggctaatgtattgataatgcaaggagacgtggtgttggtaatgaaacggaaacgggactttagcatacttactgacagccagacagcgaccaaaagaattcggatggccatcaattag

SEQ ID NO: 10950 - DNA, 2298 bp, unidentified
  source 1..2298: mol_type = other DNA
  misc_feature 1..2298: note = Synthetic
aggtcaattatattcaatatggaaagaataaaagaactacggaatctgatgtcgcagtctcgcactcgcgagatactaacaaaaaccacagtggaccatatggccataattaagaagtacacatcagggagacaggaaaagaacccgtcacttaggatgaaatggatgatggcaatgaaatatccaattacagctgacaagaggataacagaaatggttcctgagagaaatgagcaaggacaaactctatggagtaaaatgagtgatgccgggtcagatcgagtaatggtatcacctttggcagtgacatggtggaatagaaatggaccaatgacaagtacggttcattatccaaaaatctacaagacttattttgagaaagtcgaaaggttaaaacatggaacctttggccctgtccattttagaaaccaagtcaaaatacgccgaagagttgacataaaccctggtcatgcagacctcagtgccaaggaggcacaagacgtaatcatggaagttgttttccccaatgaagtgggggccaggatactaacgtcggaatcacaattaacaataaccaaagagaaaaaagaagaactccaagattgcaaaatttctcctttgatggttgcatacatgttagagagagaacttgtccgaaaaacgagatttctcccagttgctggtggaacaagcagtgtgtacattgaagtgttacacttgactcaaggaacatgttgggaacagatgtacaccccaggtggagaagtgaggaatgatgatgttgatcaaagtctaattattgcagccaggaacatagtgagaagagcagcagtatcagcagatccactagcatctttattggagatgtgccacagcacacagattggcgggacaaggatggtggacattcttaggcagaacccaacggaagaacaagctgtggatatatgcaaggctgcaatgggactgagaatcagctcatccttcagttttggcgggttcacatttaagagaacaagcgggtcatcaatcaagagagaggaagaagtgcttacgggcaatctccaaacattgaaaataagggtgcatgaggggtacgaggaattcacaatggtggggaaaagggcaacagctatactcagaaaagcaaccaggagattggttcagctgatagtgagtggaagagacgaacagtcaatagccgaagcaataattgtagccatggtgttttcacaagaagattgcatgataaaagcagttagaggtgacctgaatttcgttaatagggcaaatcagcgattgaatcccatgcatcaacttttaagacattttcagaaagatgcaaaagtgctctttcaaaattggggaattgaacatatcgacaatgtaatgggaatgattggagtattaccagacatgactccaagcacagagatgtcaatgagagggataagagtcagcaaaatgggcgtggatgaatactccagcacagagagggtagtggtaagcattgaccggtttttgagagttcgagaccaacgaggaaatgtactactatctcctgaggaggtcagtgaaacacaggggacagagaaactgacaataacttactcatcgtcaatgatgtgggagattaatggccctgagtcagtgttggtcaatacctatcagtggatcatcagaaactgggaaactgttaaaattcaatggtctcagaatcctacaatgctatacaataaaatggaatttgagccatttcagtctttagttcctaaggccattagaggccaatacagtggatttgttaggactctattccaacaaatgagggatgtacttgggacatttgataccacccagataataaagcttcttccctttgcagccgccccaccaaagcaaagtagaatgcagttctcttcattgactgtgaatgtgaggggatcaggaatgagaatacttgtaaggggcaattctcctgtattcaactacaacaagaccactaagagactaacaattctcggaaaggatgctggcactttaactgaagacccagatgaaggcacatccggagtggagtccgctgttctgagaggattcctcattctgggcaaggaagatagaagatatggaccagcattaagcatcaatgaactgagtacccttgcaaaaggagaaaaggctaatgtactaattgggcaaggagacgtggtgttggtaatgaaacgaaaacgggactctagcatacttactgacagccagacagcgaccaaaagaattcggatggccatcaattaa

SEQ ID NO: 10951 - DNA, 2298 bp, unidentified
  misc_feature 1..2298: note = Synthetic
  source 1..2298: mol_type = other DNA
aggtcaattatattcagtatggaaagaataaaagaactacggaacctgatgtcgcagtctcgcactcgcgagatactgacaaaaaccacagtggaccatatggccataattaagaagtacacatcggggagacaggaaaagaacccgtcacttaggatgaaatggatgatggcaatgaaatacccaatcactgctgacaaaaggataacagaaatggttccggagagaaatgaacaaggacaaactctatggagtaaaatgagtgatgctggatcagatcgagtgatggtatcacctttggctgtaacatggtggaatagaaatggacccgtggcaagtacggtccattacccaaaagtatacaagacttattttgacaaagtcgaaaggttaaaacatggaacctttggccctgttcattttagaaatcaagtcaagatacgcagaagagtagacataaaccctggtcatgcagacctcagtgccaaagaggcacaagatgtaattatggaagttgtttttcccaatgaagtgggagccaggatactaacatcagaatcgcaattaacaataactaaagagaaaaaagaagaactccgagattgcaaaatttctcccttgatggttgcatacatgttagagagagaacttgtccgaaaaacaagatttctcccagttgctggcggaacaagcagtatatacattgaagtcttacatttgactcaaggaacgtgttgggaacaaatgtacactccaggtggagaagtgaggaatgacgatgttgaccaaagcctaattattgcggccaggaacatagtaagaagagctgcagtatcagcagatccactagcatctttattggagatgtgccacagcacacaaattggcgggacaaggatggtggacattcttagacagaacccgactgaagaacaagctgtggatatatgcaaggctgcaatgggattgagaatcagctcatccttcagctttggtgggtttacatttaaaagaacaagcgggtcatcagtcaaaaaagaggaagaagtgcttacaggcaatctccaaacattgaagataagagtacatgaggggtatgaggagttcacaatggtggggaaaagagcaacagctatactcagaaaagcaaccagaagattggttcagctcatagtgagtggaagagacgaacagtcaatagccgaagcaataatcgtggccatggtgttttcacaagaggattgcatgataaaagcagttagaggtgacctgaatttcgtcaacagagcaaatcaacggttgaaccccatgcatcagcttttaaggcattttcagaaagatgcgaaagtgctttttcaaaattggggaattgaacacatcgacagtgtgatgggaatggttggagtattaccagatatgactccaagcacagagatgtcaatgagaggaataagagtcagcaaaatgggtgtggatgaatactccagtacagagagggtggtggttagcattgatcggtttttgagagttcgagaccaacgcgggaatgtattattgtctcctgaggaggtcagtgaaacacagggaactgaaagattgacaataacatattcatcgtcgatgatgtgggagattaacggtcctgagtcggttttggtcaatacctatcaatggatcatcagaaattgggaagctgtcaaaattcaatggtctcagaatcctgcaatgttgtacaacaaaatggaatttgaaccatttcaatctttagtccccaaggccattagaagccaatacagtgggtttgtcagaactctattccaacaaatgagagacgtacttgggacatttgacaccacccagataataaagcttctcccttttgcagccgctccaccaaagcaaagcagaatgcagttctcttcactgactgtaaatgtgaggggatcagggatgagaatacttgtaaggggcaattctcctgtattcaactacaacaagaccactaaaagactaacaattctcggaaaagatgccggcactttaattgaagacccagatgaaagcacatccggagtggagtccgccgtcttgagagggtttctcattataggtaaggaagacagaagatacggaccagcattaagcatcaatgaactgagtaaccttgcaaaaggggaaaaggctaatgtgctaatcgggcaaggagacgtggtgttggtaatgaaacgaaaacgggactctagcatacttactgacagccagacagcgaccaaaagaattcggatggccatcaattaa

SEQ ID NO: 10952 - DNA, 54 bp, unidentified; identical to SEQ ID NO: 1690
  misc_feature 1..54: note = Synthetic
  source 1..54: mol_type = other DNA

SEQ ID NO: 10953 - DNA, 465 bp, unidentified
  source 1..465: mol_type = other DNA
  misc_feature 1..465: note = Synthetic
atggctgctaggctgtgctgccaactggatcctgcgcgggacgtcctttgtttacgtcccgtcggcgctgaatcctgcggacgacccttctcggggtcgcttgggactctctcgtccccttctccgtctgccgttccgaccgaccacggggcgcacctctctttacgcggactccccgtctgtgccttctcatctgccggaccgtgtgcacttcgcttcacctctgcacgtcgcatggagaccaccgtgaacgcccaccaaatattgcccaaggtcttacataagaggactcttggactctcagcaatgtcaacgaccgaccttgaggcatacttcaaagactgtttgtttaaagactgggaggagttgggggaggagattaggttaaaggtctttgtactaggaggctgtaggcataaattggtctgcgcaccagcaccatgcaactttttcacctctgcctaa

SEQ ID NO: 10954 - DNA, 15 bp, unidentified
  source 1..15: mol_type = other DNA
  misc_feature 1..15: note = Synthetic
gtgacaaagacataa

SEQ ID NO: 10955 - DNA, 366 bp, unidentified
  misc_feature 1..366: note = Synthetic
  source 1..366: mol_type = other DNA
atggattccaacactgtgtcaagctttcaggacatactgacgaggatgtcaaaaatgcaattggggtcctcatcggaggacttgaatggaatgataacacagttcgagtctctgaaactctacagagattcacttggagaagcagtgatgagaatgggagatctccactccctccaaaacagaaacggaaagtggagagaacaattgagccagaagtttgaagagataagatggttaattgaagaaatgcgacataggttaagaattacagagaatagctttgagcaaataacctttatgcaagccttacaactattgcttgaagtggagcaagagataagaactttctcgtttcagcttatttaa

SEQ ID NO: 10956 - DNA, 15 bp, unidentified
  source 1..15: mol_type = other DNA
  misc_feature 1..15: note = Synthetic
gtgacaaagacataa

SEQ ID NO: 10957 - DNA, 366 bp, unidentified
  source 1..366: mol_type = other DNA
  misc_feature 1..366: note = Synthetic
atggattccaacactgtgtcaagtttccaggacatactattgaggatgtcaaaaatgcaattggggtcctcatcggaggacttgaatggaatgataacacagttcgagtctctaaaaatctacagagattcgcttggagaagcagtaatgagaatgggggacctccacttactccaaaacagaaacggaaaatggcgagaacagctaggtcaaaagtttgaagagataagatggctgattgaagaagtgagacacagactaaaaacaactgaaaatagctttgaacaaataacattcatgcaagcattacaactgctgtttgaagtggaacaggagataagaactttctcatttcagcttatttaa

SEQ ID NO: 10958 - DNA, 15 bp, unidentified
  misc_feature 1..15: note = Synthetic
  source 1..15: mol_type = other DNA
gtgacaaagacataa

SEQ ID NO: 10959 - DNA, 693 bp, unidentified
  source 1..693: mol_type = other DNA
  misc_feature 1..693: note = Synthetic
atggattccaacactgtgtcaagtttccaggtagattgctttctttggcatatccggaaacaagttgtagaccaagaactgagtgatgccccattccttgatcggcttcgccgagatcagaggtccctaaggggaagaggcaatactctcggtctagacatcaaagcagccacccatgttggaaagcaaattgtagaaaagattctgaaagaagaatctgatgaggcacttaaaatgaccatggtctccacacctgcttcgcgatacataactgacatgactattgaggaattgtcaagaaactggttcatgctaatgcccaagcagaaagtggaaggacctctttgcatcagaatggaccaggcaatcatggagaaaaacatcatgttgaaagcgaatttcagtgtgatttttgaccgactagagaccatagtattactaagggctttcaccgaagagggagcaattgttggcgaaatctcaccattgccttcttttccaggacatactattgaggatgtcaaaaatgcaattggggtcctcatcggaggacttgaatggaatgataacacagttcgagtctctaaaaatctacagagattcgcttggagaagcagtaatgagaatgggggacctccacttactccaaaacagaaacggaaaatggcgagaacagctaggtcaaaagtttga

SEQ ID NO: 10960 - DNA, 54 bp, unidentified; identical to SEQ ID NO: 1682
  source 1..54: mol_type = other DNA
  misc_feature 1..54: note = Synthetic

SEQ ID NO: 10961 - DNA, 1638 bp, unidentified
  misc_feature 1..1638: note = Synthetic
  source 1..1638: mol_type = other DNA
atgactaggataactatccttcagattatcctgacactaacacttccggtcatgtgtcaagtctcatttgataaccttgaacaagtaggggtcatgtttgataagcccaagttcctgaagatcacgggtccggctagtactgcgacaatgataatcaaattaataccaacactaggaactatggagagctgtggaacttctgctgttaatgaatataagaagactcttgacaccatcttagtacctctgagggacaccataaacaaattaagtactgatatcactgtagtagaagggacctcaaacatatcaaacaagagagagaagagatttgtcggaatagcgattgcagttggagctgttgccctagctacgtctgcacagataacagcggggattgctctctctaatactattaagaatgcagaggcgatcgaaagtatcaaatcatctatccaagcgtcaaaccaggcaatacagaaagtcatagatgctcaaggaagaactgtcacagtcataaatggtattcaagatcacataaactccgtaattaatccggctttgaaccaactggggtgtgatgtcgccaaaaacacacttgctatatccctgactcagtacttctctaaactttcattgctatttggacctaatcttaggaaccctgtcgaacaacccttgtcagttcaggcgatagccggcttaatggatggtgatattaatgcggtagtatcacaattagggtatactcaatccgacctgcttgacttattgtccacagagtcgatagtggggacagtcacggccattgatatggttaactacatgatccagattgagatgtccttcccccaatatattacaattcctgacacgaaagtactagaagggcacaaaatcaccttcaatgataagggttctgaatggcaaactcaagtccctagcaccatcgcagttagagatatactaattgccggggttgaccctgatggatgttcgatcacaagtacttcttacatatgtaagaatgatccaacatacgccatgtcagaggtccttactaattgtttcagaggcaatacacaagagtgtccgagagccaggataacatctacattcgctactagattcgcaattgcaagatctacagtcatagccaattgtgtcgctgcagtatgtttatgcggtgaccccgggatccctgtagtacagaaagccgaagtgactctgactgcgatgacccttgatcaatgtagcttgataactgtggacgggctacaaatcaaacccagcaaaagcattgcgaacgtaactgccaattttggaaacataacgttagggccagtggtatcagttggggacctagacttatcagcagaactaactaaggtccaatcagatctaaaggaggctcaggataagctcgatgaatcaaatgcaatcctacaaggaattaacaataagatcctgactgctccaacctctatcgcattaattgtagtctctgttgtggttattttgttaatcatagggatgatcagctggttggtctggttgaccaaggcagtcaggaggtccaacactaggtcagaaagggtgacaccaagtgcttacaacaatctaggctttataaaataa

SEQ ID NO: 10962 - DNA, 2265 bp, unidentified
  source 1..2265: mol_type = other DNA
  misc_feature 1..2265: note = Synthetic
atggaaatcaacccatatttgatgtttctaaacaacgacgtcacatcgctgatatcaacaacatacccctatacagggccacctccaatgtcacatggatcatcaaccaaatacactttggaaactattaaaagaacatatgactactcaagaacatcagttgaaaaaacatcgaaagttttcaatataccaagaagaaagttttgcaattgtcttgaagacaaagatgagttggtaaaaccaacaggaaacgttgatatcagttccttgttgggccttgcagagatgatggagaaaagaatgggggaaggattttttaagcattgtgtaatggaggcagaaacagaaatacttaaaatgcacttctctagacttacggaaggaagacaaacatatgattggacttctgaaagaaacatgccagcggccactgctttgcaactgacagttgatgccataaaagaaacagaaggaccatttaaagggacaacaatgcttgaatattgcaataaaatgatagaaatgcttgattggaaagaagttaaattcagaaaagtcaaaacaatggtgagaagggagaaagataaaagaagtgggaaggagataaaaactaaagtacctgtaatgggaattgactcaattaaacatgatgagtttttaattagagcattaactattaataccatggccaaagatggggaaagagggaaattgcaaagaagagcaattgcaacacccggtatgatagtaagaccattttcaaaaattgttgaaactgtagcacagaaaatatgtgagaaattgaaagaaagcggtctacctgttggtggtaatgagaagaaagcaaaacttaagactactgttacttctctcaatgccaggatgaacagtgatcagtttgcagttaatataactggagacaatagtaaatggaatgaatgccaacaacctgaggcttatttagcacttttggcttacatcaccaaagactcctctgatttaatgaaagacttatgcagtgttgctccagtgcttttctgtaataagtttgtgaaacttggacaaggaataagactttcaaataaaagaaaaacaaaggaagtcataataaaagctgagaaaatgggaaaatacaagaatctaatgagagaagaatataaaaacctttttgaacccttagagaaatatattcagaaggatgtctgttttttacctggaggaatgcttatgggaatgttcaacatgctgtcaacagttcttggagtaagtacattatgttatatggatgaagaactaaaagccaaaggatgtttttggactggactccaatcttctgatgactttgttctttttgcagttgcttcaaactggtcaaatatacattggacaataagacggtttaatgctgtatgcaagttaattggtataaacatgtctcttgaaaaatcgtatggttctctcccagaactctttgaatttacaagtatgttctttgatggagaatttgtgtccaatcttgctatggaattgccagctttcactactgcaggagttaatgaaggagttgattttacagctgcaatgtcaattattaagacaaatatgataaataacagcttatcaccttctactgctttaatggccttaaggatatgtctccaagaatttagagcgacttatagagtccatccttgggattcaagagtgaaaggtgggagaatgaaaataataaatgagttcataaaaaccatagaaaataaagatggattattaattgctgatggtgggaaactgatgaacaacattagcacccttcatattcctgaggaagtactgaagtttgaaaaaatggatgaacaatatagaaatagggtattcaaccccaaaaatccctttactaactttgacaaaactattgatatatttagagcacatggcccaataagggttgaagaaaatgaagcagtagtttcaactcatagcttcagaactagagcaaacagaaccctattgaatacagatatgagagcaatgatggcagaagagaaaagatatcaaatggtttgcgacatgtttaaaagcgtgtttgaatcagcggacataaatcctccaattggggctatgagcattggagaggccatagaagaaaaactattagagagagctaaaatgaaaagagacattggggcaatagaagattcagaatatgaagaaataaaagacattataagggatgcaaagaaagctagaattgaaagtagatga

SEQ ID NO: 10963 - DNA, 2331 bp, unidentified
  source 1..2331: mol_type = other DNA
  misc_feature 1..2331: note = Synthetic
ttggaaatgtcttttctattgacaatagcaaaggaatacaaaagactatgccaagatgctaaggcagctcaaatgatgacagtaggaactgtatcaaactacactacgttcaagaaatggactacatcaaggaaggaaaagaatccttcactaagaatgagatgggcaatgagcagcaaattcccaataatagctaacaagagaatgctggaagaagctcaaattcctaaagaacacaacaatgtagccctttgggaagacacagaagatgtttcaaaaagggatcatgttcttgcaagcgcctcttgtataaattattggaatttttgtggaccttgtgtcaacaattcagaagtgatcaaagaagtttataaatctagatttggaagattagaaagaaggaaagaaataatgtggaaagaacttagatttacattagttgatagacaacgaagaagagttgacactcagcctgtagaacaaagattgagaactggagaaattaaagacttgcaaatgtggactttgttcgaagatgaagctcctcttgctagcaaatttattttagacaattatggtctagtcaaagaaatgagatcaaagtttgcaaacaaacctctgaataaagaagtagttgcacacatgttagaaaaacaattcaatccggaaagtagattcttgcctgttttcggagctataaggccagaaagaatggaattgatccatgcattaggaggagaaacttggatacaagaagctaacactgcagggatttccaatgttgatcaaaggaaaaatgatatgagagcagtatgtaggaaagtttgtcttgcagcaaatgcaagtataatgaacgccaaaagcaaactggttgagtatataaaaagtacaagtatgagaattggagaaacagaaagaaagcttgaagaacttatacttgaaaccgatgatgtctcacctgaagtaacattatgtaaatctgctttaggaggaccattaggaaaaactctatcttttgggcccatgctactcaagaaaatttctggttccggagtaaaagttaaagatacagtatatatccaaggtgtcagagcagtacaatttgaatactggagtgagcaagaagaattctatggagaatataagtcagccaccgctttattcagcagaaaggaaagatcactagaatggattacaataggaggaggaataaatgaagacagaaagagacttctagctatgtgcatgatattttgcagagatggagattattttaaagacgcccctgcaacaataacaatggcagatttaagtacgaagttaggaagagaaattccatatcaatatgtgatgatgaattggatacaaaaatcagaagataatctcgaagccttattatacagtaggggaattgtagaaaccaatccaggaaaaatggggagctcaatgggaattgatggttccaaaagagcaattaaatctttaagggctgtcacaatacaatcaggaaagattgacatgccagaatcaaaagaaaaaattcaccttgagctctctgataatcttgaagcatttgattcatcaggaagaattgttgcaacaattttagaccttcctagtgacaaaaaggtaacatttcaggatgtaagctttcaacatcctgatctggcagtattgagagatgagaaaacggccataacaaaagggtatgaagcgctaatcaaaaggctaggaacaggggacaatgatattccttccttaattgcaaagaaggattatttgtctctttataatttaccagaagtaaaattaatggctcccttaatcagacccaatagaaaaggagtttattccagagttgctagaaaattagtgtctacacaagttactactggacattattcattacatgaattgataaaggtcttaccctttacttatttcgccccaaaacagggaatgtttgaaggaaggcttttctttagcaacgatagctttgttgagcctggagtaaataacaatgtattttcttggagtaaggctgacagttctaaaatatattgtcatggaatagcgataagggtacctttagttgttggagatgaacacatggacacttcgttagcactattagaagggtttagtgtttgtgaaaacgaccccagagcaccaatggtaacaagacaagatttaattgatgtgggatttgggcaaaaagttagactcttcgtaggccaagggagcgttagaaccttcaagcgaactgcctcacaaagggctgcatcaagcgatgtaaataagaatgtgaaaaagataaagatgtctaactaa

SEQ ID NO: 10964 - DNA, 21 bp, unidentified
  misc_feature 1..21: note = Synthetic
  source 1..21: mol_type = other DNA
atgctaaggcagctcaaatga

SEQ ID NO: 10965 - DNA, 78 bp, unidentified; identical to SEQ ID NO: 1710
  source 1..78: mol_type = other DNA
  misc_feature 1..78: note = Synthetic

SEQ ID NO: 10966 - DNA, 1755 bp, unidentified
  misc_feature 1..1755: note = Synthetic
  source 1..1755: mol_type = other DNA
atgaaggcaataattgtactactcatggtagtaacatccaatgcagatcgaatctgcactgggataacatcgtcaaactcacctcatgtggttaaaactgccactcaaggggaagtcaatgtgactggtgtgataccactaacaacaacacctaccaaatctcattttgcaaatctcaaaggaacacagaccagaggaaaactatgcccaaactgttttaactgcacagatctggacgtggccctaggcagaccaaaatgcatggggaacacaccctccgcaaaagtctcaatactccatgaagtcaaacctgctacatctggatgctttcctataatgcacgacagaacaaaaatcagacaactacctaatcttctcagaggatatgaaaacatcaggttatcaaccagtaatgttatcaatacagagacggcaccaggaggaccctacaaggtggggacctcaggatcttgccctaacgttgctaatgggaacggcttcttcaacacaatggcttgggttatcccaaaagacaacaacaagacagcaataaatccagtaacagtagaagtaccatacatttgttcagaaggggaagaccaaattactgtttgggggttccactctgatgacaaaacccaaatggaaagactctatggagactcaaatcctcaaaagttcacctcatctgccaatggagtaaccacacattatgtttctcagattggtggcttcccaaatcaaacagaagacgaagggctaaaacaaagcggcagaattgttgttgattacatggtacaaaaacctggaaaaacaggaacaattgtttatcaaagaggcattttattgcctcaaaaagtgtggtgcgcaagtggcaggagcaaggtaataaaagggtccttgcctttaattggtgaagcagattgcctccacgaaaagtacggtggattaaataaaagcaagccttactacacaggagagcatgcaaaggccataggaaattgcccaatatgggtgaaaacacccttgaagctggccaatggaaccaaatatagaccgcctgcaaaactattaaaggaaagaggtttcttcggagctattgctggtttcttggaaggaggatgggaaggaatgattgcaggttggcacggatacacatctcatggagcacatggagtggcagtggcagcagaccttaagagtacacaagaagctataaacaagataacaaaaaatctcaactatttaagtgagctagaagtaaaaaaccttcaaagactaagcggagcaatgaatgagcttcacgacgaaatactcgagctagacgaaaaagtggatgatctaagagctgatacaataagctcacaaatagagcttgcagtcttgctttccaacgaagggataataaacagtgaagatgagcatctcttggcacttgaaagaaaactgaagaaaatgcttggcccctctgctgtagaaatagggaatgggtgctttgaaaccaaacacaaatgcaaccagacttgcctagacaggatagctgctggcacctttaatgcaggagatttttctcttcccacttttgattcattaaacattactgctgcatctttaaatgatgatggcttggataatcatactatactgctctactactcaactgctgcttctagcttggctgtaacattaatgatagctatcttcattgtctacatggtctccagagacaatgtttcttgttccatctgtctgtga

SEQ ID NO: 10967 - DNA, 2352 bp, unidentified
  misc_feature 1..2352: note = Synthetic
  source 1..2352: mol_type = other DNA
atgctgtatgtctaccccgcgtccgtgcgcagggcaatcgcgtgcttgctgcgctgcaacctcgacatttcgcgcctgtcctccgcacacgcgcgcgtgctgctggagtatggcatgcacggggacctccctgtggcgctctacgagcacgcggtcgcgctcgacccccacgccgttgtctttttcccgcccgccgccgtgcgcgtgcgggacctacagcgcgcgctctgcgaggcgcccgagctcgggccgccgctgctgcgtgccgtgcacttccacaagcgcgcgctgctgcgcgacggtgacggagccgtactgcgcaagttgctggagacgaacgctgtcaacgacgacgacgtgagctacctcatccgcgagcgctgcgtaagtcccgccagcatcgtcaagctgaacccgcgcctggccacgcgcagcatgcgcttctctccgcaagagctggaggacatctttcgcagcgtgcagagcgagcgctgggaagagctttacgagcggctggaccttgtgctgcgcgacatactctggctggcggcgcgcgcggcagtgccgccgctgcacgccgcgttgcagcggctggaagacacgcgcgcgtgcctgacgctggtcatgcgcttcccgcacgcgcgcgtgctggacttcgtctcgccgctcgtcaagtacgagcgcggctttgtacgcgcactcgacaactttgtcgccgcgcagctaccggcggtctggccagacatcaaccgctttctgttccgcgcggtgcccaagccgcagctgctgcggcgctacggcgtcaagttccacgcgatgttctctttcgcttgcgagcccttccccgacgtggacgccagcgcgcttagcgcgcaggacgctgctttcgtggaggcgcacatccatacgtacgaccagctctcgcgcgctttctcgctgcgcttccgccagcacgtgcagcgcacgcaaaaccgcgtgctaaccatgctcgtgggcgacacgcgccggccgcccgcgcgtccgcgccgcagcagctcggtggaagacttgttgcagcacctggaccacgtctacgagtcgcgcacgccgaggctagcgcgccgcgacctcgagggcatgctcagcgcgcaccgctacgacgtctctctctgcaagcgtgtgctcatggcagacgccagcacgcgcgtgaagaagaaggtgctgcgcatcatgcgcggctggaaagcgtgcggcacgctcgcgcatctttcctatacgaaggtgacccagagcacgatcttgctcgacatcttcactcacctggtcgtgcgcatctttcacagccagcgcgagctgttagcggcgcttgacaaaaactctgacgcgctcttccgccgcctgccgctttgccagtgcgcgcgttgcgcggagttgcggacgctgcgcgcgcacgacgctcccgcgctgcgcagccgcatcttcgcaggcgcgcccgtggacgcactagcaagcgcacgcccgctcccgcgcgcggacgctactcctacgagcttggagacagctggagagcgagccggtgcgaatacgccggtggcgaacccggacactgacgcagaacggctacgcactggcgcgaacgaacgccagcacgctgcgcagagccccggcgctcgctcgcgcgtacccttcgacggacgggaaaggcgcgcgccctcggacgccagggaaaggcacgcgccctcggacgccctagcggctcgcattcccttgcgcgcgctcgcgaacgaagcgacagacgagtgcctgctagccgccgtgcacgacttggcggtgctggccgcacacggcgtggtcgacacgcgctttgttcccgccagttcctgggggcctctggcgggcatgctgcggggtctgggcaccatcgacgtacgcagcgtacgcgacgcgctcacgcattctgtcctgcacgctgccaacctgggagcgggcggcgttcgcagcgcgcacttcatggtgcacgtgcggcacgtgaacgcgtaccgcttcacagactacgacaccgtgctgcgctttggcgaagcctatgtgcgagtcgtactcttctttaacttcctgttggagtacctcttcgtggtctcgctgtatcggctcgttgtcatgcgtgcacactggcgctttcgcgagttcgtgagcaagatgattaactgctttctcgagggcttcggcgtttgcttctgcgccatgcgcgtgaacgactgcgtggacaacgagctcgcagaatacatgcaggacaacggcgcgcccttccacacctaccacctctacgccaaggtaatactagtaatcttggagcacctaaatggaactcgctaa

SEQ ID NO: 10968 - DNA, 252 bp, unidentified
  misc_feature 1..252: note = Synthetic
  source 1..252: mol_type = other DNA
atggcatgcacggggacctccctgtggcgctctacgagcacgcggtcgcgctcgacccccacgccgttgtctttttcccgcccgccgccgtgcgcgtgcgggacctacagcgcgcgctctgcgaggcgcccgagctcgggccgccgctgctgcgtgccgtgcacttccacaagcgcgcgctgctgcgcgacggtgacggagccgtactgcgcaagttgctggagacgaacgctgtcaacgacgacgacgtga

SEQ ID NO: 10969 - DNA, 69 bp, unidentified; identical to SEQ ID NO: 1714
  misc_feature 1..69: note = Synthetic
  source 1..69: mol_type = other DNA

SEQ ID NO: 10970 - DNA, 27 bp, unidentified
  source 1..27: mol_type = other DNA
  misc_feature 1..27: note = Synthetic
atgaaacaaaggcgtggtttagagtag

SEQ ID NO: 10971 - DNA, 27 bp, unidentified
  source 1..27: mol_type = other DNA
  misc_feature 1..27: note = Synthetic
atgaaacaaaggcgtggtttagagtag

SEQ ID NO: 10972 - DNA, 27 bp, unidentified
  misc_feature 1..27: note = Synthetic
  source 1..27: mol_type = other DNA
atggctaagatttcaatgactcgttaa

SEQ ID NO: 10973 - DNA, 27 bp, unidentified
  misc_feature 1..27: note = Synthetic
  source 1..27: mol_type = other DNA
atggctaagatttcaatgactcgttaa

SEQ ID NO: 10974 - DNA, 27 bp, unidentified
  source 1..27: mol_type = other DNA
  misc_feature 1..27: note = Synthetic
atggctaagatttcaatgactcgttaa

SEQ ID NO: 10975 - DNA, 36 bp, unidentified; identical to SEQ ID NO: 1717
  source 1..36: mol_type = other DNA
  misc_feature 1..36: note = Synthetic

SEQ ID NO: 10976 - DNA, 681 bp, unidentified
  source 1..681: mol_type = other DNA
  misc_feature 1..681: note = Synthetic
atgagctctatcttagacaaaatcaaaagatggcagaacaaaagggctacccaaacatcaagctcaatgatgagttccttaacgaaggtctcaacatcctcgggtgtttcctcagaggaaatgcccaaactgccccaacccaagaagcacagggacacaagggtggtgaaaatgataccggtgcctctcaaaaggccccaactcccaccaggagaaggaacagtcttagtggtccatccgatagggaaatgcgatcccagagagaagcggatgtcgacaagtgggatcatagtggcgtatatagccacggactccggggccaactcgataagagcacttgtgaagagtttggaagaggtcaagatggaaacaccggaggactcaatctttgtggaccagatgttgtgctcaaccagggtcctcctcataaggatagagcattgggtggaattgctgacccggggaagaagacccacctggaacctgctgatctcgaggatggcgctgatgaagagagtctcccaagggaaaccggtggaagagctcctgctggacgaagcatggaaggtggttttaccctggatagaaggggaagtccgtgcaagcctgcccgcaaagcagatttcagagaagggacagacaaccccgacacctggtcagacccaggaacgacttttatga

SEQ ID NO: 10977 - DNA, 363 bp, unidentified
  source 1..363: mol_type = other DNA
  misc_feature 1..363: note = Synthetic
ctgtcaggtctccgtagatcgctcccgggtgcccgagacggggggcagatggctataaaaacccaagtagcggcgcgccccggcgctcagtcgcggctgagcgtgtggaggacggggtggagcgggtcgccgagactactactgcttctgcttttttgtctcctgtggatcgtcgcggactgccggcatgtccggccgtcgcaagggctgctcggcggccacggcgtcttcctcctcgtcgtcgccgccgtcgcgccttcctctgcctgggcacgcgcgtcggccgcgtcgcaaacgctgcttggtacccgaggtcttttgcacgcgcgacttggccgacctgtgcgtgcgacgcgactatga

SEQ ID NO: 10978 - DNA, 807 bp, unidentified
  source 1..807: mol_type = other DNA
  misc_feature 1..807: note = Synthetic
ttgtcaagtcctctttccagagcccgcgtccttccctttgaggccgtggccgcgcttggttgttctcgacggccgcggttgcgcgcgcggcgcaaggcgttgttgccgcgcgcgcacttctcccccggcgcgcgggagtaccaaccggagaccgcggtaccacggtcgcgcttgccgatgttcgtggccagttggttcccccgcgagcggggccctgcgggacgcgtctcaacgtgggagtcacagccctggtcgcaggcgaggacccccatcttgacacacgtcccccgacgcagacacttgcgcgtgacgagaccggcagagccagcgaggagccgttcccccctcgagggggcggcaacgccgccagagctccactcgggcccgcaccacaatcatccccacgccggctccggagaaccagcccggagacagggtcaacccagcctcgttccggcatcttgcctggcacgcacgccttccgctggcgcggaggttccttgcgcgcgacaagcgccccccgcgcgcgccacagagccgggccgccccaggcagtccgtcgctccgtgcttgcacgagatcccgaggccttctgcaaagaggcgccgatgttctcgcagcgcgcccgactccctagcgctgcggtatccgtggcgcagcaacacctcagctgcgcccgtgctctccccttccggcgagaggcggcacgagagctacgtttcgcgttttccctccgagggatgcaccgcctcgtgcccgcgttgcctctgcgcggggagcggcggatttgtccctcggagtggctag

SEQ ID NO: 10979 - DNA, 12 bp, unidentified
  source 1..12: mol_type = other DNA
  misc_feature 1..12: note = Synthetic
atgattacctaa

SEQ ID NO: 10980 - DNA, 1446 bp, unidentified
  misc_feature 1..1446: note = Synthetic
  source 1..1446: mol_type = other DNA
ctgaactcttggcagacgacttctttggtccagatggccgacgtggatgagctcgaggatcccatggaggagatgacctcctacacgtttgcccgcttcctccgcagtccggagactgaggcctttgtccgtaaccttgaccgtccacctcagatgccggccatgcgctatgtctatctctattgcctctgtgaacaaatacaagagttctctggtgaaactggcttctgtgactttgtctcctcgttagtccaagagaatgacagccaggacggtccctccctgaaatccatttactgggggctacaggaggccaccgacgagcagaggactgttctctgctcgtacgtggagtccatgaccagggggcagtctgagaacctgatgtgggacatattgcgaaatggcataatttcctcttccaagctgctctccaccattaagaatggacccaccaaggtgtttgagccagctcccatctccacaaatcactactttgggggacctgtggcctttggcctgcggtgtgaggacacggtcaaggacattgtctgtaagctcatctgcggggacgcatccgccaaccgtcaatttggctttatgattagtcccacggatggcatttttggggtgtctctggatctttgcgtcaatgtggagtcacagggagactttatactgttcaccgaccggagctgcatttatgagattaagtgccgcttcaagtacctcttttccaagtcagaatttgaccccatctacccatcctacactgcgctttacaagaggccatgcaagaggtcatttatcagatttatcaattctatagctcgtcctaccgtggagtacgtcccggatgggcggttgccctcggagggtgactatctgttgacgcaggatgaggcctggaatcttaaagatgtccgtaagcgcaaactgggccccggtcatgacctggtggcagacagcctagctgccaacaggggggtggagtctatgctctacgtaatgacggacccaagcgaaaatgcggggcgcattggtattaaagaccgggtcccagtcaacatcttcatcaatccacggcacaactacttctaccaggtgctcctccaatacaaaattgttggagactacgtccgccacagtgggggtggcaagcccgggagagactgctcaccccgggtgaacattgtgacggccttctttcgaaaacggtcgcctctagacccggcgacctgcacgctcggctcagacctgcttctggacgcctcggtggagattcccgtggcggtgctggtgacacccgtggtcctgccggactctgtcatccgtaagaccttgagcaccgcggctggctcctggaaagcgtacgcagacaatacttttgacaccgcgccatgggtgccctctggtctctttgccgacgacgagtcaactccatag

SEQ ID NO: 10981 - DNA, 1446 bp, unidentified
  misc_feature 1..1446: note = Synthetic
  source 1..1446: mol_type = other DNA
ctgaactcttggcagacgacttctttggtccagatggccgacgtggatgagctcgaggatcccatggaggagatgacctcctacacgtttgcccgcttcctccgcagtccggagactgaggcctttgtccgtaaccttgaccgtccacctcagatgccggccatgcgctatgtctatctctattgcctctgtaaacaaatacaagagttctctggtgaaactggcttctgtgactttgtctcctcgttagtccaagagaatgacagccaggacggtccctccctgaaatccatttactgggggctacaggaggccaccgacgagcagaggactgttctctgctcgtacgtggagtccatgaccagggggcagtctgagaacctgatgtgggacatattgcgaaatggcataatttcctcttccaagctgctctccaccattaagaatggacccaccaaggtgtttgagccagctcccatctccacaaatcactactttgggggacctgttgcctttggcctgcggtgtgaggacacggtcaaggacattgtctgtaagctcatctgcggggacgcatccgccaaccgtcaatttggctttatgattagtcccacggatggcatttttggggtgtctctggatctttgcgtcaatgtggagtcacagggagactttatactgttcaccgaccggagctgcatttatgagattaagtgccgcttcaagtacctcttttccaagtcagagtttgaccccatctacccatcctacactgcgctttacaagaggccatgcaagaggtcatttatcagatttatcaattctatagctcgtcctaccgtggagtacgtcccggatgggcggttgccctcggagggtgactatctgttgacgcaggatgaggcctggaatcttaaagatgtccgtaagcgcaaactgggccccggtcatgacctggtggcagacagcctagctgccaacaggggggtggagtctatgctctacgtaatgacggacccaagcgaaaatgcggggcgcattggtattaaagaccgggtcccagtcaacatcttcatcaatccacggcacaactacttctaccaggtgctcctccaatacaaaattgttggagactacgtccgccacagtgggggtggcaagcccgggagagactgctcaccccgggtgaacattgtgacggccttctttcgaaaacggtcgcctctagacccggcgacctgcacgctcggctcagacctgcttctggacgcctcggtggagattcccgtggcggtgctggtgacacccgtggtcctgccggactctgtcatccgtaagaccttgagcaccgcggctggctcctggaaagcgtacgcagacaatacttttgacaccgcgccatgggtgccctctggtctctttgccgacgacgagtcaactccatag

SEQ ID NO: 10982 - DNA, 132 bp, unidentified
  misc_feature 1..132: note = Synthetic
  source 1..132: mol_type = other DNA
aggcctttgtccgtaaccttgaccgtccacctcagatgccggccatgcgctatgtctatctctattgcctctgtgaacaaatacaagagttctctggtgaaactggcttctgtgactttgtctcctcgttag

SEQ ID NO: 10983 - DNA, 132 bp, unidentified
  misc_feature 1..132: note = Synthetic
  source 1..132: mol_type = other DNA
aggcctttgtccgtaaccttgaccgtccacctcagatgccggccatgcgctatgtctatctctattgcctctgtaaacaaatacaagagttctctggtgaaactggcttctgtgactttgtctcctcgttag

SEQ ID NO: 10984 - DNA, 1446 bp, unidentified
  misc_feature 1..1446: note = Synthetic
  source 1..1446: mol_type = other DNA
ctgaactcttggcagacgacttctttggtccagatggccgacgtggatgagctcgaggatcccatggaggagatgacctcctacacgtttgcccgcttcctccgcagtccggagactgaggcctttgtccgtaaccttgaccgtccacctcagatgccggccatgcgctttgtctatctctattgcctctgtaaacaaatacaagagttctctggtgaaactggcttctgtgactttgtctcctcgttagtccaagagaatgacagcaaggacggtccctccctgaaatccatttactgggggctacaggaggccaccgacgagcagaggactgttctctgctcgtacgtggagtccatgaccagggggcagtctgagaacctgatgtgggacatattgcgaaatggcataatttcctcttccaagctgctctccaccattaagaatggacccaccaaggtgtttgagccagctcccatctccacaaatcactactttgggggacctgtggcctttggcctgcggtgtgaggacacggtcaaggacattgtctgtaagctcatctgcggggacgcatccgccaaccgtcaatttggctttatgattagtcccacggatggcatttttggggtgtctctggatctttgcgtcaatgtggagtcacagggagactttatactgttcaccgaccggagctgcatttatgagattaagtgccgcttcaagtacctcttttccaagtcagaatttgaccccatctacccatcctacactgcgctttacaagaggccatgcaagaggtcatttatcagatttatcaattctatagctcgtcctaccgtggagtacgtcccggatgggcggttgccctcggagggtgactatctgttgacgcaggatgaggcctggaatcttaaagatgtccgtaagcgcaaactgggccccggtcatgacctggtggcagacagcctagctgccaacaggggggtggagtctatgctctacgtaatgacggacccaagcgaaaatgcggggcgcattggtattaaagaccgggtcccagtcaacatcttcatcaatccacggcacaactacttctaccaggtgctcctccaatacaaaattgttggagactacgtccgccacagtgggggtggcaagcccgggagagactgctcaccccgggtgaacattgtgacggccttctttcgaaaacggtcgcctctagacccggcgacctgcacgctcggctcagacctgcttctggacgcctcggtggagattcccgtggcggtgctggtgacacccgtggtcctgccggactctgtcatccgtaagaccttgagcaccgcggctggctcctggaaagcgtacgcagacaatacttttgacaccgcgccatgggtgccctctggtctctttgccgacgacgagtcaactccatag

SEQ ID NO: 10985 - DNA, 42 bp, unidentified; identical to SEQ ID NO: 1725
  misc_feature 1..42: note = Synthetic
  source 1..42: mol_type = other DNA

SEQ ID NO: 10986 - DNA, 240 bp, unidentified
  misc_feature 1..240: note = Synthetic
  source 1..240: mol_type = other DNA
acggcctgccccatgtctaacaccgcgccgggacccacggtggccaacaagcgggacgaaaaacaccgtcacgtcgtcaacgtcgttttggagttgccgaccgagatctcagaggccacccacccggtgctggccaccatgctgagcaagtatacgcgcatgtccagtctgtttaacgacaagtgcgcctttaagctggacctgttgcgcatgatagccgtgtcgcgcacccgacgctga

SEQ ID NO: 10987 - DNA, 1515 bp, unidentified
  source 1..1515: mol_type = other DNA
  misc_feature 1..1515: note = Synthetic
ctgagtgacatcaacatcatggcgtcgcaaggcaccaaacgatcctatgaacagatggaaactggtggagaacgccagaatgccactgagatcagggcatctgttggaagaatggttggtggaattgggaggttttacgtacagatgtgcactgaactcaaactcagcgaccaagaaggaaggttgatccagaacagtataacaatagagagaatggttctctccgcatttgatgaaaggaggaacaggtacctagaggaacatcccagtgcggggaaggacccgaagaagaccggaggtccaatctaccgaaggagagacgggaaatgggtgagagagctgattctgtatgacaaagaggagataaggagaatttggcgtcaagcgaacaatggagaagacgcaactgctggtctcactcatatgatgatctggcattccaacctaaatgatgccacataccagagaacaagagccctcgtgcggactggaatggaccccagaatgtgctctctgatgcaaggatcaaccctcccgaggagatctggagctgctggtgcagcaataaagggagtcgggacaatggtaatggaactaattcggatgataaagcgaggcattaatgaccggaacttctggagaggcgataatggacgaagaacaaggattgcatatgagagaatgtgcaacatcctcaaagggaaatttcaaacagcagcacaaagagcaatgatggatcaggtgcgagaaagcagaaatcctgggaatgctgaaattgaagatctcatctttctggcacggtctgcactcatcctgagaggatccgtagcccataagtcctgcttgcctgcttgtgtgtacgggctcgctgtggccagtggatatgattttgagagggaagggtactctctggttgggatagatcctttccgtctgcttcagaacagtcaggtcttcagtcttattagaccaaatgagaatccagcacataaaagtcaattggtatggatggcatgccattctgcagcatttgaggacctgagagtctcaagtttcattagaggaacaagagtgatcccaagaggacaactatccactagaggagttcagattgcttcaaatgagaacgtggaagcaatggattccagcactcttgaactgagaagcagatattgggctataaggaccaggagtggaggaaacaccaatcaacagagagcatctgcaggacaaatcagtgtacagcccactttctcagtacagagaaatcttcccttcgaaagaccgaccattatggctgcgtttaaggggaataccgagggcagaacatctgacatgaggactgaaatcataaggatgatggaaagtgccagaccagaagatgtgtctttccaggggcggggagtcttcgagctctcggacgaaaaggcaacgaacccgatcgtgccttcctttgacatgagtaatgaaggatcttatttcttcggagacaatgcagaggaatatgacaattga

SEQ ID NO: 10988 - DNA, 159 bp, unidentified
  source 1..159: mol_type = other DNA
  misc_feature 1..159: note = Synthetic
aaggcaccaaacgatcctatgaacagatggaaactggtggagaacgccagaatgccactgagatcagggcatctgttggaagaatggttggtggaattgggaggttttacgtacagatgtgcactgaactcaaactcagcgaccaagaaggaaggttga

SEQ ID NO: 10989 - DNA, 1419 bp, unidentified
  misc_feature 1..1419: note = Synthetic
  source 1..1419: mol_type = other DNA
atggctccacccgtgatcgaagagtacctcggctcgcgcccctccatggagcgctgcgtgctcttgcgcgcgcagcgccgcaacatgtcccgcgtcctcaacttcgataggaagctttttctctctcttgttgtaaagagtcgtcgtcgcttcttcaagaagctaggcggctccgagaaggagatcgccgcgcgcatcgaggagtacttctcgaggcagcggcgcctggagaagctgggccagatcctgacggtgctggagctgcagagcgtgatcgtgggcgagttcacgcgcacgctgggctctctcacgacgccgacgcccgcaatcaacgcagcggtgcggcgcgtggacgcgacccgcgcgcgcgcgctcgccagccgcgcgctcgactcgtacgcggtgctgccgccgcccgaggaggccgcgccgatggcgcgacacaagcactcggacctggtggaggtggtcaagcggctcgtgaaggagcacctgcgccgacacaacaagcggtgcgtgtgctacggctcgtacgccctgcacctgctgaaccccgagatagagtacggcgacatcgacatggtgcagacgaacgcgcgcccgttcctgatcaacctcgccttcctgatctacttcgtcacggggcggcagaccgtgctgctgcgcgtgccctacctgaagaactacgtggtgctgcaggacgaggagggcggacacatcctggacagcttcaacgtgcggcaggccacgctgcgcgcgctgcccacgctgctcgtggacaacatatacgtgctgcaccccttcgtgcagctcatggcgatgctgaagatgttctcgcagacagaccgcgtccgcgacctcgcgagcaacttcgacaaggcgcgcgcgcgcatggagacgctgctggccttcgcgctcgaggagctcggggaggcgccggcggacggacgcacgccgctgccctgcgccttcctgccgccggagggcggcgcctcgcgcgtgttggaggcggacgcgcgcgcgctggactgcgggttcgcgcgcgccgtggtgttcctggacgagcccgcgctcgtgcagacgctgttggacatgggcgtgcaggacgacgagatcgtggacttcgagagcgtctcgaactcggccttcctggtgcgagacaacactctgttcacgtacttctcgaacaccgtgctcatggacggcgacgccgtgcacgatctgagccggcgcggcgtctccgcgcacatcgtgatgttcctgctgctgacgcgccaccccgccgcggagggcgccgtgcgctcgatgctggggtcgctagtctcggacgcgcggcccgtgactggcgtggtggagcgcgagcgcaagacgggcacgcacggcgtgatcgacatcgcgaaaaacgtgatcacacactaa

SEQ ID NO: 10990 - DNA, 216 bp, unidentified
  misc_feature 1..216: note = Synthetic
  source 1..216: mol_type = other DNA
atgactcttcatatgccttgcaagacagtgaaagcactaatcaagtgcagtgagcatggtccagttttcattactatagaggttgatgacatgatatggactcacaaggacttaaaagaagctttatctgatgggatagtgaagtctcatactaacatttacaattgttatttagaaaacatagaaattatatatgtcaaggcttacttaagttag

SEQ ID NO: 10991 - DNA, 33 bp, unidentified; identical to SEQ ID NO: 1737
  source 1..33: mol_type = other DNA
  misc_feature 1..33: note = Synthetic

SEQ ID NO: 10992 - DNA, 186 bp, unidentified; identical to SEQ ID NO: 1740
  misc_feature 1..186: note = Synthetic
  source 1..186: mol_type = other DNA

SEQ ID NO: 10993 - DNA, 258 bp, unidentified
  source 1..258: mol_type = other DNA
  misc_feature 1..258: note = Synthetic
ctgaatattagcgcattcattgtctattattaccatatttctaaatccaaaatgtatatgttgagcatcagtactatcgttgatgagtcttatagcatgaattcgcttatcgttatcgggtttatcttctgtcaccttagcaattccttttttattaaactctacataatcataaccatttctattgtttgttctaatataaacgagtatagcatcattgctaaatttttcaatagtatcgaaaacagaatatcctaa

SEQ ID NO: 10994 - DNA, 762 bp, unidentified
  misc_feature 1..762: note = Synthetic
  source 1..762: mol_type = other DNA
acgcactttcttaaaatgtcgctgtttggagacacaattgcctacctgctttcactaatagaagatggagaaggcaaagcagaactagctgaaaaattacactgttggttcggtgggaaagaatttgacctagattctgctttggaatggataaaaaacaaaaggtgcctaactgatatacaaaaagcactaattggtgcctctatatgctttttaaaacccaaagaccaagaaagaaaaaggagattcatcacagagcccctgtcaggaatgggaacaacagcaacaaagaagaaaggcctaattctagctgagagaaaaatgagaagatgtgtaagctttcatgaagcatttgaaatagcagaaggccacgaaagctcagcattactatattgtcttatggtcatgtacctaaaccctgaaaactattcaatgcaagtaaaactaggaacgctctgtgctttatgcgagaaacaagcatcgcactcgcatagagcccatagcagagcagcaaggtcttcggtacctggagtaagacgagaaatgcagatggtttcagctatgaacacagcaaagacaatgaatggaatgggaaagggagaagacgtccaaaaactagcagaagagctgcaaaacaacattggagtgttgagatctctaggagcaagtcaaaagaatggagaaggaattgccaaagatgtaatggaagtgctaaaacagagctctatgggaaattcagctcttgtgaggaaatacttataa

SEQ ID NO: 10995 - DNA, 30 bp, unidentified; identical to SEQ ID NO: 1744
  source 1..30: mol_type = other DNA
  misc_feature 1..30: note = Synthetic

SEQ ID NO: 10996 - DNA, 174 bp, unidentified
  source 1..174: mol_type = other DNA
  misc_feature 1..174: note = Synthetic
atcaacaaaaacaactgcaccaacaatgtcattagagtgcacaaacgcatcaaatgcccagactgtgaaccattctgcaacaaaagagatgacatttccacccccagagccggagtggacataccctcgtttatcttgccagggctcaacctttcagaaggcactcctaattag

SEQ ID NO: 10997 - DNA, 174 bp, unidentified; identical to SEQ ID NO: 10996
  misc_feature 1..174: note = Synthetic
  source 1..174: mol_type = other DNA

SEQ ID NO: 10998 - DNA, 588 bp, unidentified
  misc_feature 1..588: note = Synthetic
  source 1..588: mol_type = other DNA
atgagccggcccgaaggaaggaaaaaccgcggggggagagaagaggttctcgagcagtgggtgagcggaagaaagaagttagaggaactcgagagagacctccggaaggttaagaagaaaatcaagaaacttgaggatgaacatccctggctgggaaacatcaaaggaattctcggaaagaaagataaggatggagagggggctcccccggcgaagagggcccgaacggaccagatggaagtagactccggacctaggaagaggccttccaggggaggattcaccgacaaggagaggcaggatcaccgacgaaggaaggccctcgagaacaagagaaagcagctatcggcggggggaaagaacctcagcaaggaggaggaagaggaacttaggaggttgaccgaggaagacgagagaagggaaagaagaatagccggcccgcaggttgggggtgtgaaccccctcgaaggtggaacgaggggagcgcccgggggcggcttcgtccccagcatgcaaggagtcccggagtccccctttactcggaccggggagggactggacataaggggaagccagggattcccatag

SEQ ID NO: 10999 - DNA, 2010 bp, unidentified
  misc_feature 1..2010: note = Synthetic
  source 1..2010: mol_type = other DNA
aggagattttcaaagatgtttttgcttctagcaacaattacagcaataactgcttgccaagcagaaagagaactgatatgcatagtgcaaagagtgaatgaaagcttctctcttcactctggatttggaggaaatgtttacagcatgaagactgagccaatgactggattcacaaacgtgaccaaaggtgctagtgtcatcaaccaaaaagactggattggattcggagattcaagaacagacttgactaatgatcagtttccagcgtcttcagatgttccattggcagtggcgaagaagtttcggtcattgtcaggggcttcgttgatgttgtcagcttttgggcctcctggcaaggttgactacctctatcaaggatgtgggaaagaaaaagtattttatgaaggggtaaactggtcccctgaggcaggaattgattgctttggatcaaactggactcagacaaagaaggacttctattcgaggatatatgaagctgctagaagcagcacatgcatgactcttgtaaattctcttgacaccaagatatcatcaacaacagccacggctggaaccgcatcttcttgttcttcaagttggatgaaaagcccgttgtggtatgcagaatcttctgttaatcctggagctaaacctcaagtttgtgggactgagcaatcggcaacttttactttgccgacaagcttcggaatttacaaatgcaacaagcatgtagtgcagctttgttactttgtgtacgaaaacaaagcaaaatttaacacttttggctgtggagattattaccaaaattactatgatgggaatggaaacctgatagggggaatggataacagagtggcagcatacagaggaatagcaaacgctggagttaaaattgaatgtccttccaaaatcttgaaccctgggacttacagcattaaatcaacaccaagattccttctagtaccaaaaaggtcatactgcttcgacactgatggagggtaccctatacaagtagttcaatctgagtggtcagcttcacgaagatcagataatgccacagaagaagcatgcctacaaacagaaggatgtattttcatcaaaaagacaaccccttatgtaggagaagcagatgacaaccatggagacattgagatgaggcaactcttgagtgggcttggcaacaacgacacagtgtgcgtttcccaaagtggatacacaaaaggagagaccccttttgtaaaggattatttgagtcctcccaagtatggcagatgtcagttgaaaactgacagtggaagaatcccaactctaccttctgggttgataataccgcaagcagggactgactctttaatgagaactttgacgccagcaacaaggatcttcggaatagatgacttaatcttcgggcttttattcgtggggtttgtcgcaggaggggtcgcaggaggttacttctggggaagatcaaatggagggggtggtggtgcctcggtgagcagtacgcaggctggatttgacaaaatcggaaaagatatacagcagcttcggaatgacacaaatgcagcaattgaaggcttcaacgggagaattgcccatgatgagcaagccattaagaatttggcaaaagaaatcgaagatgcaagggcagaggctttggtaggggaacttggtataataagatccctcatagttgccaacataagcatgaatctaaaagaatctttatatgaactagcaaaccaaataacaaaaagaggaggaggaattgcacaagaagcaggcccagggtgttggtatgttgactccgaaaactgtgatgcaagctgcaaagagtacattttcaacttcaatggaagtgccactgtccccacattgaggccagttgacaccaaggttgtaataacatcggatccttattacttgggttcgaccatagctctctgtcttttggggctggtggcgattgctgcttctgttggtgtgatttggatctgttgcaagaaatag

SEQ ID NO: 11000 - DNA, 555 bp, unidentified
  source 1..555: mol_type = other DNA
  misc_feature 1..555: note = Synthetic
atgtctgaaaataagtcagtgaacacaacaaatatcagagcagcaatctccgaattggcattgggcgcagccagctggatggattcctctgggttaatgactttcgagaaaatgagaaagtctgctgagaattcactgagagtcgaacaggtttatgaaccgagaacttgggaagatgcagtggctgaagaaacactgagaaaccagcttactgccttaagaatttccgtagaggagatgacccagagaagtcagtacgaaagatactcagaatttggagaagtggacttgttgttgccgttgatgcggaatctagagatgaaatcagacgatacaaatctggatgtgaaacagatcccttctggagaagagaaggcgcaactactggagaggttcaggagttgcttggtgtcattgataaggttgaaatccaagctgggagtagcgatggtgaactctttgactaaccaggatatgagggccgctttggatgaaatcaagtcagtttcgagaacaatttcaatgttaaaagaatgtattcgttctttagtatga

SEQ ID NO: 11001 - DNA, 732 bp, unidentified
  misc_feature 1..732: note = Synthetic
  source 1..732: mol_type = other DNA
atgtctgaaaataagtcagtgaacacaacaaatatcagagcagcaatctccgaattggcattgggcgcagccagctggatggattcctctgggttaatgactttcgagaaaatgagaaagtctgctgagaattcactgagagtcgaacaggtttatgaaccgagaacttgggaagatgcagtggctgaaggtagagaaattctaggattcactactattgctgccttaagaaaaccagaggagactcatgctgttgaattggggaagaacattatctatcccttaggaggaaaccctttctatctaagcccatgtaccattgacactctgtatgagccaaagctcataagacaaggagaagtctttggagtaaaatatcggaactgcaattgctttgtaaaaactgctgaactattagtgaccgacatgggagaaatcattgtgctcttttgcagaaacactgagaaaccagcttactgccttaagaatttccgtagaggagatgacccagagaagtcagtacgaaagatactcagaatttggagaagtggacttgttgttgccgttgatgcggaatctagagatgaaatcagacgatacaaatctggatgtgaaacagatcccttctggagaagagaaggcgcaactactggagaggttcaggagttgcttggtgtcattgataaggttgaaatccaagctgggagtagcgatggtgaactctttgactaa

SEQ ID NO: 11002 - DNA, 660 bp, unidentified; identical to SEQ ID NO: 9972
  source 1..660: mol_type = other DNA
  misc_feature 1..660: note = Synthetic

SEQ ID NO: 11003 - DNA, 90 bp, unidentified; identical to SEQ ID NO: 1755
  misc_feature 1..90: note = Synthetic
  source 1..90: mol_type = other DNA

SEQ ID NO: 11004 - DNA, 1551 bp, unidentified
  misc_feature 1..1551: note = Synthetic
  source 1..1551: mol_type = other DNA
atgtatcctcgtggagtaaaacgctcacaacatgatcgtcataaacaaaccgccttcagaacgataaaacgttccatcacgcatagaccaaccagcaagttcatcagccatttcgccaaaaattttcgaggaaaactcgcacctctgaaacaactggatgaatctagactagacgcactaagtctgacagagttagaacagctgaagaccatcatcgaagagaaacaacaagaaaaacgcgctcaaaacaatgcaatcacctttctgcctaaccttccaacagtcccctttgccgacacaaacttttcgataaaatctcttggcctgagaccttacaacggagacgcccgtgatccaaaacaacgcatccgagacagatttccacagacgcatgaacgaatttgtctcctaactaatgacatactggaaaccgacctgctgcttcgctatcgacaatgtctcgactcgctcacgcgagaagaaaatcagcaactaatgggcgaccggatattctccctgaccaactcaccttgtcttgcttttacagttgctacagtagaagaagcctgcagttattttaaatttcacgatctgcacaacctaccggtcaacccacaagacttattcatgtataccatcaccgtcatgaaattcgaatttttcaacaaactcaacatggcgaaattaacctgtgttttcaacgacaacggacacggcgacatcgaataccgaaaactcaggcaactctgcggtaaacctgtactagatcgagagatgccaaactccgaatttgaagtacaacaacaaactccagactcatttagacacccaattcaacaagccatgtccatcgttgtgacgttcgctcgaatactacgacaaattaaagaacatatcatacgaacaaagaaaccgcaattcatccgcgatttcgacacagaacgtgtagccgagcgatacgaatgcggtctgataagcaggctcatcggaaagcaattcagcaaccataaatgcgatgatgttagctgtcaaaatagaatcgaacgaatcatggctccttggaaaccaagtctatttttctgcacttatttcgccaaagacgcaccaaagtttaagctgtttccaaatcttcctcacgaataccgaaatctttcttttacttgtccaaaggtcgacatggaaccttcatgcagctattcaacaagtcgcgacctacctcagacctctcatcgttcacataaaaaccaaggtacgcctaaggttaaatccaaagtttgcgtcgaaaaaccagacacctcaaacctaacaacgacaaaaacaactaccgaaattctcatagaagaatcaatggaaaccgacaacaaaataccagatcctagagaactaaacttcaatcaagcaaaacaagacgaaattgtgattattaacattaatgaaaacgtcaactctaaacatgaaagtgaatcaagtgttgaaatggacttagatttagactatgaagctgacacctgtgaaactaacttaaacacatattcttctgactcagaataa

SEQ ID NO: 11005 - DNA, 36 bp, unidentified; identical to SEQ ID NO: 1757
  misc_feature 1..36: note = Synthetic
  source 1..36: mol_type = other DNA

SEQ ID NO: 11006 - DNA, 21 bp, unidentified
  misc_feature 1..21: note = Synthetic
  source 1..21: mol_type = other DNA
attttgaagcgggaggtttga

SEQ ID NO: 11007 - DNA, 21 bp, unidentified
  misc_feature 1..21: note = Synthetic
  source 1..21: mol_type = other DNA
attttgaagcgggaggtttga

SEQ ID NO: 11008 - DNA, 42 bp, unidentified; identical to SEQ ID NO: 1760
  source 1..42: mol_type = other DNA
  misc_feature 1..42: note = Synthetic

SEQ ID NO: 11009 - DNA, 42 bp, unidentified; identical to SEQ ID NO: 1760
  misc_feature 1..42: note = Synthetic
  source 1..42: mol_type = other DNA

SEQ ID NO: 11010 - DNA, 2238 bp, unidentified
  misc_feature 1..2238: note = Synthetic
  source 1..2238: mol_type = other DNA
atggcatggagatggtggaaacgaaggcgccgctggtggtggaaacgacgctggacccgtggccgacttcgcggacgacgggctagaccagctggtcgccgccctcgacgaagacgagtaaggagacggagggcttggaggcgtgggcgacgaaagagacgaactttcagacgcagacgcagacgaaagggtaggagacacagacccaaactcataataagacagtggcagccagagattgtcagaaaatgccttataataggctattttcccatgataatctgtggacaaggacggtggtcagaaaactacagcagtcacttagaggaccgcgtagttaaacaagcctttgggggcggacacgcgaccaccaggtggtcacttaaagtactatacgaggagaacctcagacacttaaacttctggacctggagtaacagagacttagaactggccaggtacctacgagtgacgtggactttttacagacaccaagatgttgactttattgtatactttaacagaaagagtcccatgggaggcagcatatacacagcacccatgatgcacccaggagcccttatgcttagcaaacagaagatactagtaaagagctttaaaacaaaacccagaggcaaggccacagtgaaagttaccattaagccccccactctactagtagataagtggtactttcagcacgacatttgcgacatgaccttacttaacataaatgccgttgcggctgacttgcggtatccgttctgctcaccacaaactgacaacccttgcgtcagcttcctcgttttgtcaaccgtctacaacaacttcctctctattgccccagacgaactgtccccagtaacatcaaatggaaaagagtattataaaaaatttttagatgctgcatttaaaacaccaagagactttaatgctgtaaatacatttagaacccaagctaatttctcacacccacaacttacactccccaacagtgcatcaaatacatcagcaaaccaatactttaatacttatgatggctactggggtgatgccatatatgctcgagacatccctgcggtagaaccaccacaaacactacaacaagcaaaagaagtattaataaataacatggaaaattggcatagaaaagtacaacaagaaggagttagcaaactacatcattctgtatttgcccacaatgtaggcctatttagcagcagctttttatctgcaggaagactagccacagaaattccaggcctatacacagatataatttataacccctacacagacaaaggcaaaggaaacatgatatgggtagactactgtcaaaaaaaagacaacttatataaagaaggccaaagtaaatgtctaatagctaatttaccactgtggatggcctgcaatggatatatagactgggtaaaaaaagaaacagataactgggtaataagtacacaagccagagtactaatggtaactccgtacacttacccaaaaatgtaccgagaagacaatcctctatttggctttgttccatactcctatgcctttggagatggaaaaatgcccaacggtagcacatacataccgtttctatacagaaacaagtggtaccctattacactacaccaacaaccagtactagaagatatagctagatcaggccccttctcactaaaacaaaacatgcctagcgctacactaacagcaaaatacaagtttaaattcttattcgggggcaatcccgcttccgaacaggttgttagagacccctgcactcagcccaccttcgaactgcccggagccagtacgcagcctccacgaatacaagtcacggacccgaaactcctcggtccccactactcattcaaatcgtgggacctcagacgtggctactatagctcaaaaagtattaagcgaatgtcagaatacgaagaaccttctgagtttattttcccaggtcccaaaaaacccagggtcgacctcgggcctatccaagagcaagaaaggccctcagattcactccaaagagaatcgaagccgtggcagaccagcgaggaagaaagcgaagcagaagtccaagagcaagagacgcaggagatgcccctcagagagcaactcctccacaacctcagagagcagcagcaactcagaaagggcctccagtgtgtcttccagcaactaataaagacacaacagggggtacacatagatccatgcctactatag

SEQ ID NO: 11011 - DNA, 36 bp, unidentified; identical to SEQ ID NO: 1762
  misc_feature 1..36: note = Synthetic
  source 1..36: mol_type = other DNA

SEQ ID NO: 11012 - DNA, 213 bp, unidentified
  misc_feature 1..213: note = Synthetic
  source 1..213: mol_type = other DNA
atgttccagtaccagctcgcgccgccgcgccgctgcgccggctgcgccaccaacttcgtggcctacctgcaggaggaccgcgagcgcatgcgcgccgcgctgctggccaaccctcgcaagctgagcgcgctgcgccgcttcctggcactggcgcgcacgcgcacgctctcgctggctccgctggaccccgagctgcggcgcgtgctgagctag

SEQ ID NO: 11013 - DNA, 12 bp, unidentified
  misc_feature 1..12: note = Synthetic
  source 1..12: mol_type = other DNA
atgatattctag

SEQ ID NO: 11014 - DNA, 270 bp, unidentified
  misc_feature 1..270: note = Synthetic
  source 1..270: mol_type = other DNA
atgctacctatgatcaccggtgtactggatcccgtgagacatcatcccgtcgtgatcgagctttgcttttgtttcttcacagagctgagaaaattacaatttatcgtagccgacgcggataagttccacgacgacgtatgcggcctgtggaccgaaatctacaggcagatcctgtccaatccggctattaaacccagggccatcaactggccagcattagagagccagtctaaagcagttaatcacctagaggagacatgcagggtctag

SEQ ID NO: 11015 - DNA, 270 bp, unidentified; identical to SEQ ID NO: 11014
  misc_feature 1..270: note = Synthetic
  source 1..270: mol_type = other DNA

SEQ ID NO: 11016 - DNA, 72 bp, unidentified; identical to SEQ ID NO: 1766
  misc_feature 1..72: note = Synthetic
  source 1..72: mol_type = other DNA

SEQ ID NO: 11017 - DNA, 90 bp, unidentified; identical to SEQ ID NO: 1767
  source 1..90: mol_type = other DNA
  misc_feature 1..90: note = Synthetic

SEQ ID NO: 11018 - DNA, 30 bp, unidentified; identical to SEQ ID NO: 1768
  source 1..30: mol_type = other DNA
  misc_feature 1..30: note = Synthetic

SEQ ID NO: 11019 - DNA, 45 bp, unidentified
  source 1..45: mol_type = other DNA
  misc_feature 1..45: note = Synthetic
atgaagggcacgagctgcttcccaaaggcccccatccaagtatag

SEQ ID NO: 11020 - DNA, 1911 bp, unidentified
  misc_feature 1..1911: note = Synthetic
  source 1..1911: mol_type = other DNA
atcatgttaaacagggtacaaatcttgatgaaaacagctaacaattatgaaactattgagatattgcgtaattatttaagactgtatattattttggcacgaaatgaagaaggccgtggtatactaatatacgatgataacatagatagtattatgtcgatgatgaatattacaagattagaagttataggattgacgactcattgcacaaaattaagatcatcgcctccaattcctatgtctagattgtttatggacgaaatagatcatgagtcatattattctccaaaaacttcagattatccgttgatcgatattatacgaaagcgttcccacgaacagggagatatagcactggctttagaacaatacggtatcgagaatacagattccatatcagaaattaatgaatggctgtcgtcaaaaggtttagcatgttatagatttgtaaaatttaacgattataggaaacagatgtatcgtaagttctctaggtgtactatagttgacagtatgataatagggcatataggtcatcattatatttggattaaaaatttagaaacatatacgcgtcccgaaattgatgtgttaccgtttgatattaaatacatatctagagatgaattgtgggcgcgaatttcttcctcgttagatcaaacacatataaaaaccatcgccgtatcagtttatggagctattactgataatggaccaatgccatatatgatatccacgtatccgggtaatacctttgttaactttaacagtgtaaaaaatctaattttaaatttcttagattggattaaagatattatgactagtacacgaactatcattctagtaggttacatgagtaatctattcgatataccgttgctaacagtatactggcccaataattgtggatggaaaatctataataatacattaatatcatccgatggtgctagggttatttggatggatgcgtataaattttcttgcggtttatctttacaagactattgttatcattggggtagcaaaccagagagccgaccattcgatttaataaaaaaatcagatgctaaacgcaattctaaatcgttggtcaaagaatctatggcatccttgaaatccttgtacgaggcattcgagacacaatcaggagcgttagaagttttaatgagtccatgtaggatgttttcgttttctagaatagaagacatgttcttaactagtgtcatcaatagagtatccgagaatactggaatggggatgtattatcctaccaacgatataccttctctatttatcgaatcatctatctgtctagattatattatagtgaataatcaggaatccaacaaatatcgtatcaaatctgttctcgatatcatttcttcaaaacaataccctgcaggacgtcccaactacgttaaaaatggtacaaaaggaaagttatatatcgcgttgtgtaaagtcaccgtacctactaacgaccatattcccgtagtttatcacgatgatgacaatactaccacctttattacagtattgacgtccgtcgatattgaaactgctatcagagcaggatattcgatagtcgaattaggggctttacaatgggatgataatattccagaacttaaacacggtttactggatagtatcaagatgatttatgacttgaacgcagttacaacaaataatttattggaacagctcatagaaaatattaactttaacaactctagtataatttcgttgttctatacatttgccattagttattgccgagcattcatttactcaattatggaaaccatagatccggtgtatatatctcagttcagttataaagaattatacgttagtagctcttataaagatattaatgaatccatgagtcagatggtaaaattataa

SEQ ID NO: 11021 - DNA, 15 bp, unidentified
  source 1..15: mol_type = other DNA
  misc_feature 1..15: note = Synthetic
atggaaagtttatag

SEQ ID NO: 11022 - DNA, 15 bp, unidentified
  misc_feature 1..15: note = Synthetic
  source 1..15: mol_type = other DNA
atgcgacggctttag

SEQ ID NO: 11023 - DNA, 15 bp, unidentified
  source 1..15: mol_type = other DNA
  misc_feature 1..15: note = Synthetic
atgcgacggctttag

SEQ ID NO: 11024 - DNA, 75 bp, unidentified; identical to SEQ ID NO: 1774
  source 1..75: mol_type = other DNA
  misc_feature 1..75: note = Synthetic

SEQ ID NO: 11025 - DNA, 75 bp, unidentified; identical to SEQ ID NO: 1774
  misc_feature 1..75: note = Synthetic
  source 1..75: mol_type = other DNA

SEQ ID NO: 11026 - DNA, 15 bp, unidentified
  misc_feature 1..15: note = Synthetic
  source 1..15: mol_type = other DNA
atgcgacggctttag

SEQ ID NO: 11027 - DNA, 102 bp, unidentified
  misc_feature 1..102: note = Synthetic
  source 1..102: mol_type = other DNA
acggactgccgcttcttcaacccggattttacaaccagaagaacgaaacttttcctgtcgtccaggactctgttaacttcacctttcctactcacaaactag

SEQ ID NO: 11028 - DNA, 204 bp, unidentified
  source 1..204: mol_type = other DNA
  misc_feature 1..204: note = Synthetic
ttgcaggcgcgaacgtgcacggggacgtgtaaaacccggcgcggcatagcggagccgccgacgactattagagcgtcacagccgaggcggcgcggcgcagcgccggccattctccgggtcgcgctgctttccccgagctccgacgcctcgcgctcacgccgccgccgcgatggagaactggtcggcgctcgagctcctgcctaa

SEQ ID NO: 11029 - DNA, 12 bp, unidentified
  source 1..12: mol_type = other DNA
  misc_feature 1..12: note = Synthetic
atgatattctag

SEQ ID NO: 11030 - DNA, 24 bp, unidentified
  source 1..24: mol_type = other DNA
  misc_feature 1..24: note = Synthetic
aggatgtataagtttttatgttaa

SEQ ID NO: 11031 - DNA, 1002 bp, unidentified
  source 1..1002: mol_type = other DNA
  misc_feature 1..1002: note = Synthetic
atcactctagccaagaaatatatatacatagcatctttttgttgtaatcctatgagtactactaggggagctcttatttttgataaactaaaagaggcatctgaaaaaggggttaaaataatagttttgctagatgaacgagggaaaagaaatctgggagagctacaaagttattgcccggatataaattttataactgttaacatagataaaaaaaataatgtggggctactactcggttgtttttgggtgtcagatgatgaaagatgttatgtaggaaatgcgtcatttactggaggatctattcatacgattaaaacgttaggtgtatattctgattatcccccgctggccacagatcttcgtagaagatttgatacttttaaagcctttaatagcgcaaaaaattcatggttgaatttatgctctgcggcttgttgtctgccagttagcactgcgtatcatattaagaatcctataggtggagtgttctttactgattctccagaacacctattgggatattctagagatctagacactgatgtagttattgataaactcaagtcggctaagactagtatagatattgaacatttggccatagttcccactacacgtgtagacggtaatagctactattggcccgacatttacaactccattatagaagcagccattaatagaggagttaagatcagacttctagttggtaattgggataagaacgacgtatattctatggcaaccgccaaaagtctagacgcgttgtgtgttcaaaatgatctatctgtgaaggttttcactattcagaataatacaaaattgttgatagtcgacgacgaatatgttcatatcacttcggcaaatttcgacggaacccattaccaaaatcacggattcgtcagttttaatagtatagataaacagcttgtaagcgaggctaaaaaaatatttgagagagattgggtatctagccacagtaaatcgttaaaaatttaa

SEQ ID NO: 11032 - DNA, 12 bp, unidentified
  source 1..12: mol_type = other DNA
  misc_feature 1..12: note = Synthetic
atgatattctag

SEQ ID NO: 11033 - DNA, 24 bp, unidentified
  source 1..24: mol_type = other DNA
  misc_feature 1..24: note = Synthetic
aggatgtataagtttttatgttaa

SEQ ID NO: 11034 - DNA, 2289 bp, unidentified
  misc_feature 1..2289: note = Synthetic
  source 1..2289: mol_type = other DNA
atattcaatatggaaagaataaaagaactaagaaatctaatgtcgcagtctcgcacccgcgagatactcacaaaaaccaccgtggaccatatggccataatcaagaagtacacatcaggaagacaggagaagaacccagcacttaggatgaaatggatgatggcaatgaaatatccaattacagcagacaagaggataacggaaatgattcctgagagaaatgagcaaggacaaactttatggagtaaaatgaatgatgccggatcagaccgagtgatggtatcacctctggctgtgacatggtggaataggaatggaccaatgacaaatacagttcattatccaaaaatctacaaaacttattttgaaagagtcgaaaggctaaagcatggaacctttggccctgtccattttagaaaccaagtcaaaatacgtcggagagttgacataaatcctggtcatgcagatctcagtgccaaggaggcacaggatgtaatcatggaagttgttttccctaacgaagtgggagccaggatactaacatcggaatcgcaactaacgataaccaaagagaagaaagaagaactccaggattgcaaaatttctcctttgatggttgcatacatgttggagagagaactggtccgcaaaacgagattcctcccagtggctggtggaacaagcagtgtgtacattgaagtgttgcatttgactcaaggaacatgctgggaacagatgtatactccaggaggggaagtgaagaatgatgatgttgatcaaagcttgattattgctgctaggaacatagtgagaagagctgcagtatcagcagacccactagcatctttattggagatgtgccacagcacacagattggtggaattaggatggtagacatccttaagcagaacccaacagaagagcaagccgtgggtatatgcaaggctgcaatgggactgagaattagctcatccttcagttttggtggattcacatttaagagaacaagcggatcatcagtcaagagagaggaagaggtgcttacgggcaatcttcaaacattgaagataagagtgcatgagggatatgaagagttcacaatggttgggagaagagcaacagccatactcagaaaagcaaccaggagattgattcagctgatagtgagtgggagagacgaacagtcgattgccgaagcaataattgtggccatggtattttcacaagaggattgtatgataaaagcagttagaggtgatctgaatttcgtcaatagggcgaatcagcgactgaatcctatgcatcaacttttaagacattttcagaaggatgcgaaagtgctttttcaaaattggggagttgaacctatcgacaatgtgatgggaatgattgggatattgcccgacatgactccaagcatcgagatgtcaatgagaggagtgagaatcagcaaaatgggtgtagatgagtactccagcacggagagggtagtggtgagcattgaccggttcttgagagtccgggaccaacgaggaaatgtactactgtctcccgaggaggtcagtgaaacacagggaacagagaaactgacaataacttactcatcgtcaatgatgtgggagattaatggtcctgaatcagtgttggtcaatacctatcaatggatcatcagaaactgggaaactgttaaaattcagtggtcccagaaccctacaatgctatacaataaaatggaatttgaaccatttcagtctttagtacctaaggccattagaggccaatacagtgggtttgtgagaactctgttccaacaaatgagggatgtgcttgggacatttgataccgcacagataataaaacttcttcccttcgcagccgctccaccaaagcaaagtagaatgcagttctcctcatttactgtgaatgtgaggggatcaggaatgagaatacttgtaaggggcaattctcctgtattcaactacaacaaggccacgaagagactcacagttctcggaaaggatgctggcactttaaccgaagacccagatgaaggcacagctggagtggagtccgctgttctgaggggattcctcattctgggcaaagaagacaggagatatgggccagcattaagcatcaatgaactgagcaaccttgcgaaaggagagaaggctaatgtgctaattgggcaaggagacgtggtgttggtaatgaaacgaaaacgggactctagcatacttactgacagccagacagcgaccaaaagaattcggatggccatcaattag

SEQ ID NO: 11035 - DNA, 633 bp, unidentified
  source 1..633: mol_type = other DNA
  misc_feature 1..633: note = Synthetic
acgaggtacgcaagagggtgcactacaatgagcaccgaggaacaatcgaccttgctccgccatcatccatatcgcagggcccgtttatcacgatatgataaggagaccagggcctctttgactgaacaacaccctctattgcccgattgtgatcatgcagattatcataatgtaagttctgtccgtggattaccatgtgctgctggttttaccctgctgcaagagtttccagtcccctgggatatgatcctgaccacaaaggaagtaaaaattttaaaaagatgtatgtcagtgtgcctgtgtcccgctaccctggatctggtgagagcccagatggtaagcgggtacgagcgctggatcctgcattgccactgttcatccccgggctccctgcagtgccgggcgggaggcaccctgctggccgtgtggtttaggagagtcatttacgggtgcatgtttaaccagcgcttcccctggtaccggcagattgtgaacagaaatatgcccaaagagattatgtatatgggcagtgtgtttataaggggcaggcacctgatatactgccgcatttggtacgatggtcacgtgggttccatcattcccaacataagctttggctggagcaccctaaat

SEQ ID NO: 11036 - DNA, 24 bp, unidentified
  misc_feature 1..24: note = Synthetic
  source 1..24: mol_type = other DNA
atgtcgttcacccagttactttaa

SEQ ID NO: 11037 - DNA, 30 bp, unidentified; identical to SEQ ID NO: 1785
  misc_feature 1..30: note = Synthetic
  source 1..30: mol_type = other DNA

SEQ ID NO: 11038 - DNA, 2418 bp, unidentified
  source 1..2418: mol_type = other DNA
  misc_feature 1..2418: note = Synthetic
ctgactcgcacaaccgacagcaccatgagctaccccacgagcgaccgcgccgccgcgctggtgcgctgcatgatagcctccggcctagacatctgggccatcgagcgcgaggacctgacgctggcggcgctcatgggcttcacgggcacgataaacagcaacttcagccagcgccacgactacaacttttaccggctggcctccgagctcagcaagttctccagctcctgcatcctcatcgtcacccccgacctcaccgcgcccgacctcgtatgcaccatgctccagaacacgactgaggtcgtgcccgccatgctcccgcacctctgcagacacgcgtactgcgtttccaacatgctagacatagactgcctcttccgcctctgttcctacaacatgtacgccctccgcgacttcacgatgtcgaggcgcggttttgagttcgtagagcacgcgctgcggcgcatctctgtccacagccctctttgcgacctttcccgcatcccccaagccgtcacgctctgccgcacggacgagcacctgcggcagttcttccagaacgcgagcgtgacggaggcgcgcgcggcgctgagctgccgagagatcggctacgagattctgctggaggtccatgaccagcacggcatcgcgccgatgaacaccggcttccgcgcggtgcggaaccaccgcttggtggtcgagaccatccccaacttcatggaggagaccgcggtggacttcacgcagttcctgagcccctccgtgctgcagcaccgcgaggtgctggacgccgtgctcgacgagctaaggccgcacgtggcctgccggtcgctgtacgcctacctcacgaagatgttcaaggccgactacatcgtcaaccgcgcgggcgtgatcgcgtacgcgtgcttctccgagtacgcgcaggaactcttcgacgcctgccacatttacgtgagtctgccgctgtccgcgttcgagctcgacatcatcttcgagcacgcggaggtgtacgtggacacgctggacatgcgcgcggcgatgtacaacgtgctggagacgctgcgagtcacggacgtgtcagcgtacaccaacctctggcgcgtgcagccggccgggtgcatggcggtggccatgtacgtgagccccatcaacgacgtgctgcaacagggcatgcgcctcgggctcagcatcgacgccaccgagaacctgatcgagctgcagagcgccttcgccgagaacatatccgaggagacgatccggatgatcgtggagcgcaacgccgtggacatggagtggtttaccgcctccaacgtggacatggtgctgcccttcatcgacgaggtgctgagcgtggaggacgtgctcctgcccgcgagctccaaccccgcggactcgatattctcgcgagaggaggtgctgagcgcgtacgcgctcaagttccgcaaccaccccatgttcttcggcgcggttaccgggagcctgctgcccgcggagaccaagctcgccatcttccagcgcgccaccgagggcggcgtcttccccatcccgctcttggacacgcacctcttcgcgttcgcctacaactggtccccgcggctgctgtacaactaccagcccaccatccacccgcaggtggagcgcgtggacagcactcagctgctagaggacgtggtgctgcgcatggaaggcaagacgcgcatcctgatcgggtcgcgcgcgcgcaagtacatgttcgtcaccgacatgatggcgcgcgatggcggcctgcgcagcgacggctgcacggaacacaagctcgtgctggtggagtcggacgggtgcatggccgtgggcctgcggtacacacagcggaagctggccttcgcctcgctgacgcaccgcctgcgcgaggtcggcagcgacctcatgcggctgattcagcgcggcatcgtgtaccggctggtgacctggggcgcgccgtcgcagatcgacatcctcgaatctgggttcgtgcgcgcggtctacagcgtgcagttcagcgcgctcgactggggcaactacgccacgctggacgacgacctcatcgccagcggaatggccttcgcgcgctgcaaccagccgctggtgcgcgcccgcgcggtcgcgcactacctctacacctacgtggcctacttcgtgctgatgtggttctacaactaccgcgaggagagcctggaggaggtgctcgaggcgctggaccagactctgggccacgggctcgcgtgccgacacttcgacctgcgcacggctgcgaggcagctgtcggtggtagtcaccgagaacgcgctggtggcggtgcgcggcaaccaccgcttcaccgaggctgacctcttcgtcgacgccatcgtggccggcggcctggagaaactctgcgaggaggcccaaaacatgcaaaaatga

SEQ ID NO: 11039 - DNA, 387 bp, unidentified
  source 1..387: mol_type = other DNA
  misc_feature 1..387: note = Synthetic
atgactgaatctctagatctagaattggatggaattaacaccgaacagcgcctactagaaaggcgcaaggcggcgtccgagcgagaacgcctaaaacaagaagttgaagacatggttaacctacaccagtgtaaaagaggtatcttttgtgtggtcaagcaggccaaacttacctacgaaaaaaccactaccggcaaccgcctcagctacaagctacccacccagcgccaaaaactggtgcttatggtgggagaaaaacctatcaccgtcacccagcactcggcagaaacagagggctgcctgcacttcccctatcagggtccagaggacctctgcactcttattaaaaccatgtgtggtattagagatcttattccattcaactaa

SEQ ID NO: 11040 - DNA, 30 bp, unidentified; identical to SEQ ID NO: 1790
  source 1..30: mol_type = other DNA
  misc_feature 1..30: note = Synthetic

SEQ ID NO: 11041 - DNA, 24 bp, unidentified
  misc_feature 1..24: note = Synthetic
  source 1..24: mol_type = other DNA
atgtggctaatcctaaccccgtag

SEQ ID NO: 11042 - DNA, 6546 bp, unidentified
  misc_feature 1..6546: note = Synthetic
  source 1..6546: mol_type = other DNA
atgtctgcagtcgtaatgggcaactatgggatggaaccaactactttgggtgtccgtgtttcttgtttttctttatgcttgcttatggtgacaactgtagttattacatttgttaccatgggcgctcaagtatctagacagagtgttggaagccatgaaactatgatccacgctgggactggagctgtggtgaagtacttcaatgtcaactattataaggatgcggcaagctccggtttgtccaaacaggatttttctcaagacccgtccaagttcactcaacccgtggctgatgtcctgactaacccagccttgatgtctccctcagttgaggcttgtgggttttccgataggctcaagcaaatcactatcggaaactccactataacaacccaagacgctgtgaatacaattgtggcatatggagaatggcctagctatttatcagacttggatgcaacctcagttgacaaacccacacaccctgaaacatcatcagatagattttatactctaaagagtgttgaatggcaaagcagttcagaaggatggtggtggaagttacccgattgtctaaaggatatgggtatatttggccaaaacatgttccaccacgccatggggagatctggatatattattcacactcaatgcaacgccaccaaatttcacagtggatgtttgttggtggcagtggtgcctgagcaccagttggcttacataggtgcagatgcacgggtgagctatgagcacacccatccaggtgagaaaggtcacgtgattggcagtaactcagacagaaacaaccaccaaccagatgagagtgctttcttcaactgtaatgggaccttgttgggaaacttaactatcttcccacatcaactcataaacttgaggacaaacaactcgagcaccattgttgtgccatacatcaactgtactcccatggatagtatgttgcggcacaataatgtgtcacttgttattatacccatttgtcccttacgacccccaaacccaggacaacaaaccctaccaatcaccatatccattgctcctatcaaatcagagttttcaggagctagacaggccattaaagctaccgcacagggtctaccagtgagaatgcctagtggggctaaccagttcatgacaacagaagatgaacaatccccgaatgtactcccaggatttcaccccaccaaacagatccatatacctggtgaaatcaagacaattatggatatagctcgggtggattcgttcatgcctataaataacatccctactatgatcaatagcataggggcttacaacatccccataacaggtggacatgacaacaaaagaatagtggtcatacctttagatacgagtaacactctcttctcttcaacacttctgggagaagtcttaaactacttctctaattggtcaggatccatcaagctcacattcttttgtgtatgtgacagttttagtactggtaagtttctgatagcatacacacctccaggcgctggtattccggaaacgcgacgtgatgccatgcttggtgtgcacgttgtgtgggatttgggccttcaatcatcatgtcaccttgttgtcccctggattagctcccatttcttcagaagaacaaagaaagatgattatacagaaggtggctttatcacattgtggtatcagacagcatttgtgtccaacggagccacaggggctataatggtcacatgctctgcatgttctgacatgtcagtccgcatgttgcgtgacacacctatgatgcaacaggatgaaaatatagcccaaaacccagtagaggagtttgtggatcacacactacaaaaggtgatggctgtcccagacacacaagcttcaggacccacccacaccaacaaaccacagaccctgggtgccttggaaattggggcaacagctgaaataggaccagagacattgattgaaacgagatatgtaatgaatgataacacaaatgccgaggctacagtggagaactttctgggtaggtctgccctatgggcgaatttcacactagataggagcttcaagagctggaaaataaacttccaagagcatgcccaaatcagaaagaaatttgaattgttcacctatgttagatttgatctcgagattaccattgtgactaacaacagagggttgatgcaggttatgtttgtgcctccagggattgatgtaccaaagcaaaaggaaggaaaagagtggaatgctgcctcaaaccctagtgtgttctttcagccacactccggtttcccaaggttcacaatacccttcacaggactgggatcagcatattacatgttttatgatgggtatgatggtatcaatgctgacaacacaaactacggcatatctgaaactaatgacatggggactttgtgcttccgtgcactggatggagccgagaacagtgaaataaaaatctttgctaagccaaaacatacaacagcttggattcctcgaccacccagagccacccaatacctgcataaatttagtaccaattacaacaagcaaaagccagatagtggtggtcaagttgagccaaaacatttccttaacactaggaatgacataaagaacctgggacctagtgatatgtttgttcataccaaagaagctatttataaatgtgcacacttgaccaaacccaatgaacaaaccatacttttagcaatttcatctgatcttcaagtggatagtgtagacactcctgggcctgacaacatacccacctgtgactgcactacaggcacttactactgtaaaagtagagatagatacttcccaataaacctcacacatcacagctggtatataatacaagaatctgattattacccaaaacatattcaatatgacatcctaattggtgaaggaccatgttctccgggagattgtggtggcaaattgttgtgtgtacatggaaccatagggatggtgactgcaggtggagaaaaccatgttgcctttatagacttgagaaactacagctcactcagtgagcatcaaggcatcacagactatgtaacacaactaggaagcgcatttggagatgggttcacaaattccattagagacacactggtgggtgcttgtgatgtatcagacaaattaactgggaagatcatcaagtggacaatcagattaatcagtgccctgtcaattatagttagaaatagttcagacacccccacagttatagccacactagcgctgcttggatgttctggatcaccatggcgctatttaaaagacaaagtctgcaagtggctgggtatcgatccgccacctagcagacaaggtgactcatggttgaaaaagtttactgagttttgcaatgcagctcgtggcttggaatggattggtgacaagttatccaagttcattgactggctgaaagggaaaatattgcccacactccggcgcaagtcggacacattaaaggaatgcaagaagattccactatacaaggagcaagttaaggcttttgctactgcatcagaagaggcacaagatgaactactagtgaaagttagcaagctagagaaaggacttcaagatcttgccccactgtatgcatgtgaagccaagcaagtgcgtgaaatgtccagagaactacaacgcatgatgtgctacaagaagacccacagaacagagcctgtttgtattctgttacatggacaaccagggtgtggcaaatccttagcctctaaaatcattgccaggggattgactaatgaaagcaatgtttactcattaccacctgatcccaaatactttgatggctacaaccaacaggaagtggtgatcatggatgatgttggtcaaaatccagatggaagagacctgagtctattttgtcagatggtttcaagcactgaattcataacaccaatggccaatcttgaagataagggcagagcattcactagtgattacgtcattgctagcaccaatatgtctatcctcacaccacccactgtctcaacacccgaggccattgacaggcggtttttcctggactgcgatgtcaaaatcatgccagcatacaacacaaataacctcttaaatgttgctaaagccttgctaccatgcactgactgtccaaaaccagagttttacaaacaatgttgtccattgacttgtggaaaggccttgatattgcaaaacaaaagaacaaaagccagctattctatcaacactgtagtccagcagctgcgccaggaaaagaaaaacagaaagtgtgtggagtacaatctcactgccatattccagggtctgggagatgattcaactccggggttcattgtagatcttcttagtgcctccaaagacccaaaagtcatagaattctgtgagaaagagggatggatcaaacaatccaaacattcaaaaatagaacgtgacttcaattatgtgcagtactgcttaaactgtgtgggtagcatcatcttgatattgggtacagtctatgccttatacaagttgatgtgtattgcacagggaccttatactggattaccacaaccaaaaccaaggaaaccagagctgagaaaagctgtggtccaaggtccagagcatgaatttggtatggcacttataaagagaaactgtcacatagctactacagacagaggaggcttcaatctccttggtatttacgacaactgtgcagtaatacccacacatgcccaagtagaggacacaattctgattgatggtgttgaaaccaaagttctaaaacaaacaattgtcacagatgaaaatgatgtggacacagaaataacgattttgtggctagatcgaaatgaaaagttcagagacataagaagattcataccagactaccagagagactggcaaggcatgcgccttgtgaccaatgtacctaaatttcctatgtttgatgctgaggtgggtgatgtcataccatacggtgatataaacctgagtggtaacccgacaactaggttgcttaaatatgattatcccacgaaaccaggtcaatgtggtggtgtcatcttgaacacaggtaacatagtaggaatacatgtgggtggaaatggaagagtagggtactgtgcttcattaacaaaaagttactttgcctctgcccaaggtgaaattgtaaacaaatgcaaggtacaagatgttggtctaaagcctatcaacacaccagagcactctaagctgtaccccagtgtattttatgatatattccccggtgaaaaagaacccgctgtgttgacccagaaagatcctagactagaaactgatctcaaaacagctgttttgtccaagtataaaggaaatgtccaaattgagatgaatgaaaacatccagattgctgtggaacactattccgctcagttgtttatgttagacatcaacccagagcccatatccttagagcaggctgtgtatagtatgcaaaatctagaaccacttgacctcactacaagtgcggggttcccatatgttactatgggggtgaagaaaagagatatcctaaatagaaacacaaaagatgtcacaaaactccaacatatgattgatacatatggacttgacctgccatacataacttacttaaaggatgagcttcgagctcctgcaaaaataaaagcagggaaaacaagagctatcgaagcagctagcatgaatgacacagctaacttcagaagggtgtttggtaatctctatgctggcttccatgcaaacccaggaatcctcactggttcagctatagggtgtgatcctgacatcttctggtcacagctttatgcttcaatggaaaaacatctactagtgtttgactacacaaactatgacgggagcctacacccagtgtggtttcaagcacttgagcaacttctgaacaaccttgggctccctggtgaattggcatacaaattatgtaacacaacccacatatataaagatgaaatatacacagtgaagggaggtatgccatcaggaatttcagggacttctatcttcaataccatcataaataatatcataattagaaccttagttttagatacatataagggaattgaactggacaaactgaaaattgtagcatatggtgatgatgtgatagcttcatacccagaggaacttgacccagcacagatagccgtttctggcctcaaatatggattgacaataacacctgctgacaagtctgatcaatttgtgaaagtcaactgggataatgctacgttcctgaagagagggttccgagtagataagaggtacaacttccttattcacccggttttcccagagaaagaaatctttgaatcaatcagatggactagggatccaaagaacacacaagaccacgtgtattcactgtgtctcctgatgtggcacaatggtgaaggaccatacaaggaattcatagacaagatcagaaagacggaagtgggccgtaggttgtatctcccaccatacaatctactggagcgttcctggatcgacaagttcatttag

SEQ ID NO: 11043 - DNA, 1173 bp, unidentified
  source 1..1173: mol_type = other DNA
  misc_feature 1..1173: note = Synthetic
ctgtcgtcatcggcgcgcccccatcgcctcccgagcgagcgggccgccgctatcgccatggccccctcgcacgtggataaggtgaatacacggacatggagcgcttctatcgttttcatggtgctgacttttgtcaacgtcagcgtgcatctagtgctgagcaattttccgcacctgggctacccctgcgtctactatcacgtcgtggactttgaaaggctcaacatgtcggcctacaacgtaatgcacctgcacacgcctatgcttttcttagactcggtgcagttggtgtgctacgccgtgttcatgcagctcgtctttttagccgtgaccatctactacctggtatgctggatcaagatcagcatgcgcaaggacaaaggcatgagcctaaaccagtcgacacgcgacatttcgtacatgggcgacagcctcacagccttcctcttcattctcagcatggacacgttccaactattcacactgaccatgtcatttcggctgcccagcatgatcgccttcatggccgccgtacactttttctgcctgaccattttcaacgtgagcatggtcacgcagtaccgcagctacaaacgctcactctttttcttctcgcgtctgcaccccaagctcaaaggtacggtgcagttccgcacgctcatcgtcaacctggtagaggtagcgcttggtttcaacaccaccgtggtagccatggccctgtgctacggcttcggaaacaactttttcgtgcgtacaggccacatggtgttagccgtcttcgtggtctacgctatcatctccatcatctactttttactgatcgaggccgtcttttttcaatacgtcaaggtgcaattcggctaccacctgggcgccttctttggactctgcggcctcatctaccccatcgtgcagtacgataccttcctcagcaacgaataccgcaccggcatcagctggtcgttcggcatgctctttttcatatgggccatgtttacgacgtgtcgcgccgtccgctactttcgcggacgcggtagcggcagtgtcaagtaccaggcgctggccacagcctccggcgaagaagtcgctgcgctcagtcaccacgacagcttggaaagccgtcgcctccgcgaagaagaggacgacgatgatgaagacttcgaggacgcttaa

SEQ ID NO: 11044 - DNA, 2274 bp, unidentified
  misc_feature 1..2274: note = Synthetic
  source 1..2274: mol_type = other DNA
atggatgtcaatccgaccttacttttcttaaaagtgccagcacaaaatgctataagcacaactttcccttataccggagaccctccttacagccatgggacaggaacaggatacaccatggatactgtcaacaggacacatcagtactcagaaaaggcaagatggacaacaaacaccgaaactggagcaccgcaactcaacccgattgatgggccactgccagaagacaatgaaccaagtggttatgcccaaacagattgtgtattggaagcaatggctttccttgaggaatcccatcctggtatttttgaaaactcgtgtattgaaacgatggaggttgttcagcaaacacgagtagacaagctgacacaaggccgacagacctatgactggactttaaatagaaaccagcctgctgcaacagcattggccaacacaatagaagtgttcagatcaaatggcctcacggccaatgagtctggaaggctcatagacttccttaaggatgtaatggagtcaatgaaaaaagaagaaatggggatcacaactcattttcagagaaagagacgggtgagagacaatatgactaagaaaatgataacacagagaacaataggtaaaaggaaacagagattgaacaaaaggagttatctaattagagcattgaccctgaacacaatgaccaaagatgctgagagagggaagctaaaacggagagcaattgcaaccccagggatgcaaataagggggtttgtatactttgttgagacactggcaaggagtatatgtgagaaacttgaacaatcagggttgccagttggaggcaatgagaagaaagcaaagttggcaaatgttgtaaggaagatgatgaccaattctcaggacaccgaactttctttgaccatcactggagataacaccaaatggaacgaaaatcagaatcctcggatgtttttggccatgatcacatatatgaccagaaatcagcccgaatggttcagaaatgttctaagtattgctccaataatgttctcaaacaaaatggcgagactgggaaaagggtatatgtttgagagcaagagtatgaaacttagaactcaaatacctgcagaaatgctagcaagcattgatttgaaatatttcaatgattcaacaagaaagaagattgaaaaaatccgaccgctcttaatagaggggactgcatcattgagccctggaatgatgatgggcatgttcaatatgttaagcactgtattaggcgtctccatcctgaatcttggacaaaagagatacaccaagactacttactggtgggatggtcttcaatcctctgacgattttgctctgattgtgaatgcacccaatcatgaagggattcaagccggagtcgacaggttttatcgaacctgtaagctacatggaatcaatatgagcaagaaaaagtcttacataaacagaacaggtacatttgaattcacaagttttttctatcgttatgggtttgttgccaatttcagcatggagcttcccagttttggtgtgtctgggagcaacgagtcagcggacatgagtattggagttactgtcatcaaaaacaatatgataaacaatgatcttggtccagcaacagctcaaatggcccttcagttgttcatcaaagattacaggtacacgtaccgatgccatagaggtgacacacaaatacaaacccgaagatcatttgaaataaagaaactgtgggagcaaacccgttccaaagctggactgctggtctccgacggaggcccaaatttatacaacattagaaatctccacattcctgaagtctgcctaaaatgggaattgatggatgaggattaccaggggcgtttatgcaacccactgaacccatttgtcagccataaagaaattgaatcaatgaacaatgcagtgatgatgccagcacatggtccagccaaaaacatggagtatgatgctgttgcaacaacacactcctggatccccaaaagaaatcgatccatcttgaatacaagtcaaagaggagtacttgaagatgaacaaatgtaccaaaggtgctgcaatttatttgaaaaattcttccccagcagttcatacagaagaccagtcgggatatccagtatggtggaggctatggtttccagagcccgaattgatgcacggattgatttcgaatctggaaggataaagaaagaagagttcactgagatcatgaagatctgttccaccattgaagagctcagacggcaaaaatag

SEQ ID NO: 11045 - DNA, 558 bp, unidentified
  misc_feature 1..558: note = Synthetic
  source 1..558: mol_type = other DNA
atggatgtcaatccgaccttacttttcttaaaagtgccagcacaaaatgctataagcacaactttcccttataccggagaccctccttacagccatgggacaggaacaggatacaccatggatactgtcaacaggacacatcagtactcagaaaaggcaagatggacaacaaacaccgaaactggagcaccgcaactcaacccgattgatgggccactgccagaagacaatgaaccaagtggttatgcccaaacagattgtgtattggaagcaatggctttccttgaggaatcccatcctggtatttttgaaaactcgtgtattgaaacgatggaggttgttcagcaaacacgagtagacaagctgacacaaggccgacagacctatgactggactttaaatagaaaccagcctgctgcaacagcattggccaacacaatagaagtgttcagatcaaatggcctcacggccaatgagtctggaaggctcatagacttccttaaggatgtaatggagtcaatgaaaaaagaagaaatggggatcacaactcattttcag

SEQ ID NO: 11046 - DNA, 327 bp, unidentified
  source 1..327: mol_type = other DNA
  misc_feature 1..327: note = Synthetic
acgaaaactgaaaatagagagtgcgggagcaagtctgcgcaggacatgatccgcgacgtcctagagcagaaggtgcgcagcctcgagcgccgtgcagttgagagcagcggctacttggacgcgatccttgcgtacttggaagagtcgcgctacccgttgctgcgccacgccaagcgcttgctcttcgacctctgcttcacgctgctcgtgctgctctgcgtgcttgtgcgcctgtgctggcgaaacctgggcgccgcgctgatgctagcgtgtgccgccgcactatggacgcttgctagcaacttgctctactggcggcgcccgtga

SEQ ID NO: 11047 - DNA, 1131 bp, unidentified
  source 1..1131: mol_type = other DNA
  misc_feature 1..1131: note = Synthetic
atacgggtagaatcaaagtgccttgattgcaccaaaatggactcatccaggacaatcgggctgtactttgattttgccctcccttccagcagcctgttagcatttccgattgtcttacaagacacaggagacgggaagaagcaaatcaccccacaatacaggatccagcgtcttgattcgtggacagacagtaaggaagactcggtattcatcatcacctacgggttcatctttcaaattgggaatgaagaagccaccgtcggtgtgatcaatgacaatcccaggcacgagctactctcttccgcaatgctctgcttagggagtgtcccgaacgacggagatcttgttgagctggcgagagcctgcctcaccatggtggtaacttgcaagaagagtgcaactaacactgagagaatagtcttctcagtagtgcaggcacctcgggtgctgcaaagctgtatggttgtggcaaataggtactcatcagtgaatgcagtgaagcatgtgaaggcgccggaaaagatccctgggagcggaaccctagagtataaagtgaattttgtctctttgaccgtggtgccgagaagggatgtctacaggatcccaactgcagtattgaaagtgtctggctcaagcctgtacaatcttgcgctcaatgtcactattgatgtggacgtggatccgaagagcccgttagtcaaatccctttctaagtccgatagcggatactatgcgaatctttttctgcatatcgggcttatgtccactgtagataagaagggaaagaaagtgacatttgacaagatagaggaaaagataaggagactcaatctatctgtcgggctcagtgatgtgctcggaccctctgtgcttgtgaaggcgagaggtgcacggactaagctacttgctcctttcttctctagcagtgggacagcctgctatcctatagcaaatgcctctccccaggttgccaagatactctggagccaaactgcgcacctgcggagtgtgaaagtcatcattcaagccggcactcagcgtgctgtcgcagtgaccgctgatcatgaggtaacctccactaagatagagaggaggcatgccattgctaaatacaatcctttcaggaaataa

SEQ ID NO: 11048 - DNA, 114 bp, unidentified; identical to SEQ ID NO: 1804
  misc_feature 1..114: note = Synthetic
  source 1..114: mol_type = other DNA

SEQ ID NO: 11049 - DNA, 2151 bp, unidentified
  source 1..2151: mol_type = other DNA
  misc_feature 1..2151: note = Synthetic
atggaagattttgtgcgacaatgcttcaatccgatgattgtcgagcttgcggaaaaaacaatgaaagagtatggggaggacctgaaaatcgaaacaaacaaatttgcagcaatatgcactcacttggaagtatgcttcatgtattcagatttccacttcatcaatgagcaaggcgagtcaataatcgtagaacttggtgatcctaatgcacttttgaagcacagatttgaaataatcgagggaagagatcgcacaatggcctggacagtagtaaacagtatttgcaacactacaggggctgagaaaccaaagtttctaccagatttgtatgattacaaggaaaatagattcatcgaaattggagtaacaaggagagaagttcacatatactatctggaaaaggccaataaaattaaatctgagaaaacacacatccacattttctcgttcactggggaagaaatggccacaaaggccgactacactctcgatgaagaaagcagggctaggatcaaaaccaggctattcaccataagacaagaaatggccagcagaggcctctgggattcctttcgtcagtccgagagaggagaagagacaattgaagaaaggtttgaaatcacaggaacaatgcgcaagcttgccgaccaaagtctcccgccgaacttctccagccttgaaaattttagagcctatgtggatggattcgaaccgaacggctacattgagggcaagctgtctcaaatgtccaaagaagtaaatgctagaattgaaccttttttgaaaacaacaccacgaccacttagacttccgaatgggcctccctgttctcagcggtccaaattcctgctgatggatgccttaaaattaagcattgaggacccaagtcatgaaggagagggaataccgctatatgatgcaatcaaatgcatgagaacattctttggatggaaggaacccaatgttgttaaaccacacgaaaagggaataaatccaaattatcttctgtcatggaagcaagtactggcagaactgcaggacattgagaatgaggagaaaattccaaagactaaaaatatgaaaaaaacaagtcagctaaagtgggcacttggtgagaacatggcaccagaaaaggtagactttgacgactgtaaagatgtaggtgatttgaagcaatatgatagtgatgaaccagaattgaggtcgcttgcaagttggattcagaatgagttcaacaaggcatgcgaactgacagattcaagctggatagagcttgatgagattggagaagatgtggctccaattgaacacattgcaagcatgagaaggaattatttcacatcagaggtgtctcactgcagagccacagaatacataatgaagggggtgtacatcaatactgccttacttaatgcatcttgtgcagcaatggatgatttccaattaattccaatgataagcaagtgtagaactaaggagggaaggcgaaagaccaacttgtatggtttcatcataaaaggaagatcccacttaaggaatgacaccgacgtggtaaactttgtgagcatggagttttctctcactgacccaagacttgaaccacacaaatgggagaagtactgtgttcttgagataggagatatgcttctaagaagtgccataggccaggtttcaaggcccatgttcttgtatgtgaggacaaatggaacctcaaaaattaaaatgaaatggggaatggagatgaggcgttgtctcctccagtcacttcaacaaattgagagtatgattgaagctgagtcctctgtcaaagagaaagacatgaccaaagagttctttgagaacaaatcagaaacatggcccattggagagtctcccaaaggagtggaggaaagttccattgggaaggtctgcaggactttattagcaaagtcggtatttaacagcttgtatgcatctccacaactagaaggattttcagctgaatcaagaaaactgcttcttatcgttcaggctcttagggacaatctggaacctgggacctttgatcttggggggctatatgaagcaattgaggagtgcctaattaatgatccctgggttttgcttaatgcttcttggttcaactccttccttacacatgcattgagttag

SEQ ID NO: 11050 - DNA, 759 bp, unidentified
  misc_feature 1..759: note = Synthetic
  source 1..759: mol_type = other DNA
atggaagattttgtgcgacaatgcttcaatccgatgattgtcgagcttgcggaaaaaacaatgaaagagtatggggaggacctgaaaatcgaaacaaacaaatttgcagcaatatgcactcacttggaagtatgcttcatgtattcagatttccacttcatcaatgagcaaggcgagtcaataatcgtagaacttggtgatcctaatgcacttttgaagcacagatttgaaataatcgagggaagagatcgcacaatggcctggacagtagtaaacagtatttgcaacactacaggggctgagaaaccaaagtttctaccagatttgtatgattacaaggaaaatagattcatcgaaattggagtaacaaggagagaagttcacatatactatctggaaaaggccaataaaattaaatctgagaaaacacacatccacattttctcgttcactggggaagaaatggccacaaaggccgactacactctcgatgaagaaagcagggctaggatcaaaaccaggctattcaccataagacaagaaatggccagcagaggcctctgggattcctttgtcagtccgagagaggagaagagacaattgaagaaaggtttgaaatcacaggaacaatgcgcaagcttgccgaccaaagtctcccgccgaacttctccagccttgaaaattttagagcctatgtggatggattcgaaccgaacggctacattgagggcaagctgtctcaaatgtccaaagaagtaa

SEQ ID NO: 11051 - DNA, 294 bp, unidentified
  misc_feature 1..294: note = Synthetic
  source 1..294: mol_type = other DNA
atgagtcttctaaccgaggtcgaaacgcctatcagaaacgaatgggggtgcagatgcaacggttcaagtgatcctctcgctattgccgcaaatatcattgggatcttgcacttgatattgtggattcttgatcgtctttttttcaaatgcatttaccgtcgctttaaatacggactgaaaggagggccttctacggaaggagtgccaaagtctatgagggaagaatatcgaaaggaacagcagagtgctgtggatgctgacgatggtcattttgtcagcatagagctggagtaa

SEQ ID NO: 11052 - DNA, 30 bp, unidentified; identical to SEQ ID NO: 1808
  source 1..30: mol_type = other DNA
  misc_feature 1..30: note = Synthetic

SEQ ID NO: 11053 - DNA, 759 bp, unidentified
  misc_feature 1..759: note = Synthetic
  source 1..759: mol_type = other DNA
atgagtcttctaaccgaggtcgaaacgtacgttctctctatcatcccgtcaggccccctcaaagccgagatcgcacagagacttgaagatgtctttgcagggaagaacaccgatcttgaggttctcatggaatggctaaagacaagaccaatcctgtcacctctgactaaggggattttaggatttgtgttcacgctcaccgtgcccagtgagcgaggactgcagcgtagacgctttgtccaaaatgcccttaatgggaacggggatccaaataacatggacaaagcagttaaactgtataggaagctcaagagggagataacattccatggggccaaagaaatctcactcagttattctgctggtgcacttgccagttgtatgggcctcatatacaacaggatgggggctgtgaccactgaagtggcatttggcctggtatgtgcaacctgtgaacagattgctgactcccagcatcggtctcataggcaaatggtgacaacaaccaacccactaatcagacatgagaacagaatggttttagccagcactacagctaaggctatggagcaaatggctggatcgagtgagcaagcagcagaggccatggaggttgctagtcaggctaggcaaatggtgcaagcgatgagaaccattgggactcatcctagctccagtgctggtctgaaaaatgatcttcttgaaaatttgcaggcctatcagaaacgaatgggggtgcagatgcaacggttcaagtga

SEQ ID NO: 11054 - DNA, 78 bp, unidentified; identical to SEQ ID NO: 1810
  source 1..78: mol_type = other DNA
  misc_feature 1..78: note = Synthetic

SEQ ID NO: 11055 - DNA, 132 bp, unidentified; identical to SEQ ID NO: 1814
  source 1..132: mol_type = other DNA
  misc_feature 1..132: note = Synthetic

SEQ ID NO: 11056 - DNA, 42 bp, unidentified; identical to SEQ ID NO: 1821
  misc_feature 1..42: note = Synthetic
  source 1..42: mol_type = other DNA

SEQ ID NO: 11057 - DNA, 153 bp, unidentified; identical to SEQ ID NO: 1822
  misc_feature 1..153: note = Synthetic
  source 1..153: mol_type = other DNA

SEQ ID NO: 11058 - DNA, 804 bp, unidentified
  source 1..804: mol_type = other DNA
  misc_feature 1..804: note = Synthetic
atagaatcagaatcagatgtcatcttgagccccagttcaattgaaatgatgcacaatatgaaaaaaattaacagaaatcccagattctctgttgcttaccactattgcatcaaaatgcaacgtctgaagaaatttatagccaagagagaaaagggcgataaaggaaagatgaaatggaacagctcgatggattatgactccccccctagttaccaagatgtaagaaggggtatttttcctacagcgcctttatttggaatggaagatgacatgatggaatttactccatccctggggatccagacattaaagcttcagtataaatgtgtagtgaacatcaatgcgatcaatccattcagagattttcgtgaggcaatatcagccatgcagttctgggaagctgactacagtggatacattgggaagaaaccattttatagagcaataattctccatactgctcggcaattaaaaacatccaatccaggtattctcgaccgcggagtggtagaatatcatgcaaccactcaaggacgggcattagttttccacagccttggaccttccccttccatgatgtttgtcccagaaacttttactcgagaatggaatattcttacaaacaaggggacaatcaatgtaaagatttggcttggggaaactgatactctatcagagttggaaccgatcctcaacccggtcaatttccgagacgaccgagaaatgattgaaggggcggcaataatgggcctggaaattaaaaagcagaaggacaacacatggctgatttctaagagccattga

SEQ ID NO: 11059 - DNA, 195 bp, unidentified
  source 1..195: mol_type = other DNA
  misc_feature 1..195: note = Synthetic
atgagcggggggaaggttggcccgcaccggcgcatgcagggtgctgcaccaatccgcgtggagttgggccatcgaaattataaagagcgtcccctaacggattattgtcctcttgtgtcggtgttgttgtctgggtcaccatacacagagagacaggctcgggtgtcccggaccgtcgcaccaaccacgccttag

SEQ ID NO: 11060 - DNA, 1236 bp, unidentified
  misc_feature 1..1236: note = Synthetic
  source 1..1236: mol_type = other DNA
atggcatcccctgctgcacctcgtgctgtttcctttgccgataacaatgatataacaaatacaaacctgtctcgaggtagaggacgtaatccaaaaccacgagctgcaccaaataacactgtctcttggtacactgggcttacccaacacgggaaagtccctcttacctttccacctgggcagggtgtacctcttaatgccaattccacccctgcgcaaaatgctgggtattggcggagacaggacagaaaaattaataccgggaatggaattaagcaactggctcccaggtggtacttctactacactggaactggacccgaagcagcactcccattccgggctgttaaggatggcatcgtttgggtccatgaagatggcgccactgatgctccttcaacttttgggacgcggaaccctaacaatgattcagctattgttacacaattcgcgcccggtactaagcttcctaaaaacttccacattgaggggactggaggcaatagtcaatcatcttcaagagcctctagcgtaagcagaaactcttccagatctagttcacaaggttcaagatcaggaaactctacccgcggcacttctccaggtccatctggaatcggagcagtaggaggtgatctactttaccttgatcttctgaacagactacaagcccttgagtctggcaaagtaaagcaatcgcagccaaaagtaatcactaagaaagatgctgctgctgctaaaaataagatgcgccacaagcgcacttccaccaaaagtttcaacatggtgcaagcttttggtcttcgcggaccaggagacctccagggaaactttggtgatcttcaattgaataaactcggcactgaggacccacgttggccccaaattgctgagcttgctcctacagccagtgcttttatgggtatgtcgcaatttaaacttacccatcagaacaatgatgatcatggcaaccctgtgtacttccttcggtacagtggagccattaaacttgacccaaagaatcccaactacaataagtggttggagcttcttgagcaaaatattgatgcctacaaaaccttccctaagaaggaaaagaaacaaaaggcaccaaaagaagaatcaacagaccaaatgtctgaacctcctaaggagcatcgtgtgcaaggtactcagcgcactcgcacccgtccaagtgttcagcctggtccaatgattgatgttaacactgattag

SEQ ID NO: 11061 - DNA, 402 bp, unidentified
  misc_feature 1..402: note = Synthetic
  source 1..402: mol_type = other DNA
ttgccttcgatgtacggcgtcctggctcattactactccttcatcagtagtcccagcgttatggttaattttaagcatcataacgctgtgcagctgttgtgtgcacggacccgagacggcactgccggatgggaacgtttaacccatcatgcgtcgtatcacgcgaactatggggcatacgccgtgttgatggctacatcgcaaagaaagtccctagtgttacatcgatacagtgccgtgacagccgtggccctgcagctcatgcctgttgagatgctccgtaggctagatcagtcggactgggtacggggtgcctggatcgtgtcagagacttttccaaccagtgaccccaaagggttttggagcgacgatgactccccgatgggtggaagtgaagattga

SEQ ID NO: 11062 - DNA, 1242 bp, unidentified
  misc_feature 1..1242: note = Synthetic
  source 1..1242: mol_type = other DNA
atggcatcccctgctgcacctcgtgctgtttcctttgccgataacaatgatataacaaatacaaacctatctcgaggtagaggacgtaatccaaaaccacgagctgcaccaaataacactgtctcttggtacactgggcttacccaacacgggaaagtccctcttacctttccacctgggcagggtgtacctcttaatgccaattctacccctgcgcaaaatgctgggtattggcggagacaggacagaaaaattaataccgggaatggaattaagcaactggctcccaggtggtacttctactacactggaactggacccgaagcagcactcccattccgggctgttaaggatggcatcgtttgggtccatgaagatggcgccactgatgctccttcaacttttgggacgcggaaccctaacaatgattcagctattgttacacaattcgcgcccggtactaagcttcctaaaaacttccacattgaggggactggaggcaatagtcaatcatcttcaagagcctctagcttaagcagaaactcttccagatctagttcacaaggttcaagatcaggaaactctacccgcggcacttctccaggtccatctggaatcggagcagtaggaggtgatctactttaccttgatcttctgaacagactacaagcccttgagtctggcaaagtaaagcaatcgcagccaaaagtaatcactaagaaagatgctgctgctgctaaaaataagatgcgccacaagcgcacttccaccaaaagtttcaacatggtgcaagcttttggtcttcgcggaccaggagacctccagggaaactttggtgatcttcaattgaataaactcggcactgaggacccacgttggccccaaattgctgagcttgctcctacagccagtgcttttatgggtatgtcgcaatttaaacttacccatcagaacaatgatgatcatggcaaccctgtgtacttccttcggtacagtggagccattaaacttgacccaaagaatcccaactacaataagtggttggagcttcttgagcaaaatattgatgcctacaaaaccttccctaagaaggaaaagaaacaaaaggcaccaaaagaagaatcaacagaccaaatgtctgaacctccaaaggagcagcgtgtgcaaggtagcatcactcagcgcactcgcacccgtccaagtgttcagcctggtccaatgattgatgttaacactgattag

SEQ ID NO: 11063 - DNA, 1110 bp, unidentified
  source 1..1110: mol_type = other DNA
  misc_feature 1..1110: note = Synthetic
atggcctgcacagcaaagccagcctgcacagcaaaaccaggaaggtcaccaagaagtcaacccacaagagtgcaaagccttccaaaacaagtcagaaaaggaggggtagacgtgctggccgccgtaccactgtcagaagaaacagagtttaaagttgaattgtttgttaaacctgttattggaaatgcagaggggactaccccacattattggtctattagtagcccacttaaaactgctgaagctgctaatgttactcctgatgctgatactactgtgtgctacagcttgtcacaggttgctccccctgatattcctaatcaggttagtgaatgtgacatgcttatatgggagctgtatagaatggaaacagaagttttggtgcttcctgtgcttaatgctggcatacttactacagggggtgtaggaggtattgctggtccccaactttatttttgggcagttggaggacagcccttggatgtgctaggacttgctcccactgaaaaatacaaggggcctgctcagtatactgtaaatcctaaaaccaatggtactgtgcctcatgtttattccagttctgaaacacccagggcaagggtcactaatgaaaagtacagcattgaatcatgggtggcagaccctagccgcaatgataactgcagatactttggcagaatggttggaggggctgcaactccaccagtggtgtcatttagtaataatagcacaattccactgttggatgaaaatggcattggcattctttgcttgcaaggtagattgtacataacttgtgctgaccttttgggagttaacaaaaatagagtacatacagggctttccagattttttaggctacactttagacaaagaagggttagaaacccatatactataaatttgctttataagcaggtgtttaataagccagctgatgacattagtgggcaactgcaggttacagaggttactatgactgaagaaacagggcccttgcctcccacagtagagggaaatgttggtgtacccacaaccagtaatttgtctcatttgcctgcaactgtaactttacaagccacaggcccaatactaaacacacaaggataa

SEQ ID NO: 11064 - DNA, 261 bp, unidentified
  source 1..261: mol_type = other DNA
  misc_feature 1..261: note = Synthetic
ataccagaggtggttctagaactgcaagagcttgtccaacccactgctgacctgcattgttacgaagaattgacagaagaacctgcagaggaggagcagtgtctcactccctacaagatcgtagctggctgtggttgcggtgcaagacttcgtttatacgtgcttgctacaaatttaggaattcgagcgcaacaggaacttttgctgggtgatatacaactggtgtgtccggagtgccgaggcagacttcgccatgagtga

SEQ ID NO: 11065 - DNA, 1365 bp, unidentified
  source 1..1365: mol_type = other DNA
  misc_feature 1..1365: note = Synthetic
atggggcagattgttgccgttttccaagctatccctgagattctaaacgaggcaattaacattgtgataattgtgatcataatgttcaccctcatcaagggcgttttcaatctatacaaatccggtcttttccagctggtcatctttctcctactctgtggcaagcgttgtgactcatcattgctatcaggattcaatctggagacagttcatttcaacatgtcactgttgagctccatccctatggtctctgaacagcagcactgcatccagcacaatcacagctccataaccttcagtttgctgaccaacaagtccgacttggaaaagtgcaatttcacccgcctgcaagctgttgacagggtgatctttgatctgttcagagagtttcatcaccgtgttggggattttcctgttacttctgatctgaaatgctctcacaacaccagctacagagtgatagaatatgaagtcaccaaagagagtctccctcgattgcaggaagctgtgagcaccttgttcccagacctccatctctccgaagataggtttctgcaaattcaggcccatgatgacaagaactgcactggtctacacccattgaactacctgaggctcctgaaagagaattcagaaacccactacaaagtgaggaaattaatgaaattgtttcagtggtctttgagtgatgagacaggtagccctctgccaggtggacactgtctagaaagatggctcatctttgcgtctgatataaagtgctttgataatgcagcgattgccaaatgcaataaagagcatgatgaggagttctgtgacatgttgaggctatttgactacaacaaagcaagtattgccaagcttaggggcgaagcctcaagctcgatcaacttgttgtcggggagaatcaatgccatcatttcagacacacttttgatgagatcatccctcaagaggctgatgggcataccatactgcaattatacaaagttctggtatttaaaccatacaaaactggggatacattctttaccccgatgttggctggttagtaatgggagttacctcaacgaaacaaaatttactcatgatatggaagatgaggcagataaactgctgaccgagatgctaaagaaagagtatgttaggagacaagagaaaacacccattactctgatggacatactgatgtttagtgtctctttctatatgttttctgtaacactatgcatatgcaacatacccacccatcggcacatcacaggtttgccgtgtcccaaaccacacagactcagaaagaatggcacctgtgcctgtggcttctttaagtcaataaacaggtccactggttgggccaaacactga

SEQ ID NO: 11066 - DNA, 1764 bp, unidentified
  source 1..1764: mol_type = other DNA
  misc_feature 1..1764: note = Synthetic
ttgactttgtttgctgcagacaccatgacggcgagatatgggttcggatctatctcgtttccgaataaatgtgggatatttttgtctaccactaagaactttatagcccccaacttccccatacactactggacggctcccgcgtttgagttaagagggcgtatgaatcccgatttggaaaaaaatacgttaacgttaaaaaatgcggcggccgttgccgcattagacaaccttcgcggggaaacgattacgttaccaacggaaatagatcgtcgtttaaagcccctcgaagaacaactaacgcgcatggccaaggttttggattccctggagacggctgctgccgaggcggaagaagcagatgcacaatctgaggaatgtacacgtacagaaataatacgcaatgagtctatacaccccgaggtacagattgccaaaaatgatgcaccgttgcagtacgatacaaactttcaagtggattttatcaccctggtgtacttgggaagggcaaggggcaataactctccagggattgttttcgggccatggtatcgtactctgcaggaacggcttgtgttagataggcccgtagctgcacgcggagttgattgtaaagacgggcgcatttcccgtacgtttatgaacacaacggtaacatgtctacagtccgccgggagaatgtatgttggagatagagcgtactccgcgttcgagtgtgcggtattatgtttatatttaatgtataggacatctaatagtgtccacgaacctcaagtttcgtccttcgggaaccttatagagcacctaccggaatatactgagacatttgtgaattatatgacaacacacgaaaataaaaacagttatcaattttgctatgatcgtctaccacgcgaccagtttcatgctcgtggggggcggtatgatcaaggcgccttaacgtcacattctgttatggatgcgcttatacggttgcaggtcctaccgcctgcacctggacagtttaatcctggggttaatgacattattgatcgcaatcataccgcatatgtggacaagattcaacaggcggccgcggcgtatttagaacgggcccaaaacgtgtttcttatggaagaccaaactctattaaggttaacaattgacacgattacggcgttattattattaaggcgcttattatggaacgggaacgtatacggagataaactaaaaaataattttcaactgggtttgattgtgtcagaagcaacaggaacccctaccaacaatgtaatcttgcgcggagcgacggggtttgatgggaagtttaaaagcggtaataataactttcaatttttatgtgaacgatatatagcaccactgtatacgttaaatcggaccacagagctgactgaaatgtttcctggattagttgctctttgtttagacgcgcatacccagcttagtcgtggaagtttaggaagaaccgtaatagatatttcttctggacagtaccaagatcggctcataagcttaattgcattggaattagaacaccgccgacaaaatgttacatccctacccatagccgccgtggtatcaatacatgacagtgttatgttgcaatatgaacggggacttggaatgttaatgcaccaaccgcgtgtaagggcggcattggaagaaagtcgccgccttgcgcagttcaacgttaacagtgactatgatcttctatattttgtctgtttgggtgtcattcctcagtttgcctccacaccgtga

SEQ ID NO: 11067 - DNA, 27 bp, unidentified
  misc_feature 1..27: note = Synthetic
  source 1..27: mol_type = other DNA
atgttccctattggcatcatttattag

SEQ ID NO: 11068 - DNA, 915 bp, unidentified
  source 1..915: mol_type = other DNA
  misc_feature 1..915: note = Synthetic
atgacggccataccggtgaccgatatcgccaacgaatacgcggtgaccacgttctcggaggacgggtacccgtgcaacaagaactacgagatcaccagcgggcagatgtccatcctgcgctccgtgcacgagaagctgctgtcgcacgcggcagagaccgaggccttcgaggaggacgcggactcgggctgcgcgcccggagacgcgtgcgagtgcggcgcgggcgcttgcgagtgcggcgcgggcgcttgcgcgtgcggcgcgtccacacccgtgtccccgggtgtgccgcgcgtggacatcctggtgtcggaggtggaaacggtgatcgagcgccgcgcgcacgagcgcgcgggcgcgtcgctgcccacgcaaacgccgtcgctgtcgggcgtttacgatcgcgagcagcgcatgcagctgctggaggcggaggtggccgcgctacggcggcggcgcgcagagcagggctctgacaacctggcaaacttcacgaagctgctgttccagaagaaccccgcacgtgcgggcaccgtgaacaagcgcgtggtcatcgtgaactacgccagcatgaaccaggtcccgctggcgctggaggacctggagggcgtgtccgacgaggaggtggacagcatgtaccgcaccattcggcagtaccacgaggtgcgcaagaagaagatcgtggtgaccaacttcatcatcatcgtgattaacgtgctagagcaactactgctgaagctgggcttcgacgacatcaaagggctcagcagcgaggtcacgtcggagctgatcgacgtggagatcggcgacgactgcgagcagatcgccacgcgcctgggcatcagcaacacccccgcgctcaacatcacgcttttcatcgtgaagctgttcatccggaggatccgcatcctctag

SEQ ID NO: 11069 - DNA, 111 bp, unidentified; identical to SEQ ID NO: 1842
  misc_feature 1..111: note = Synthetic
  source 1..111: mol_type = other DNA

SEQ ID NO: 11070 - DNA, 24 bp, unidentified
  source 1..24: mol_type = other DNA
  misc_feature 1..24: note = Synthetic
ataaagggtattgttttcatatag

SEQ ID NO: 11071 - DNA, 39 bp, unidentified; identical to SEQ ID NO: 1849
  source 1..39: mol_type = other DNA
  misc_feature 1..39: note = Synthetic

SEQ ID NO: 11072 - DNA, 63 bp, unidentified
  source 1..63: mol_type = other DNA
  misc_feature 1..63: note = Synthetic
atgacattaaaagagaccaccagacagacaacacaggagacgatgcaagatataaagaaataa

SEQ ID NO: 11073 - DNA, 93 bp, unidentified; identical to SEQ ID NO: 1851
  misc_feature 1..93: note = Synthetic
  source 1..93: mol_type = other DNA

SEQ ID NO: 11074 - DNA, 1926 bp, unidentified
  source 1..1926: mol_type = other DNA
  misc_feature 1..1926: note = Synthetic
atggataaaactttatctagagaagaggcaaagcagctaatgcaacttttatgtttggacatgagttgctggggcaatttaccattaatgagaagacaatacttagtaaagtgcaaagaatatcatccagataaaggaggaaatgaggaaagcatgaagcttcttaattctttatatttaaaactgcaagactcagttagcagtgtacatgatttaaatgaagaagaagataatatatggcaatcttctcagatacctacatacggtacacctgactgggatgagtggtggtcacagttcaacacctactgggaagaagagttaagatgtaatgaatccatgccatcttctccaaaaagaagtgcaccagaagaggagcctagctgttctcaggcaacccctcctaagaaaaaacatgcatttgatgcttctttagaatttcctaaagagttgttagagtttgtttcacatgctgtatttagtaataagtgtataacgtgctttgtagtacatactactagagaaaaaggggaagtactttataaaaagttacttcaaaagtatcaatgtagctttataagtaagcatgcattttataatactgttttaatatttttcttaactcctcacaagcatagagttagtgctattaataacttctgcaaaggtcattgtactgttagctttttattctgtaaaggagttaataacccttatggtctgtatagtaggatgtgtagacaaccatttaatttgtgtgaagaaaatattcctggagggttaaaagaaaatgaatttaatccagaagatttatttggggaacctaaggaaccctcattaagctggaatcaaatagctaactttgctctggaatttgacatagatgatgtgtattacttactggggtcatatataaggtttgctactaagcctgaagagtgtgaaaaatgcagtaaaaatgatgatgctacccataaaagggtacatgtgcaaaatcatgaaaatgctgtgcttttgcaagaaagtaaaagccaaaaaaatgcttgcacacaagccattgatagagttatagcagaaagaagatataactgtttaaccttaactaggaaaaagctactaactaaaaggtttaaaaagctttttaatgaaatggataaaattgttgttggagaaagaaaaatactgctttatatggcttcaatagcctggtatactggactaaataaaaaaatagatgaattagttgttagatttttaaagctaattgtagacaacaagccaaaacacagatattggcttttcaaaggcccaattaacagtggcaaaaccacattagccactgctttgttaaatttgtgtggtggcaaagccttgaacattaacataccttcagaaaaactaccatttgaacttggagttgctcttgatcaatatatggttgtgtttgaagatgtcaaaggtcaaataggtattgaaaagcaactaccttctggtaatggggtaaataatcttgataacttaagagactaccttgatggttgtgttgaggttaacttagaaaaaaaacatgttaataagaggtcacaaatatttcccccagggattgtaaccatgaatgaatattgtattccagaaacagttgctgtgagatttgaaaaaactgttatgttcactattaaaagaaatttaagagaaagcctagaaaaaacaccacagttactatcacaaagaatattacacagtggaatagctatgttgttattgctaatatggtatagacctgtaagtgactttgatgaagaaattcaaagtaatgttgtgtattggaaagaagttcttgataattatataggccttactgagtttgccactatgcaaatgaatgtaaccaatggaaaaaacatactagaaaagtggtttgaataa

SEQ ID NO: 11075 - DNA, 576 bp, unidentified
  source 1..576: mol_type = other DNA
  misc_feature 1..576: note = Synthetic
atggataaaactttatctagagaagaggcaaagcagctaatgcaacttttatgtttggacatgagttgctggggcaatttaccattaatgagaagacaatacttagtaaagtgcaaagaatatcatccagataaaggaggaaatgaggaaagcatgaagcttcttaattctttatatttaaaactgcaagactcagttagcagtgtacatgatttaaatgaagaagaagataatatatggcaatcttctcaggtatactgcaaagatttgtgctgcaataagtttagattagttggtgctatatatggtgattactatgaagcatatattatgaagcagtgggatgtatgcattcatggctacaatcacgaatgccaatgcattcactgtattttaagcaaatatcataaagaaaagtacaaaatttatagaaaaccacctgtgtggatagagtgctactgctataagtgctacagggagtggtttttttttccaatttcaatgcaaacatttttcttttggaaagtgattatttttaatactgaaatacgagcagttcaaccattattacggtaa

SEQ ID NO: 11076 - DNA, 84 bp, unidentified; identical to SEQ ID NO: 1856
  misc_feature 1..84: note = Synthetic
  source 1..84: mol_type = other DNA

SEQ ID NO: 11077 - DNA, 195 bp, unidentified
  source 1..195: mol_type = other DNA
  misc_feature 1..195: note = Synthetic
ttgtcgatgaacacagggaggagctcactcttgagaatattagagtgttcttcctccgtgcgaatgaggctaaacagaagctccgtaagagttcggcaaagctcgctaaccttaaatttggcacttggaaggtcactgttgttaacaaccattaccctgccaacacagcaaatacggtcgctgatggtgaattaa

SEQ ID NO: 11078 - DNA, 105 bp, unidentified; identical to SEQ ID NO: 1858
  misc_feature 1..105: note = Synthetic
  source 1..105: mol_type = other DNA

SEQ ID NO: 11079 - DNA, 105 bp, unidentified; identical to SEQ ID NO: 1858
  source 1..105: mol_type = other DNA
  misc_feature 1..105: note = Synthetic

SEQ ID NO: 11080 - DNA, 396 bp, unidentified
  source 1..396: mol_type = other DNA
  misc_feature 1..396: note = Synthetic
atggccgcgcccaggggcagacccaaaaaggaccttacgatggaagacctaaccgcaaagataagccaattgactgtggagaatcgggagcttcggaaagcactgggatccactgccgatccgagagatcggcctctgacggccaccgagaaggaagcgcagcttaccgctactgtgggtgcactgagtgcggcggccgctaagaaaatcgaagccagggtcaggacaatattcagcaaggttgtaacacaaaagcaagtggacgatgccctgaagggactttcgcttagaatcgacgtctgcatgtcagacgggggcaccgctaaaccgcctcctggtgccaataacaggcgacgaagaggagcctcgacaacacgggcgggggttgatgactga

SEQ ID NO: 11081 - DNA, 396 bp, unidentified; identical to SEQ ID NO: 11080
  source 1..396: mol_type = other DNA
  misc_feature 1..396: note = Synthetic

SEQ ID NO: 11082 - DNA, 801 bp, unidentified
  source 1..801: mol_type = other DNA
  misc_feature 1..801: note = Synthetic
ttgatctgtagttatgaaaaaatgggacaagtcaaaatggagtcctatataattgacacttatcagggggttccctacactgcagccgttcaggttgacctcattgaaaaagactctaaccctgcaacactgactgtatggtttcccctattccagtcaagtacgcctgccccagtgttattagatcaactgaaaactttatcaatcaccacccagtacacagcatccccggaaggccctgtgctccaagtcaatgcagcagcccaaggtgccgccatgtctgcactacctaagaaatttgccgtcagtgctgcagtagcacttgacgagtacagtaggttggaattcgggacattgactgtgtgtgatgtgaggtccatttatctgactaccttgaagccatatggcatggtctccaaaataatgacagatgtgaggtctgttgggaggaagactcatgacttgatcgcattgtgtgattttatagacatagagaaaggggtgcccataaccatacctgcatatattaaagctgtctctatcaagaactcagaatcagccactgtggaagctgcaataagtggggaagcagaccaggctataactcaagcaaggatagctccatatgcagggctgatcttgattatgaccatgaacaaccctaaagggatctttaagaaattgggtgcaggtatgcaagttatagtagaactggggccgtatgtacaagcagagagtctgggaaaaatctgcaagacatggaatcatcaacgaaccaggtatgtactgaggtcacgttga

SEQ ID NO: 11083 - DNA, 69 bp, unidentified; identical to SEQ ID NO: 1863
  source 1..69: mol_type = other DNA
  misc_feature 1..69: note = Synthetic

SEQ ID NO: 11084 - DNA, 51 bp, unidentified; identical to SEQ ID NO: 1867
  source 1..51: mol_type = other DNA
  misc_feature 1..51: note = Synthetic

SEQ ID NO: 11085 - DNA, 57 bp, unidentified; identical to SEQ ID NO: 1870
  source 1..57: mol_type = other DNA
  misc_feature 1..57: note = Synthetic

SEQ ID NO: 11086 - DNA, 189 bp, unidentified
  misc_feature 1..189: note = Synthetic
  source 1..189: mol_type = other DNA
atgagcacagagacgagctcacacttgagaatattagggtcttcttcctgcgcgcgaatgaggctaagcagaagctccgtaagagttcggcaaagctcgctaaccttaaatttggcacttggaaggtccctgttgttaataaccattaccctgccaacactgcaaatacggtcgctgatggtgaactaa

SEQ ID NO: 11087 - DNA, 21 bp, unidentified
  misc_feature 1..21: note = Synthetic
  source 1..21: mol_type = other DNA
ttggcggtcgaaaaaagctag

SEQ ID NO: 11088 - DNA, 96 bp, unidentified; identical to SEQ ID NO: 1873
  misc_feature 1..96: note = Synthetic
  source 1..96: mol_type = other DNA

SEQ ID NO: 11089 - DNA, 51 bp, unidentified; identical to SEQ ID NO: 1874
  source 1..51: mol_type = other DNA
  misc_feature 1..51: note = Synthetic

SEQ ID NO: 11090 - DNA, 72 bp, unidentified; identical to SEQ ID NO: 1875
  misc_feature 1..72: note = Synthetic
  source 1..72: mol_type = other DNA

SEQ ID NO: 11091 - DNA, 69 bp, unidentified
  misc_feature 1..69: note = Synthetic
  source 1..69: mol_type = other DNA
atgccgtataaaaaaccaataaaaagccgaatggacatttcgacaagtctttttccctactatatataa

SEQ ID NO: 11092 - DNA, 15 bp, unidentified
  source 1..15: mol_type = other DNA
  misc_feature 1..15: note = Synthetic
atgttggtttcttga

SEQ ID NO: 11093 - DNA, 1224 bp, unidentified
  source 1..1224: mol_type = other DNA
  misc_feature 1..1224: note = Synthetic
atggcgatgtttgtgaggacctcgtctagcacacacgatgaagagagaatgcttccaattgaaggagcgcctcgcagacgaccccccgtgaagttcatattcccacctccacctctttcatcacttccaggatttggcaggccgcgcggctatgctggacccacggtgatagatatgtctgccccagacgacgtcttcgccgaggacacgccatcgccgccagcaacccctctggatctacagatatccccggatcagtcgagcggcgaatctgaatatgacgaggatgaggaagatgaagatgaagaagaaaatgacgatgttcaggaggaagacgagccagaggggtaccctgcagacttttttcaacctttatctcacttgcgcccgaggcctctggccagacgggcccatacgcccaaaccggtagcagtggtagcgggccgcgtgcgcagttcaacggacacggcggagtccgaggcgtccatgggatgggttagtcaggatgacggattttcccctgctgggctctcaccttcagacgacgagggggttgctatcctggaaccgatggcggcatacactgggaccggggcatacggactttcacctgcttccagaaatagtgtacctggaacacaaagttcaccatacagcgaccctgatgaagggccctcgtggcgccccctgcgcgccgcacccaccgcgatcgtcgacctgacatcggactctgatagcgatgacagttccaactctccggacgtgaacaatgaggccgcgtttaccgacgcgcgccatttttcccaccagccaccctcgtccgaggaggacggagaagaccaaggggaagtattgagtcagagaatcgggctcatggacgtgggccagaagcgcaaaaggcagtctaccgcctcctctggtagcgaggatgtggtgcgctgccagagacaaccaaacttaagccgcaaagcagtggcgtctgtgataattatatcctcggggagtgacacagacgaggagccctcgtccgccgtgagcgtgatcgtgtctccgtcgagcacaaagggtcacctcccaacccaatctcccagtacttccgcccactcgatttcatcaggaagcacaactaccgcggggtccaggtgcagcgacccaacccgcatcctggcctccacgccacccctgtgtggaaacggtgcatataactggccgtggctggactga

SEQ ID NO: 11094 - DNA, 1224 bp, unidentified
  source 1..1224: mol_type = other DNA
  misc_feature 1..1224: note = Synthetic
atggcgatgtttgtgaggacctcgtctagcacacacgatgaagagagaatgcttccaattgaaggagcgcctcgcagacgaccccccgtgaagttcatattcccacctccacctctttcatcacttccaggatttggcaggccgcgcggctatgctggacccacggtgatagatatgtctgccccagacgacgtcttcgccgaggacacgccatcgccgccagcaacccctctggatctacagatatccccggatcagtcgagcggcgaatctgaatatgacgaggatgaggaagatgaagatgaagaagaaaatgacgatgttcaggaggaagacgagccagaggggtaccctgcagacttttttcaacctttatctcacttgcgcccgaggcctctggccagacgggcccatacgcccaaaccggtagcagtggtagcgggccgcgtgcgcagttcaacggacacggcggagtccgaggcgtccatgggatgggttagtcaggatgacggattttcccctgctgggctctcaccttcagacgacgagggggttgctatcctggaaccgatggcggcatacactgggaccggggcatacggactttcacctgcttccagaaatagtgtacctggaacacaaagttcaccatacagcgaccctgatgaagggccctcgtggcgccccctgcgcgccgcacccaccgcgatcgtcgacctgacatcggactctgatagcgatgacagttccaactctccggacgtgaacaatgaggccgcgtttaccgacgcgcgccatttttcccaccagccaccctcgtccgaggaggacggagaagaccaaggggaagtattgagtcagagaatcgggctcatggacgtgggccagaagcgcaaaaggcagtctaccgcctcctctggtagcgaggatgtggtgcgctgccagagacaaccaaacttaagccgcaaagcagtggcgtccgtgataattatatcctcggggagtgacacagacgaggagccctcgtccgccgtgagcgtgatcgtgtctccgtcgagcacaaagggtcacctcccaacccaatctcccagtacttccgcccactcgatttcatcaggaagcacaactaccgcggggtccaggtgcagcgacccaacccgcatcctggcctccacgccacccctgtgtggaaacggtgcatataactggccgtggctggactga

SEQ ID NO: 11095 - DNA, 210 bp, unidentified
  source 1..210: mol_type = other DNA
  misc_feature 1..210: note = Synthetic
atggctacatgtaactgtggattccacgaaagcgaaaacaaactctgcagagcaacctgtgcctgcgtaatatttggggattctcagtttcttcctactccccagagaaatcaaagccctaacccaagtctgactacagagggtgtccccgggggcggggcaccctctaggcatggcctacgacgtcactgggctgtggttggagagtga

SEQ ID NO: 11096 - DNA, 210 bp, unidentified; identical to SEQ ID NO: 11095
  source 1..210: mol_type = other DNA
  misc_feature 1..210: note = Synthetic

SEQ ID NO: 11097 - DNA, 213 bp, unidentified
  source 1..213: mol_type = other DNA
  misc_feature 1..213: note = Synthetic
atggacaaactgtacaccggcgtcttcggctccttcctctccaactcggacgaggactttgaggagttcctgaacatcgtgcgcaccgtaatgactgaaaagccggcgtgcgataggcccaagggcgtcccctggaccaccgtttttctaatcggcctgatagcggcggcgatcggcgtgctgctgtgtttccactatttaaagctcgtctga

SEQ ID NO: 11098 - DNA, 39 bp, unidentified; identical to SEQ ID NO: 1882
  source 1..39: mol_type = other DNA
  misc_feature 1..39: note = Synthetic

SEQ ID NO: 11099 - DNA, 39 bp, unidentified; identical to SEQ ID NO: 1882
  misc_feature 1..39: note = Synthetic
  source 1..39: mol_type = other DNA

SEQ ID NO: 11100 - DNA, 54 bp, unidentified; identical to SEQ ID NO: 1883
  source 1..54: mol_type = other DNA
  misc_feature 1..54: note = Synthetic

SEQ ID NO: 11101 - DNA, 1584 bp, unidentified
  misc_feature 1..1584: note = Synthetic
  source 1..1584: mol_type = other DNA
atggccctgacgacccgcaaccccgagtcctttagacaacagccgcaggccaacagactctcggccattctggaggcggtggtcccctctcggaccaaccccacgcacgagaaggtgctggcgatcgtgaacgcgctggcggagaacaaggccatccgtcccgacgaggccgggctggtgtacaacgccctgctggagcgcgtgggccgctacaacagcacgaacgtgcagtccaacctggaccggctggtgacggacgtgcgcgaggccgtggcgcagcgcgagcggttcaagaacgagggcctgggctcgctggtggcgctgaacgccttcctggcgacgcagccggcgaacgtgccgcgcgggcaggacgattacaccaactttatcagcgcgctgcggctgatggtgaccgaggttccccagagcgaggtgtaccagtcgggcccggactactttttccagacgagccggcagggcttgcagacggtgaacctgagccaggctttcaagaacctgcgagggctgtggggcgtgcaggcgcccgtgggcgaccggtcgacggtgagcagcttgctgacgcccaactcgcggctgctgctgctgctgatcgcgcccttcaccgacagcggcagcgtgaaccgcaactcgtacctgggccatctgctgacgctgtaccgcgaggccataggccaggcgcaggtggacgagcagaccttccaggagatcactagcgtgagccgcgcgctggggcagaacgacaccgacagtctgagggccaccctgaacttcttgctgaccaatagacagcagaagatcccggcgcaatatgcgctgtcggccgaggaggaaaggatcctgagatatgtgcagcagagcgtagggctgttcctgatgcaggagggggccacccccagcgccgcgctggacatgaccgcgcgcaacatggaacctagcatgtacgccgccaaccggccgttcatcaataagctgatggactacctgcaccgcgcggcggtcatgaacacggactactttacaaacgccatcctgaacccgcactggctcccgccgccggggttctacacgggcgagtacgacatgcccgaccccaacgacgggttcctgtgggacgacgtggacagcgtggtgttctcgccgacctttcaaaagcgccaggaggcgccgccgagcgagggcgcggtggggaggagcccctttcctagcttagggagtttgcatagcttgccgggctcggtgaacagcggcagggtgagccggccgcgcttgctgggcgaggacgagtacctgaacgactcgctgctgcagccgccgcgggccaagaacgccatggccaataacgggatagagagtctggtggacaaactgaaccgttggaagacctacgctcaggaccatagggatgcgcccgcgccgcggcgacagcgccacgaccggcagcggggcctggtgtgggacgacgaggactcggccgacgatagcagcgtgttggacttgggcgggagcggtggggtcaacccgttcgcgcatctgcagcccaaactggggcgacggatgttttga

SEQ ID NO: 11102 - DNA, 51 bp, unidentified; identical to SEQ ID NO: 1887
  misc_feature 1..51: note = Synthetic
  source 1..51: mol_type = other DNA

SEQ ID NO: 11103 - DNA, 234 bp, unidentified
  misc_feature 1..234: note = Synthetic
  source 1..234: mol_type = other DNA
atgcaccgcgcggtgagcgccagcaggcggcgcgagctgagcgaccaggagctgatgcacagcctgcagcgggccctgaccggggccgggaccgagggggagagctactttgacatgggcgcggacctgcactggcagcccagccgccgggccttggaggcggcaggcggtcccccctacatagaagaggtggacgatgaggtggacgaggagggcgagtacctggaagactga

SEQ ID NO: 11104 - DNA, 186 bp, unidentified; identical to SEQ ID NO: 1892
  source 1..186: mol_type = other DNA
  misc_feature 1..186: note = Synthetic

SEQ ID NO: 11105 - DNA, 1356 bp, unidentified
  misc_feature 1..1356: note = Synthetic
  source 1..1356: mol_type = other DNA
atggacgaggctcagcgcttcgacttccagcgagtcatcggcgagtttcatcgcgttgtcgagaatagctggggcaaagagttgcgcgagaactcgtgcctgtctcgcaagcaacgcaacgttgtgcgcaacgtcttccgcgcgcttgtagccgcgacgcaagcgcgaaacggtaagctcgacgtgttttaccccgaggttctccagaatcgctttgccaaagctctcttagcagcgaacgacggtaaactcttgcacgcctacgagcacatacacgcgcatggggaacagcttggcacagtgctggacactcgcggcaagtatattctttactacgtgttctcgctcgtgctctctgcgcaggtagcggctcgcgcggacgccccgaaaacctttctaatgaaggtactacgcacccattttctgcggcgctgcaagtacatgtttgtaggtctccccgcgtacctcgtgcagggtatgagttccaaggatttcgtcgaactgctgactagtatgcgcgacgttcaggtctatgacgagcacacaaagagaatgatccgcgtgaacgccgtggatgcgtatctcgacaagtacatcgactttgtggtgttcctaggctcgatcaaggaagaactcaagagttcggggccgagcacgccacgggtcatcttacaacagcgctggttgcgcctggaaaccacgctatccgtgcccgagtttgtgatggagggtctaggcttcagtgccagggacgccatctacgtgttcaactcgcctcgtgcgcgtatgtacctgttcagtcacggaaacggagcgtatcaatacttcgagttggaccgcgattaccctgcgggcgtacctctgacctacgacgcgcaaaaagacatcagtgcgctggcgatactttccgcgcgagaacccgaggagctctaccgcaatcggcttgtgaccccagatacatgcacggagttcatctttaacgaggacatgtacgcagctcgtccgcacgcctttgacgaagacacatctgtggccgcggatccaaactttgacccgcgtgcagacgcatacggagaacaaaacttgctgccgttgttaccgctgctcgaggggctatccgaaaacgagctcgaggtggaactgcaggtgctgcagcgcgagttgcagatgttcctgggctacgtgtccgggctctccgatgacttgtaccaggccaggcaatgtttgcagctggtgcgcacgctgctagaacgcgtcgaggagaagttcgacgctctgcgcagagacgcgctacgcctggcacgcactgttgacagcttcacgagcgggtcggagcctgtctgcccgctgagttaa

SEQ ID NO: 11106 - DNA, 891 bp, unidentified
  source 1..891: mol_type = other DNA
  misc_feature 1..891: note = Synthetic
ctgtcactgcgcggcctgccaactccaaagaaaaaaccacctcctgatatgagctactggaggccgcctgtacacaatgtcccggggctcgagcacctctggtacgagtcagtgcatcgtagccatgctgctgtttgtggttgtggggattttgtacgccatattactgctctggctgagagatacggccaccccgggggcccgcgcgcgcctggggctccgggagtagggggcaaccctaattctcctcagatccgtcgagcccgccacccggcggcagctccggaccccccagcaggtaaccaacctccggccctgccatggcatggagatggtggaaacgaaggcgccgctggtggtggaaacgacgctggacccgtggccgacttcgcggacgacgggctagaccagctggtcgccgccctcgacgaagacgagtcccaaaaaacccagggtcgacctcgggcctatccaagagcaagaaaggccctcagattcactccaaagagaatcgaagccgtggcagaccagcgaggaagaaagcgaagcagaagtccaagagcaagagacgcaggagatgcccctcagagagcaactcctccacaacctcagagagcagcagcaactcagaaagggcctccagtgtgtcttccagcaactaataaagacacaacagggggtacacatagatccatgcctactataggtccccagcagtggctttttcccgagagaaagcctagaccccctccatcggccggagactgggccatggagtacctagcttgcaaagtatttgacaggccccctcgtaccaaactcacagaccctcctttctacccctactgcaaaaacaattacaatgtaacctttcagctcaactacaaataa

SEQ ID NO: 11107 - DNA, 864 bp, unidentified
  misc_feature 1..864: note = Synthetic
  source 1..864: mol_type = other DNA
ctgtcactgcgcggcctgccaactccaaagaaaaaaccacctcctgatatgagctactggaggccgcctgtacacaatgtcccggggctcgagcacctctggtacgagtcagtgcatcgtagccatgctgctgtttgtggttgtggggattttgtacgccatattactgctctggctgagagatacggccaccccgggggcccgcgcgcgcctggggctccgggagtagggggcaaccctaattctcctcagatccgtcgagcccgccacccggcggcagctccggaccccccagcaggtaaccaacctccggccctgccatggcatggagatggtggaaacgaaggcgccgctggtggtggaaacgacgctggacccgtggccgacttcgcggacgacgggctagaccagctggtcgccgccctcgacgaagacgagttgttagagacccctgcactcagcccaccttcgaactgcccggagccagtacgcagcctccacgaatacaagtcacggacccgaaactcctcggtccccactactcattcaaatcgtgggacctcagacgtggctactatagctcaaaaagtattaagcgaatgtcagaatacgaagaaccttctgagtttattttcccaggtcccaaaaaacccagggtcgacctcgggcctatccaagagcaagaaaggccctcagattcactccaaagagaatcgaagccgtggcagaccagcgaggaagaaagcgaagcagaagtccaagagcaagagacgcaggagatgcccctcagagagcaactcctccacaacctcagagagcagcagcaactcagaaagggcctccagtgtgtcttccagcaactaa

SEQ ID NO: 11108 - DNA, 441 bp, unidentified
  source 1..441: mol_type = other DNA
  misc_feature 1..441: note = Synthetic
ctgtcactgcgcggcctgccaactccaaagaaaaaaccacctcctgatatgagctactggaggccgcctgtacacaatgtcccggggctcgagcacctctggtacgagtcagtgcatcgtagccatgctgctgtttgtggttgtggggattttgtacgccatattactgctctggctgagagatacggccaccccgggggcccgcgcgcgcctggggctccgggagtagggggcaaccctaattctcctcagatccgtcgagcccgccacccggcggcagctccggaccccccagcaggtaaccaacctccggccctgccatggcatggagatggtggaaacgaaggcgccgctggtggtggaaacgacgctggacccgtggccgacttcgcggacgacgggctagaccagctggtcgccgccctcgacgaagacgagtaa

SEQ ID NO: 11109 - DNA, 153 bp, unidentified; identical to SEQ ID NO: 1915
  misc_feature 1..153: note = Synthetic
  source 1..153: mol_type = other DNA

SEQ ID NO: 11110 - DNA, 153 bp, unidentified; identical to SEQ ID NO: 1915
  misc_feature 1..153: note = Synthetic
  source 1..153: mol_type = other DNA

SEQ ID NO: 11111 - DNA, 153 bp, unidentified; identical to SEQ ID NO: 1915
  misc_feature 1..153: note = Synthetic
  source 1..153: mol_type = other DNA

SEQ ID NO: 11112 - DNA, 357 bp, unidentified
  source 1..357: mol_type = other DNA
  misc_feature 1..357: note = Synthetic
atggcatcaggaagagatccaagagaacctttaccaggatggctggaaatctgggatctagacagggagccatgggacgaatggctacaagacatgctcagggatctaaacgaagaagccagaaggcactttggaatgaacatgctaatccgagtatggaattactgtgtagaggagggaaggagacataataccccatggaatgagataggctacaagtactatagaattgttcaaaagtctatgtttgtacatttcagatgtggttgtagaaggagaggacctttttccccttacgaagagaggagaaatggacaaggaggaggagccccaccccctcctccaggacttgcatag

SEQ ID NO: 11113 - DNA, 39 bp, unidentified; identical to SEQ ID NO: 1882
  source 1..39: mol_type = other DNA
  misc_feature 1..39: note = Synthetic

SEQ ID NO: 11114 - DNA, 33 bp, unidentified; identical to SEQ ID NO: 1901
  misc_feature 1..33: note = Synthetic
  source 1..33: mol_type = other DNA

SEQ ID NO: 11115 - DNA, 48 bp, unidentified; identical to SEQ ID NO: 1903
  source 1..48: mol_type = other DNA
  misc_feature 1..48: note = Synthetic

SEQ ID NO: 11116 - DNA, 1914 bp, unidentified
  source 1..1914: mol_type = other DNA
  misc_feature 1..1914: note = Synthetic
acgcacgctatggccttgagcgtcaatgactgcgcgcgtcttaccggccagaccgtgccgaccatggactatttcctaccgctgcgcaacatctggaaccgcgtccgcgagttcccgcgcgcctccaccaccgccgccggcattacctggatgtcccgctacctctacggctaccaccgcctcatgctcgaggacctggccccgggcgcgccggccacccagcgctggccgctgtaccgccagccgccgccgcacttcctagttggataccagtaccttgtgcgcacctgcaacgactacgtctttgactcgcgcgccttctcgcggcttaggtactccgaggttgtgcagcccggcctgcagaccgttaactggtcgcttatggccaactgcacctacaccattaacaccggggcctaccaccgctttgttgacatggacgacttccaagacaccctcacccgcgtgcaacaggccatccttgccgagcgcgtcgtcgccgacctggcgctcgtgcagccgctcaggggcgttggggttacccgcatggaagactccgcctccgccgcaaatgatgacattgagaggctcatgcatgactactacaagaacctgagccggtgtcagggtcaggcctggggcatggccgagcggcttcgcatccagcaagcgggacccaaggacctggtcctcctcgccaccatccgccgcctcaaaaacgcctacttcaattacatcatcagcaatcgcaattctaacagcgtccacagggctgctacgtgtttaagcttaccttgcgactgcgattggctagacgctttcctccaaagattctccgatccggtcgatcttgacgcgcttacgtcccctacgccgcaattgataagatgcatcgttagcgccctttcgctacccaacggggacccgccctattaccgggagatgaccggcggcgtcttcacgctgcgtcctcgcgaacagggtcgcgccgtcaccgaaaccatgcgtcgccgccgcggggaaatgatcgagcgcttcgtcgaccgtctcccggtgcgtcgccgtcgtcgtcgggccccgccaccaccaccgcccccagaggaaatagaagaagaggtcgtcatggaagaggaacaagaggaggctcccggggattttgagcgcgaggtgcgcgccaccattgccgagctcatccggctcctggaagacgagctcacggtatcggcccgcaacgcccagttttttaactttgccgtggacttttacgaggccatggaaaggctggaggccattggcgacatcagcgaaatgcccctgcgccgctggatcatgtacttctttgtcaccgagcacatcgccaccacccttaactacctttttcagcgcctgcgcaactacgccgtctttacgcggcacgtggagctgaaccttgcgcaggtggtcatgcgcgcgcgcgacgttgacggggacgtggtttacagccgcgtttggaacgagagcggcctgggtgccttttcgcagcttatgggtcgcatctcaaatgaccttgccgccaccgtcgagcgcgcgggccgcggcgatctccaggaggaggagatcgagcagttcatgtccgagatcgcctaccaggacaactcgggcgacgtgcaagagatcctgcggcaggccgccgtcaatgacgccgagattgattctgttgaactgtctttcaggttcaaagtcacggggcccgtggtcttcacgcagaggcggcagatccaggatgtcaaccgccgcgtcgtcgcgcacgccagcgctctcagggcgcagcaccgggacctgcccgagcgccacgccgacgtgcctctgccgcccctgcccacggggccggaaccgccgctgccgccaggagcgcgtccgcgacaccgcttctaa

SEQ ID NO: 11117 - DNA, 237 bp, unidentified
  source 1..237: mol_type = other DNA
  misc_feature 1..237: note = Synthetic
atgactgcgcgcgtcttaccggccagaccgtgccgaccatggactatttcctaccgctgcgcaacatctggaaccgcgtccgcgagttcccgcgcgcctccaccaccgccgccggcattacctggatgtcccgctacctctacggctaccaccgcctcatgctcgaggacctggccccgggcgcgccggccacccagcgctggccgctgtaccgccagccgccgccgcacttcctag

SEQ ID NO: 11118 - DNA, 48 bp, unidentified; identical to SEQ ID NO: 1911
  source 1..48: mol_type = other DNA
  misc_feature 1..48: note = Synthetic

SEQ ID NO: 11119 - DNA, 405 bp, unidentified
  misc_feature 1..405: note = Synthetic
  source 1..405: mol_type = other DNA
atgactgaccccatggccaacaacaccgtcaacgacctcctggacatggacggccgcgcctcggagcagcgactcgcccaactccgcatccgccagcagcaggagagagccgtcaaggagctgcaggatgcggtggccatccaccagtgcaagagaggcatcttctgcctggtgaagcaggccaagatctccttcgaggtcacgtccaccgaccatcgcctctcctacgagctcctgcagcagcgccagaagttcacctgcctggtcggagtcaaccccatcgtcatcacccagcagtctggcgataccaagggttgcatccactgctcctgcgactcccccgagtgcgttcacaccctgatcaagaccctctgcggcctccgcgacctcctccccatgaactaa

SEQ ID NO: 11120 - DNA, 153 bp, unidentified; identical to SEQ ID NO: 1915
  source 1..153: mol_type = other DNA
  misc_feature 1..153: note = Synthetic

SEQ ID NO: 11121 - DNA, 162 bp, unidentified; identical to SEQ ID NO: 1916
  source 1..162: mol_type = other DNA
  misc_feature 1..162: note = Synthetic

SEQ ID NO: 11122 - DNA, 222 bp, unidentified
  source 1..222: mol_type = other DNA
  misc_feature 1..222: note = Synthetic
atggaagaaaccttacatctttacaaagtgtgttttgatctactctatgacactggtctttgttttacaggtatggacaattttcagctatatttatggaaactggtgaccggggggtgggaatttttcatgctatgtcttcaactattgatccaagcagtggtcctgacttcagtcatcctattggctatagaaaggctgaagcagtgtggaaaagactaa

SEQ ID NO: 11123 - DNA, 39 bp, unidentified; identical to SEQ ID NO: 1920
  misc_feature 1..39: note = Synthetic
  source 1..39: mol_type = other DNA

SEQ ID NO: 11124 - DNA, 39 bp, unidentified; identical to SEQ ID NO: 1920
  misc_feature 1..39: note = Synthetic
  source 1..39: mol_type = other DNA

SEQ ID NO: 11125 - DNA, 561 bp, unidentified
  misc_feature 1..561: note = Synthetic
  source 1..561: mol_type = other DNA
atgacagcgacccccctcaccaacctgttcttacgggccccggacataacccacgtggcccccccttactgcctcaacgccacctggcaggccgaaacggccatgcacaccagcaaaacggactccgcttgcgtggccgtgcggagttacctggtccgcgcctcctgtgagaccagcggcacaatccactgctttttctttgcggtatacaaggacacccaccacacccctccgctgattaccgagctccgcaactttgcggacctggttaaccacccgccggtcctacgcgaactggaggataagcgcggggtgcggctgcggtgtgcgcggccgtttagcgtcgggacgattaaggacgtctctgggtccggcgcgtcctcggcgggagagtacacgataaacgggatcgtgtaccactgccactgtcggtatccgttctcaaaaacatgctggatgggggcctccgcggccctacagcacctgcgctccatcagctccagcggcatggccgcccgcgcggcagagcatcgacgcgtcaagattaaaattaaggcgtga

SEQ ID NO: 11126 - DNA, 1296 bp, unidentified
  source 1..1296: mol_type = other DNA
  misc_feature 1..1296: note = Synthetic
atgtccccttctgtggaggagactacctcagtcaccgagtccatcatgttcgctatcgtgagtttcaaacacatgggcccgttcgaaggctactctatgtcggccgatcgcgccgcctcggatctactcatcggcatgttcggctccgttagcctggtcaacctgctgactatcatcggttgcctctgggtgttgcgtgttacgcggccgcccgtgtccgtgatgatttttacttggaatctggtacttagtcagtttttttccatcctggccaccatgttgtccaagggtatcatgctgcgtggcgctctaaatctcagcctctgtcgcttagtgctctttgtcgacgacgtgggcctatattcgacggcgttgtttttcctctttctgatactggatcgtctgtcggccatatcttacggccgtgatctctggcatcatgagacgcgcgaaaacgccggcgtggcgctctacgcggtcgcctttgcctgggttctttccatcgtagccgctgtgcccaccgccgctacgggttcactggactaccgttggctaggctgtcagatccctatacagtatgccgcggtggacctcaccatcaagatgtggtttttgctgggggcgcccatgatcgccgtactggctaacgtggtagagttggcctacagcgatcggcgcgaccacgtctggtcctacgtgggtcgtgtctgcaccttctacgtgacgtgtctcatgctgtttgtgccctactactgcttcagagtcctacgcggtgtactgcagcccgctagcgcggccggcaccggtttcggcattatggattacgtggaattggctacgcgtacccttctcaccatgcgtcttggcattctgccgctctttatcattgcgttcttctcccgcgagcccaccaaggatctggatgactcctttgattatctggtcgagagatgtcagcaaagctgccacggtcatttcgtacgtcggttggtgcaggcgttgaagcgggctatgtatagcgtggagctggccgtgtgttacttttctacgtccgtccgagacgtcgccgaggcggtgaaaaagtcctccagccgttgttacgccgacgcgacgtcggcggccgttgtggtaacgacaaccacgtcggagaaagccacgttggtggagcacgcggaaggcatggcttccgaaatgtgtcctgggactacgatcgatgtttcggccgaaagttcctccgtcctctgcaccgacggcgaaaacaccgtcgcgtcggacgcgacggtgacggcattatga

SEQ ID NO: 11127 - DNA, 927 bp, unidentified
  source 1..927: mol_type = other DNA
  misc_feature 1..927: note = Synthetic
ctgtcactgcgtgctgtgcgaacaacaaacaaggcttgcaaactactaatagtaatgtggaccccacctcgcaatgatcaacactaccttaactggcaatggtactcaagtatacttagctcccacgctgctatgtgcgggtgtcccgacgctgtcgctcattttaatcatcttgcttctgtgcttcgtgccccgcaaaacccaccccctcccggtccccagcgaaacctgcccctccgacggctgccggctctcccggctgcgccagaggcgcccggagatagagcaccatggcctatggctggtggcgccgaaggagaagacggtggcgcaggtggagacgcagaccatggaggcgccgctggaggacccgaagacgcagacctgctagacgccgtggccgccgcagaaaccaggccacaagagacccaggagggacaccgaggtgtaccactccagccaagaaggggagcaaaaagaaagcttacttttccccccagtcaagctcctcagacgagtccccccgtgggaagactcgcagcaggaggaaagcgggtcgcaaagctcagaggaagagacacagaccgtctcccagcagctcaagcagcagctgcagcaacagcgaatcctgggagtcaaactcagactcctcttcaaccaagtccaaaaaatccaacaaaatcaagatatcaaccctaccttgttaccaagggggggggatctagcatccttatttcaaatagcaccataaacatgtttggtgaccccaaaccttacaacccttccagtaatgactggaaagaggagtacgaggcctgtagaatatgggacagaccccccagaggcaacctaagagataccccttactacccctgggcccccaaggagaaccagtaccgtgtaaactttaaacttggatttcaataa

SEQ ID NO: 11128 - DNA, 915 bp, unidentified
  misc_feature 1..915: note = Synthetic
  source 1..915: mol_type = other DNA
ctgtcactgcgtgctgtgcgaacaacaaacaaggcttgcaaactactaatagtaatgtggaccccacctcgcaatgatcaacactaccttaactggcaatggtactcaagtatacttagctcccacgctgctatgtgcgggtgtcccgacgctgtcgctcattttaatcatcttgcttctgtgcttcgtgccccgcaaaacccaccccctcccggtccccagcgaaacctgcccctccgacggctgccggctctcccggctgcgccagaggcgcccggagatagagcaccatggcctatggctggtggcgccgaaggagaagacggtggcgcaggtggagacgcagaccatggaggcgccgctggaggacccgaagacgcagacctgctagacgccgtggccgccgcagaaacgttgttagaaatccctgcaaagaaacccactcctcgggcaatagagtccctagaagcttacaaatcgttgacccgaaatacaactcaccggaactcacattccatacctgggacttcagacgtggtctctttggcccgaaagctattcagagaatgcaacaacaaccaacaactactgacattttttcagcaggccacaagagacccaggagggacaccgaggtgtaccactccagccaagaaggggagcaaaaagaaagcttacttttccccccagtcaagctcctcagacgagtccccccgtgggaagactcgcagcaggaggaaagcgggtcgcaaagctcagaggaagagacacagaccgtctcccagcagctcaagcagcagctgcagcaacagcgaatcctgggagtcaaactcagactcctcttcaaccaagtccaaaaaatccaacaaaatcaagatatcaaccctaccttgttaccaagggggggggatctag

SEQ ID NO: 11129 - DNA, 318 bp, unidentified; identical to SEQ ID NO: 10241
  misc_feature 1..318: note = Synthetic
  source 1..318: mol_type = other DNA

SEQ ID NO: 11130 - DNA, 318 bp, unidentified; identical to SEQ ID NO: 10241
  misc_feature 1..318: note = Synthetic
  source 1..318: mol_type = other DNA

SEQ ID NO: 11131 - DNA, 516 bp, unidentified
  misc_feature 1..516: note = Synthetic
  source 1..516: mol_type = other DNA
atggagatttggacggttttggaagactttcacaagactaggcagctgctagagaacgcctcgaacggagtctcttacctgtggagattctgcttcggcggtgacctagctaagctagtctatagggccaaacaggattatagggaacaatttgaggatattttgagagagtgtcctggtctttttgacgctcttaacttgggccatcagtctcactttaaccagagaatttcaagagcccttgactttactactcctggcagaaccactgcagcagtagccttttttgcttttatttttgacaaatggagtcaagaaacccatttcagcagggattaccagctggatttcttagcagtagctttgtggagaacatggaagtgccagcgcctgaatgcaatctccggctacttgccggtacagccgctagacactctgaggatcctgagtctccagcagcaggaggatcaagaagagaatccgagagccggcctggaccctccggcggaggagtag

SEQ ID NO: 11132 - DNA, 18 bp, unidentified
  misc_feature 1..18: note = Synthetic
  source 1..18: mol_type = other DNA
atggaggaaagattttaa

SEQ ID NO: 11133 - DNA, 18 bp, unidentified
  misc_feature 1..18: note = Synthetic
  source 1..18: mol_type = other DNA
atggaggaaagattttaa

SEQ ID NO: 11134 - DNA, 18 bp, unidentified
  source 1..18: mol_type = other DNA
  misc_feature 1..18: note = Synthetic
atggaggaaagattttaa

SEQ ID NO: 11135 - DNA, 1818 bp, unidentified
  misc_feature 1..1818: note = Synthetic
  source 1..1818: mol_type = other DNA
atgaggcctaaaaaggatggcttggaagactttctgaggctaactcctgaaatcaaaaagcagctgggctctctggtctctgactactgcaacgtcctcaacaaggaatttacagccgggagtgtggagattactctgagatcctacaaaatatgcaaggcatttataaatgaggccaaggcccacgggcgagaatggggcgggctaatggccacgctcaacatctgcaatttttgggccattctccgaaacaacagggtaagaagacgggctgagaatgccggcaacgacgcatgttccatcgcgtgccctatagtgatgcgctacgtgttagaccacctgatagtggtcactgacagattcttcatccaggcccccagcaaccgggtgatgattcctgccaccataggcaccgctatgtacaagctcctaaaacacagtcgggtgcgggcctacacctacagcaaggtgctgggcgtggaccgcgcggccatcatggcctccggcaagcaggtagtggaacacctgaacaggatggagaaggaaggcctcctaagctccaagttcaaggccttttgcaagtgggtgttcacctatcccgtcctcgaggagatgttccagactatggtctcgtccaagacaggccatctgacggacgatgttaaggatgtcagggctctgattaagacactgccccgggcctcctactccagccacgccggacagaggagctacgtgagcggcgtgcttcccgcgtgcctgctgtcaaccaagtccaaggcagtggaaactcctatcctcgtgtccggagccgacaggatggacgaggagctcatggggaatgatgggggtgcctctcacaccgaggcccgctactcggagtccggacagtttcatgcttttacagatgaactcgaaagtctcccgagcccgaccatgcccctgaagcccggtgcccaaagcgccgactgcggtgacagcagttccagcagcagtgactcgggcaacagtgacaccgagcagagcgagcgggaagaggccagggccgaggccccgcgcctgcgggccccaaagtcgcgccggacatccaggcccaaccgtggtcaaactccatgtccttccaacgcggcggaacctgaacagccttggatagcagcggtccaccaagagagcgatgagagacccatattcccccacccctcaaagcccacctttcttcctcccgttaaaaggaagaagggcctcagggatagccgggaaggtatgttcctgccaaagccggaagcgggcagtgccatatctgacgtgttcgaggggcgagaggtgtgtcagccaaagaggatcaggcccttccatccacccggatccccgtgggccaaccggcccctgcctgcctctttggctcccacccccacaggacctgtccatgaaccggtcggatccctaacgccagccccggtgccccagccacttgacccggcccccgcagtaacccccgaggcaagtcatctgttggaggaccctgatgaagaaaccagtcaggccgtgaaggccctaagggagatggctgacactgttattccccagaaggaggaagcagccatatgtggacagatggacctgagccacccgccccctcgtggccatttggacgaactgaccacaacactagagtccatgacagaggatttgaatctggactcccccctgacccccgaacttaatgaaatcttggatacatttctaaatgatgaatgtctgctgcatgccatgcatatttcaactgggctgtctatttttgacaccagcttattttag

SEQ ID NO: 11136 - DNA, 1818 bp, unidentified
  misc_feature 1..1818: note = Synthetic
  source 1..1818: mol_type = other DNA
atgaggcctaaaaaggatggcttggaagactttctgaggctaactcctgaaatcaaaaagcagctgggctctctggtctctgactactgcaacgtcctcaacaaggaatttacagccgggagtgtggagattactctgagatcctacaaaatatgcaaggcatttataaatgaggccaaggcccacgggcgagaatggggcgggctaatggccacgctcaacatctgcaatttttgggccattctccgaaacaacagggtaagaagacgggctgagaatgccggcaacgacgcatgttccatcgcgtgccctatagtgatgcgctacgtgttagaccacctgatagtggtcactgacagattcttcatccaggcccccagcaaccgggtgatgattcctgccaccataggcaccgctatgtacaagctcctaaaacacagtcgggtgcgggcctacacctacagcaaggtgctgggcgtggaccgcgcggccatcatggcctccggcaagcaggtagtggaacacctgaacaggatggagaaggaaggcctcctaagctccaagttcaaggccttttgcaagtgggtgttcacctatcccgtcctcgaggagatgttccagactatggtctcgtccaagacaggccatctgacggacgatgttaaggatgtcagggctctgattaagacactgccccgggcctcctactccagccacgccggacagaggagctacgtgagcggcgtgcttcccgcgtgcctgctgtcaaccaagtccaaggcagtggaaactcctatcctcgtgtccggagccgacaggatggacgaggagctcatggggaatgatgggggtgcctctcacaccgaggcccgctactcggagtccggacagtttcatgcttttacagatgaactcgaaagtctcccgagcccgaccatgcccctgaagcccggtgcccaaagcgccgactgcggtgacagcagttccagcagcagtgactcgggcaacagtgacaccgagcagagcgagcgggaagaggccagggccgaggccccgcgcctgcgggccccaaagtcgcgccggacatccaggcccaaccgtggtcaaactccatgtccttccaacgcggaggaacctgaacagccttggatagcagcggtccaccaagagagcgatgagagacccatattcccccacccctcaaagcccacctttcttcctcccgttaaaaggaagaagggcctcagggatagccgggaaggtatgttcctgccaaagccggaagcgggcagtgccatatctgacgtgttcgaggggcgagaggtgtgtcagccaaagaggatcaggcccttccatccacccggatccccgtgggccaaccggcccctgcctgcctctttggctcccacccccacaggacctgtccatgaaccggtcggatccctaacgccagccccagtgccccggccacttgacccggcccccgcagtaacccccgaggcaagtcatctgttggaggaccctgatgaggaaaccagtcaggccgtgaaggccctaagggagatggctgacactgttattccccagaaggaggaagcagccatatgtggacagatggacctgaaccacccgccccctcgtggccatttggacgaactgaccacaacactagagtccatgacagaggatttgaatctggactcccccctgacccccgaacttaatgaaatcttggatacatttctaaatgatgaatgtctgctgcatgccatgcatatttcaactgggctgtctatttttgacaccagcttattttag

SEQ ID NO: 11137 - DNA, 1818 bp, unidentified
  source 1..1818: mol_type = other DNA
  misc_feature 1..1818: note = Synthetic
atgaggcctaaaaaggatggcttggaagactttctgaggctaactcctgaaatcaaaaagcagctgggctctctggtctctgactactgcaacgtcctcaacaaggaatttacagccgggagtgtggagattactctgagatcctacaaaatatgcaaggcatttataaatgaggccaaggcccacgggcgagaatggggcgggctaatggccacgctcaacatctgcaatttttgggccattctccgaaacaacagggtaagaagacgggctgagaatgccggcaacgacgcatgttccatcgcgtgccctatagtgatgcgctacgtgttagaccacctgatagtggtcactgacagattcttcatccaggcccccagcaaccgggtgatgattcctgccaccataggcaccgctatgtacaagctcctaaaacacagtcgggtgcgggcctacacctacagcaaggtgctgggcgtggaccgcgcggccatcatggcctccggcaagcaggtagtggaacacctgaacaggatggagaaggaaggcctcctaagctccaagttcaaggccttttgcaagtgggtgttcacctatcccgtcctcgaggagatgttccagactatggtctcgtccaagacaggccatctgacggacgatgttaaggatgtcagggctctgattaagacactgccccgggcctcctactccagccacgccggacagaggagctacgtgagcggcgtgcttcccgcgtgcctgctgtcaaccaagtccaaggcagtggaaactcctatcctcgtgtccggagccgacaggatggacgaggagctcatggggaatgatgggggtgcctctcacaccgaggcccgctactcggagtccggacagtttcatgcttttacagatgaactcgaaagtctcccgagcccgaccatgcccctgaagcccggtgcccaaagcgccgactgcggtgacagcagttccagcagcagtgactcgggcaacagtgacaccgagcagagcgagcgggaagaggccagggccgaggccccgcgcctgcgggccccaaagtcgcgccggacatccaggcccaaccgtggtcaaactccatgtccttccaacgcggaggaacctgaacagccttggatagcagcggtccaccaagagagcgatgagagacccatattcccccacccctcaaagcccacctttcttcctcccgttaaaaggaagaagggcctcagggatagccgggaaggtatgttcctgccaaagccggaagcgggcagtgccatatctgacgtgttcgaggggcgagaggtgtgtcagccaaagaggatcaggcccttccatccacccggatccccgtgggccaaccggcccctgcctgcctctttggctcccacccccacaggacctgtccatgaaccggtcggatccctaacgccagccccggtgcccaagccacttgacccggcccccgcagtaacccccgaggcaagtcatctgttggaggaccctgatgaggaaaccagtcaggccgtgaaggccctaagggagatggctgacactgttattccccagaaggaggaagcagccatatgtggacagatggacctgaaccacccgccccctcgtggccatttggacgaactgaccacaacactagagtccatgacagaggatttgaatctggactcccccctgaccccagaacttaatgaaatcttggatacatttctaaatgatgaatgtctgctgcatgccatgcatatttcaactgggctgtctatttttgacaccagcttattttag

SEQ ID NO: 11138 - DNA, 1989 bp, unidentified
  source 1..1989: mol_type = other DNA
  misc_feature 1..1989: note = Synthetic
atgcacaagggaatccccaaaagctccaaaacccaaacacatacccaacaagaccgccccccacaacccagcaccgaactcgaagagaccaggacctcccgagcacgacacagcacaacatcagctcagcgatccacgcactacgatcctcgaacatcggacagacccgtctcctacaccatgaacaggaccaggtcccgcaagcaaaccagccacagattgaagaacatcccagttcacggaaaccacgaggccaccatccagcacataccagagagtgtctcaaaaggagcgagatcccagatcgaaaggcggcaacccaatgcaatcaactcaggctctcagtgcacctggttagtcctgtggtgcctcggaatggccagtctctttctttgttccaaggctcagatacattggaataatttgtcaactattgggattatcgggactgatagtgtccattacaagatcatgactaggcccagtcaccagtacttggtcataaaactgatgcctaatgtttcacttatagagaattgtaccaaagcagaattaggtgagtatgagaaattattgaattcagtcctcgaaccaatcaaccaagctttgactctaatgaccaagaatgtgaagcccctgcagtcattagggtcaggtaggagacaaaggcgttttgcaggagtggtacttgcaggtgtagctttaggagtggctacagctgcacaaatcactgcaggaatagctttacatcaatccaacctcaatgctcaagcaatccaatctcttagaaccagccttgaacagtctaacaaagctatagaagaaattagggaggctacccaagaaaccgtcattgccgttcagggagtccaggactacgtcaacaacgaactcgtccctgccatgcaacatatgtcatgtgaattagttgggcagagattagggttaagactgcttcggtattatactgagttgttgtcaatatttggcccgagtttacgtgaccctatttcagccgagatatcaattcaggcactgatttatgctcttggaggagaaattcataagatacttgagaagttgggatattctggaagtgatatgattgcaatcttggagagtcgggggataaaaacaaaaataactcatgttgatcttcccgggaaattcatcatcctaagtatctcatacccaactttatcagaagtcaagggggttatagtccacagactggaagcagtttcttacaacataggatcacaagagtggtacaccactgtcccgaggtatattgcaactaatggttacttaatatctaattttgatgagtcatcttgtgtattcgtctcagagtcagccatttgtagccagaactccctgtatcccatgagcccactcttacaacaatgtattaggggcgacacttcatcttgtgctcggaccttggtatctgggactatgggcaacaaatttattctgtcaaaaggtaatatcgtcgcaaattgtgcttctatactatgtaagtgttatagcacaagcacaattattaatcagagtcctgataagttgctgacattcattgcctccgatacctgcccactggttgaaatagatggtgctactatccaagttggaggcaggcaataccctgatatggtatacgaaggcaaagttgccttaggccctgctatatcacttgataggttagatgtaggtacaaacttagggaacgcccttaagaaactggatgatgctaaggtactgatagactcctctaaccagatccttgagacggttaggcgctcttcctttaattttggcagtctcctcagtgttcctatattaagttgtacagccctggctttgttgttgctgatttactgttgtaaaagacgctaccaacagacactcaagcagcatactaaggtcgatccggcatttaaacctgatctaactggaacttcgaaatcctatgtgagatcactctga

SEQ ID NO: 11139 - DNA, 1293 bp, unidentified
  misc_feature 1..1293: note = Synthetic
  source 1..1293: mol_type = other DNA
atctgcccttccccaatcagaaccatgggaaagacttatagctctccggtaaaccctatccccaaagccccaaaagggctagcaattcaccactggctaaactttctccaagccgcgtaccgactgcagccagggccctctgaatttgacttccatcagttacggaagttcctaaaactagccatcaagaccccggtgtggttaaatcccatcaattactctgtccttgccgggctcattcccaagaactacccgggcagggtccatgaaatagtagccatcctaattcaagagacccctgcgcgcgaggcgcccccatcggccccaccagcagatgaccctcaaaagcctccaccctaccccgagcatgcacaggtagaacctcagtgcctccctgtccttcacccccacggggccccagccactcaccgcccctggcaaatgaaggatctccaggctatcaagcaggaagttagttcttccgcccctggcagcccccagttcatgcagaccgtgcgtctagctgtccagcagtttgaccccacagctaaagatctccatgatctcctacagtacttatgctcctcgctagttacctccctgcaccatcagcaacttgagactctcatagcccaggcagaaacccaaggtataacaggctataaccctctggccggccccctacgagtacaggctaacaacccaaatcagcaagggcttcggagagaatatcaaaacctgtggttatcggccttttccgccctcccgggaaacaccaaggaccccacctgggcggccatcctccaaggacctgaagaacctttctgctctttcgtggagaggcttaatgtggctttggataatggccttccggaaggtacccccaaagatccaatccttaggtccctcgcctattcaaacgctaataaagaatgtcaaaaactcctacaggcccgaggacagaccaatagcccgttaggggaaatgctcagggcctgccaaacctggacaccccgagataaaaacaaaatactaatgatacaacctaaaaagactcctcccccaaaccaaccatgcttccgctgtgggcaagcaggtcattggagcagagattgtaaacagccccgaccccctccgggcccctgccctctctgccaggaccccgcccattggaagcgggactgcccacagttaaaagcagataccaaaggcagtgaagacctactcctagacctgccctgtgaagcctcccatgtccgggagcaaaaaaactcctcagggggggaggactaa

SEQ ID NO: 11140 - DNA, 192 bp, unidentified
  source 1..192: mol_type = other DNA
  misc_feature 1..192: note = Synthetic
atgtacgacacaagcagtcagaggacgcaggaaacccagcctccgatcacccacctgaccccaccccacactccaccacacattagtcatcaaacaaaacttaggacgaaaggtcaatcaccatgtccgcacaaagggaaaggatcaatgccttctacaaagacaatcctcacaataagaaccatagggtga

SEQ ID NO: 11141 - DNA, 81 bp, unidentified; identical to SEQ ID NO: 1943
  misc_feature 1..81: note = Synthetic
  source 1..81: mol_type = other DNA

SEQ ID NO: 11142 - DNA, 48 bp, unidentified; identical to SEQ ID NO: 1944
  misc_feature 1..48: note = Synthetic
  source 1..48: mol_type = other DNA

SEQ ID NO: 11143 - DNA, 36 bp, unidentified; identical to SEQ ID NO: 1946
  misc_feature 1..36: note = Synthetic
  source 1..36: mol_type = other DNA

SEQ ID NO: 11144 - DNA, 36 bp, unidentified; identical to SEQ ID NO: 1946
  source 1..36: mol_type = other DNA
  misc_feature 1..36: note = Synthetic

SEQ ID NO: 11145 - DNA, 24 bp, unidentified
  source 1..24: mol_type = other DNA
  misc_feature 1..24: note = Synthetic
atgggctggcgcgcggccaggtag

SEQ ID NO: 11146 - DNA, 564 bp, unidentified
  misc_feature 1..564: note = Synthetic
  source 1..564: mol_type = other DNA
atggagatttggacgatcttggaagatcttcacaagactagacagctgctagagaacgcctcgaacggagtctctcacctgtggagattctgcttcggtggcgacctagctaagctagtctatagggccaaacaggattatagcgaacaatttgaggttattttgagagagtgtccgggtctttttgacgctcttaatttgggtcatcagactcactttaaccagaggattgtaagagcccttgattttactactcccggcagatccactgcggcagtagccttttttgcttttcttcttgacaaatggagtcaagaaacccatttcagcagggattaccagctggatttcttagcagtagctttgtggagaacatggaaatcccagcgcctgaatgcaatctcaggctacttgccggtacagccactagacactctgaagatcctgaatctccaggagagtcccagggcacgccaacgtcgccggcagcagcagcggcagcaggaggaggatcaagaagagaacccgagagccggcctggaccctccggcggaggaggagtag

SEQ ID NO: 11147 - DNA, 24 bp, unidentified
  source 1..24: mol_type = other DNA
  misc_feature 1..24: note = Synthetic
acgtctgccatttgtatcatataa

SEQ ID NO: 11148 - DNA, 546 bp, unidentified
  source 1..546: mol_type = other DNA
  misc_feature 1..546: note = Synthetic
atgggcgataagagcgagtggtacgccaggctcctgttgcggtgcacgcgcgcggggccgccgctggccatgccctcaggcatgacgcggctcacggaccacgtgtacttgggcagcgctgaggacgcgcgcgccgtgctgcggggggactccggcgtcgacttcaagtgcctggttaacatgaccatgtccaagtactcgacgcccgcggggataacggcgtaccacattccgctgagagacgacgataagacgaacatcacttccatcatgcccgcgctcgtgaagctgctggcgcgcctcgaggccgagaagaagcccacgctcgtgcactgcgtggccggcgtcaaccgcagcggcgccgccgccatggggtacgtgatgcacaagcggcttgcggagaacccgactatgacgcagcccgcgcgcttcgtgtacttcctcaaaacatactacgagatccgggacctccgcggcgccttcctggaaaacaccaacttccgctaccagctcataaaaatgttcgtctgcgactcgccgtcctaa

SEQ ID NO: 11149 - DNA, 252 bp, unidentified
  misc_feature 1..252: note = Synthetic
  source 1..252: mol_type = other DNA
atgtggcgcatcccattctccagcaacttcatgtctatgggcgcccttaccgacctgggtcaaaacatgctttacgccaactcggcgcacgcgctcgacatgacctttgaggtggaccccatggatgagcccaccctcctctatcttctctttgaagttttcgacgtggtcagagtgcaccagccgcaccgcggcgtcatcgaggccgtctacctgcgcacgcccttctccgccggcaacgccaccacctaa

SEQ ID NO: 11150 - DNA, 252 bp, unidentified
  misc_feature 1..252: note = Synthetic
  source 1..252: mol_type = other DNA
atgtggcgcatccccttctccagcaacttcatgtccatgggcgccctcaccgacctgggtcagaacatgctctatgccaactcggcccacgcgctcgacatgaccttcgaggtggaccccatggatgagcccaccctcctctatcttctcttcgaagttttcgacgtggtcagagtgcaccagccgcaccgcggcgtcatcgaggccgtctacctgcgcacgcccttctccgccggcaacgccaccacctaa

SEQ ID NO: 11151 - DNA, 201 bp, unidentified
  source 1..201: mol_type = other DNA
  misc_feature 1..201: note = Synthetic
attttttctgaaatgtgcgatctggccatgttcatgagcaaacagtattctctatggcctcctagcaaggacaacatcgtaacgttctccattgcttattgcttgtgcgcttgccttcttactgctttactgtgcgtatgcatacacctgcttgtaaccactcgcatcaaaaacgccaataacaaagaaaaaatgccttaa

SEQ ID NO: 11152 - DNA, 15 bp, unidentified
  source 1..15: mol_type = other DNA
  misc_feature 1..15: note = Synthetic
atgctacccttctaa

SEQ ID NO: 11153 - DNA, 15 bp, unidentified
  source 1..15: mol_type = other DNA
  misc_feature 1..15: note = Synthetic
atgctacccttctaa

SEQ ID NO: 11154 - DNA, 15 bp, unidentified
  source 1..15: mol_type = other DNA
  misc_feature 1..15: note = Synthetic
atgctacccttctaa

SEQ ID NO: 11155 - DNA, 1083 bp, unidentified
  misc_feature 1..1083: note = Synthetic
  source 1..1083: mol_type = other DNA
ctgccacatatagctcgtccacacgccgtctcgtcacacggcaacatgtgttccgtgctggcgatcgcgctcgtagttgcgctcttgggcgacatgcacccgggagtgaaaagtagcaccacaagcgccgtcacttcccctagtaataccaccgtcacgtctactacgtcaataagtacctctaacaacgtcagttctgctgtcaccaccacggtacaaacctctacctcgtccgcctccacctccgtgatagccacgacgcagaaagaggggcacctgtatactgtgaattgcgaagccagctacagctacgaccaagtgtctctaaacgccacctgcaaagttatcctgttgaataataccaaaaatccagacattttatcagttacttgttatgcacggacagactgcaagggtcccttcactcaggtgggatatcttagcgcttttccctccaacgataaaggaaaactacatctctcctacaacgctactgctcaagagctgcttatctcgggactcaggccgcaggagaccactgagtacacgtgctctttcttcagctggggccgccatcacaacgccacttgggaccttttcacctatcccatttacgccgtgtacgggactcgcttgaacgctaccactatgcgggtccgcgtgctgcttcaggaacacgaacactgcttgctcaacggtagcagcctctatcaccccaacagcaccgtgcatctgcatcagggcgaccagctcattccgccgtggaatattagtaacgtgacgtataacggacaacggttacgcgagtttgtcttctacctcaacggcacgtatactgtcgtgcgtctccacgtccagatcgcgggccgaagttttaccaccacctacgtgtttatcaagagcgacccgctgttcgaggaccggctgctggcctacggcgtgctggctttcctggtgttcatggtaattattcttttgtacgtgacctacatgctggcgcgccggcgggactggtcctataagagactggaggagcccgttgaagaaaagaaacacccggtgccctacttcaagcagtggtag

SEQ ID NO: 11156 - DNA, 21 bp, unidentified
  source 1..21: mol_type = other DNA
  misc_feature 1..21: note = Synthetic
atgactaaacaattagggtaa

SEQ ID NO: 11157 - DNA, 57 bp, unidentified; identical to SEQ ID NO: 1961
  misc_feature 1..57: note = Synthetic
  source 1..57: mol_type = other DNA

SEQ ID NO: 11158 - DNA, 1380 bp, unidentified
  misc_feature 1..1380: note = Synthetic
  source 1..1380: mol_type = other DNA
atcacaatggctggtgtcttttcccagtatgagaggtttgtggacaatcaatctcaggtgtcaaggaaggatcatcggtccttagcaggagggtgccttaaagtgaacatccctatgcttgtcactgcatccgaagaccccaccacgcgttggcaactagcatgcttatctctgaggctcttgatttccaattcatcaaccagtgctatccgccagggagcaatactgaccctcatgtcattgccatcgcaaaacatgagagcaacagcagctattgctgggtccacgaatgcggctgttatcaacactatggaagtcttaagtgtcaatgactggaccccatcttttgacccaagaagtggtctatctgaggaggacgctcaggtgttcagagacatggcaagagatctgcctcctcagttcacttctggatcaccctttacatcagcattggcggaggggtttactcccgaggacactcatgacctgatggaggcactgactagtgtactgatacagatctggattctggtggccaaggccatgaccaatattgatggatctggggaggctaacgaaagacgccttgcaaaatacatccaaaagggacagctcaatcgtcagtttgcaattggcaatcctgcccgtctgataatccaacagacaatcaaaagctcattaactgtccgcaggttcttggtctctgagctccgcgcatcacgtggtgcagtaaaggagggttccccttactatgcagccgttggggatatccacgcttacatcttcaatgcaggattgacaccattcttgaccaccctgagatatggcattggcaccaagtacgccgctgtcgcactcagtgtgtttgctgcagacattgcaaaattgaagagtctactcaccctgtatcaagacaaaggtgtagaagctggatacatggcactccttgaagatccagattccatgcactttgcacctggaaacttcccacacatgtattcctatgcgatgggagtggcctcctatcacgaccctagcatgcgccaataccagtatgccaggaggtttctcagtcgtcccttctacctgctaggaagagacatggctgctaagaacacaggaactctggatgagcagctggcgaaagaactgcaagtgtcagagagggaccgcgctgcactgtctgccgcgattcaatcagcaatggaggggggagagtcagatgacttcccattgtcaggatccatgccggccctctctgagagcacacaaccggtcacccccaggactcaacagtcccagctctctcctcctcaatcatcaaacatgtcccaatcggcgcctaggaccccggactatcaacccgactttgagctgtag

SEQ ID NO: 11159 - DNA, 45 bp, unidentified; identical to SEQ ID NO: 1964
  source 1..45: mol_type = other DNA
  misc_feature 1..45: note = Synthetic

SEQ ID NO: 11160 - DNA, 45 bp, unidentified; identical to SEQ ID NO: 1964
  misc_feature 1..45: note = Synthetic
  source 1..45: mol_type = other DNA

SEQ ID NO: 11161 - DNA, 12 bp, unidentified
  source 1..12: mol_type = other DNA
  misc_feature 1..12: note = Synthetic
atgtttggctag

SEQ ID NO: 11162 - DNA, 12 bp, unidentified
  misc_feature 1..12: note = Synthetic
  source 1..12: mol_type = other DNA
atgtttggctag

SEQ ID NO: 11163 - DNA, 429 bp, unidentified
  misc_feature 1..429: note = Synthetic
  source 1..429: mol_type = other DNA
atgagaccacaagtggcggtttgggctttgcgcttattggccaccggcctagctatgatctccttagtgttctgcctgaaccaggtaattatgcaggtgctaattagggacattggggacttgttgacatcctcagaaataaagactacacgtgagacactgcgtgagcatctctcatctattactcttttcatgtcgtttgcgctgacttgctcaataagtgggtgcgttcttagcctggttgcattatatccaagcaagaacattaatggcactaacactcagccacaagtagaggaggccagatcggagaacctgtctcactcttccatgcacacaatcaataggccagcgacccctcccccaccgtattatgtagcaatacaactcagcgctgagatgcaacctgggtaccatccaggtgattga

SEQ ID NO: 11164 - DNA, 60 bp, unidentified; identical to SEQ ID NO: 1968
  misc_feature 1..60: note = Synthetic
  source 1..60: mol_type = other DNA

SEQ ID NO: 11165 - DNA, 60 bp, unidentified; identical to SEQ ID NO: 1969
  misc_feature 1..60: note = Synthetic
  source 1..60: mol_type = other DNA

SEQ ID NO: 11166 - DNA, 84 bp, unidentified
  source 1..84: mol_type = other DNA
  misc_feature 1..84: note = Synthetic
atggacatagtaatacatattattcaaaatatgatttttaaaaatttaaaatatattatcacttcagtgacagtagtcaaataa

SEQ ID NO: 11167 - DNA, 270 bp, unidentified
  misc_feature 1..270: note = Synthetic
  source 1..270: mol_type = other DNA
acggactcgacaagggagagccggtcaacgaggcagacgccgcggccctcgagcacgacaaagcctacgaccggcagctcgacagcggagacaacccgtacctcaagtacaaccacgccgacgcggagtttcaggagcgccttaaagaagatacgtcttttgggggcaacctcggacgagcagtcttccaggcgaaaaagagggttcttgaacctctgggcctggttgaggaacctgttaagacggctccgggaaaaaagaggccggtag

SEQ ID NO: 11168 - DNA, 90 bp, unidentified
  source 1..90: mol_type = other DNA
  misc_feature 1..90: note = Synthetic
acgaagaacgaaaaaaatatctacctctccaaaaagaaaaaactactgatgttatcaaacctgattatcttgagtacgatgacttgttag

SEQ ID NO: 11169 - DNA, 36 bp, unidentified; identical to SEQ ID NO: 1973
  misc_feature 1..36: note = Synthetic
  source 1..36: mol_type = other DNA

SEQ ID NO: 11170 - DNA, 252 bp, unidentified
  misc_feature 1..252: note = Synthetic
  source 1..252: mol_type = other DNA
atggaccgcgacgacgtctggttcgcggcgtactcggtcgagctcgacccgccgcggcgctgcacgcggtgctcgctgaacctcacgcgcttcatcaacgaggaccccgagaacgcgcgcatgctgctgctctcgcagccagggcgcgcgcgcgcgctcgcgggcttcctccagttctgtagaacccgcacgctggacactaaagtgctggaccgcgagatcctgcgcgtgctggggctggggcagccatga

SEQ ID NO: 11171 - DNA, 24 bp, unidentified
  misc_feature 1..24: note = Synthetic
  source 1..24: mol_type = other DNA
ctgcgctcgccgtcgatgctatag

SEQ ID NO: 11172 - DNA, 33 bp, unidentified; identical to SEQ ID NO: 1979
  source 1..33: mol_type = other DNA
  misc_feature 1..33: note = Synthetic

SEQ ID NO: 11173 - DNA, 681 bp, unidentified
  misc_feature 1..681: note = Synthetic
  source 1..681: mol_type = other DNA
atggctctaggtttgtttactctgcaaatcgagtctgctgttaatcaatcgctaagcaagtcgaaagttagtgccgtagtttcgcgccaggttatccaggatgttagagctgccgctgtcactttcaacttgctagcttatacactaatgagcctctttgttgtttactttgcttttttcaaagcaagatctaatcgaggaagagtagctcttatagtgtttaaaattctaatcctcttcgtttatgtaccattgctgtattggtctcaagcttacattgatgcgacgttgatcgctgtaattttgcttggaaggtttttccatacagcttggtactgttggctgtacaaaacatgggatttcatagtcttcaatgtaaccacactttgctatgtgcaaggcaaatgttggtttcttgaaaataaggctttgaaaccatttgtgtgcttctacggaggggaccaatttctttacataggtgacagagttgtttcctatgtctcaactaacgatttatacgttgctcttagaggacgtattgacagagatcttagcctttctagaaaggttgatctttataacggtgaatgtgtatactttttttgtgaacacccagctgtcggaatagttaatacagattttaaattggaatttgaagatgtttctgaagctagtggatga

SEQ ID NO: 11174 - DNA, 36 bp, unidentified; identical to SEQ ID NO: 1982
  misc_feature 1..36: note = Synthetic
  source 1..36: mol_type = other DNA

SEQ ID NO: 11175 - DNA, 2046 bp, unidentified
  source 1..2046: mol_type = other DNA
  misc_feature 1..2046: note = Synthetic
atgaagaccatatattttctgattagtctcattttaatccaaagtataaaaactctccctgttttagaaattgctagtaacagccaacctcaagatgtagattcagtgtgctccggaaccctccaaaagacagaagatgttcatctgatgggatttacactgagtgggcaaaaagttgctgattcccctttggaagcatctaaacgatgggctttcaggacaggtgttcctcccaagaacgttgagtatacggaaggagaagaagccaaaacatgttacaatataagtgtaacagacccttctggaaaatccttgctgctggatcctcccagtaatatccgcgattaccctaaatgtaaaactgttcatcatattcaaggtcaaaaccctcatgcacaggggattgccctccatttgtggggggcatttttcttgtatgatcgcgttgcctctacaacaatgtaccgaggcaaggtcttcactgaaggaaatatagcagctatgattgttaataagacagttcacagaatgattttttctaggcaaggacaaggttatcgtcacatgaacttgacctccaccaataaatattggacaagcagcaatgaaacgcagagaaatgatacgggatgttttggcatcctccaagaatacaactccacaaacaatcaaacatgccctccatctcttaaacctccatccctgcccacagtaactccgagcattcactctacaaatactcaaattaatactgctaaatctggaactatgaacccaagtagcgacgatgaggaccttatgatttccggctcaggatctggagaacaggggccccacacaactcttaatgtagtcactgaacagaaacaatcgtcaacaatattgtccactccttcactacatccaagcacctcacaacatgagcaaaacagtacgaatccttcccgacatgctgtaactgagcacaatggaaccgacccaacaacacaaccagcaacgctcctcaacaatactaatacaactcccacctataacactctcaagtacaacctcagtactccttcccctccaacccgcaacatcaccaataatgatacacaacgtgaactagcagaaagcgaacaaaccaatgctcagttgaacacaactctagatccaacagaaaatcccaccacaggacaagacaccaacagcacaaccaacatcatcatgacgacatcagatataacaagcaaacaccccacaaattcttctccggattctagtccgacaacccgccctcctatatactttagaaagaaacgaagcattttctggaaagaaggtgatatattcccgtttttagatgggttaataaatactgaaattgattttgatccaatcccaaacacagaaacaatctttgatgaatctcccagctttaatacttcaactaatgaggaacaacacactcccccgaatatcagtttaactttctcttattttcctgataaaaatggagatactgcctactctggggaaaacgagaatgattgtgatgcagagttgaggatttggagtgtgcaggaggacgatttggcggcagggcttagctggataccattttttggccctggaatcgaaggactctatactgccggtttaatcaaaaatcagaacaatttagtttgtaggttgaggcgcttagctaatcaaactgctaaatccttggagctcttgttaagggtcacaaccgaggaaaggacattttccttaatcaataggcatgcaattgactttttgcttacgaggtggggcggaacatgcaaggtgctaggacctgattgttgcataggaatagaagatctatctaaaaatatctcagaacaaatcgacaaaatcagaaaggatgaacaaaaggaggaaactggctggggtctaggtggcaaatggtggacatctgactggggtgttctcaccaatttgggcatcctgctactattatctatagctgttctgattgctctgtcctgtatctgtcgtatcttcactaaatacattggatga

SEQ ID NO: 11176 - DNA, 10236 bp, unidentified
  misc_feature 1..10236: note = Synthetic
  source 1..10236: mol_type = other DNA
atgtctggtcgtaaagctcagggaaaaaccctgggcgtcaatatggtacgacgaggagttcgctccttgtcaaacaaaataaaacaaaaaacaaaacaaattggaaacagacctggaccttcaagaggtgttcaaggatttatctttttctttttgttcaacattttgactggaaaaaagatcacagcccacctaaagaggttgtggaaaatgctggacccaagacaaggcttggctgttctaaggaaagtcaagagagtggtggccagtttgatgagaggattgtcctcaaggaaacgccgttcccatgatgttctgactgtgcaattcctaattttgggaatgctgttgatgacgggtggagtgaccttggtgcggaaaaacagatggttgctcctaaatgtgacatctgaggacctcgggaaaacattctctgtgggcacaggcaactgcacaacaaacattttggaagccaagtactggtgcccagactcaatggaatacaactgtcccaatctcagtccaagagaggagccagatgacattgattgctggtgctatggggtggaaaacgttagagtcgcatatggtaagtgtgactcagcaggcaggtctaggaggtcaagaagggccattgacttgcctacgcatgaaaaccatggtttgaagacccggcaagaaaaatggatgactggaagaatgggtgaaaggcaactccaaaagattgagagatggttcgtgaggaaccccttttttgcagtgacggctctgaccattgcctaccttgtgggaagcaacatgacgcaacgagtcgtgattgccctactggtcttggctgttggtccggcctactcagctcactgcattggaattactgacagggatttcattgagggggtgcatggaggaacttgggtttcagctaccctggagcaagacaagtgtgtcactgttatggcccctgacaagccttcattggacatctcactagagacagtagccattgatagacctgctgaggtgaggaaagtgtgttacaatgcagttctcactcatgtgaagattaatgacaagtgccccagcactggagaggcccacctagctgaagagaacgaaggggacaatgcgtgcaagcgcacttattctgatagaggctggggcaatggctgtggcctatttgggaaagggagcattgtggcatgcgccaaattcacttgtgccaaatccatgagtttgtttgaggttgatcagaccaaaattcagtatgtcatcagagcacaattgcatgtaggggccaagcaggaaaattggaataccgacattaagactctcaagtttgatgccctgtcaggctcccaggaagtcgagttcattgggtatggaaaagctacactggaatgccaggtgcaaactgcggtggactttggtaacagttacatcgctgagatggaaacagagagctggatagtggacagacagtgggcccaggacttgaccctgccatggcagagtggaagtggcggggtgtggagagagatgcatcatcttgtcgaatttgaacctccgcatgccgccactatcagagtactggccctgggaaaccaggaaggctccttgaaaacagctcttactggcgcaatgagggttacaaaggacacaaatgacaacaacctttacaaactacatggtggacatgtttcttgcagagtgaaattgtcagctttgacactcaaggggacatcctacaaaatatgcactgacaaaatgttttttgtcaagaacccaactgacactggccatggcactgttgtgatgcaggtgaaagtgtcaaaaggagccccctgcaggattccagtgatagtagctgatgatcttacagcggcaatcaataaaggcattttggttacagttaaccccatcgcctcaaccaatgatgatgaagtgctgattgaggtgaacccaccttttggagacagctacattatcgttgggagaggagattcacgtctcacttaccagtggcacaaagagggaagctcaataggaaagttgttcactcagaccatgaaaggcgtggaacgcctggccgtcatgggagacaccgcctgggatttcagctccgctggagggttcttcacttcggttgggaaaggaattcatacggtgtttggctctgcctttcaggggctatttggcggcttgaactggataacaaaggtcatcatgggggcggtacttatatgggttggcatcaacacaagaaacatgacaatgtccatgagcatgatcttggtaggagtgatcatgatgtttttgtctctaggagttggggcggatcaaggatgcgccatcaactttggcaagagagagctcaagtgcggagatggtatcttcatatttagagactctgatgactggctgaacaagtactcatactatccagaagatcctgtgaagcttgcatcaatagtgaaagcctcttttgaagaagggaagtgtggcctaaattcagttgactcccttgagcatgagatgtggagaagcagggcagatgagatcaatgccatttttgaggaaaacgaggtggacatttctgttgtcgtgcaggatccaaagaatgtttaccagagaggaactcatccattttccagaattcgggatggtctgcagtatggttggaagacttggggtaagaaccttgtgttctccccagggaggaagaatggaagcttcatcatagatggaaagtccaggaaagaatgcccgttttcaaaccgggtctggaattctttccagatagaggagtttgggacgggagtgttcaccacacgcgtgtacatggacgcagtctttgaatacaccatagactgcgatggatctatcttgggtgcagcggtgaacggaaaaaagagtgcccatggctctccaacattttggatgggaagtcatgaagtaaatgggacatggatgatccacaccttggaggcattagattacaaggagtgtgagtggccactgacacatacgattggaacatcagttgaagagagtgaaatgttcatgccgagatcaatcggaggcccagttagctctcacaatcatatccctggatacaaggttcagacgaacggaccttggatgcaggtaccactagaagtgaagagagaagcttgcccagggactagcgtgatcattgatggcaactgtgatggacggggaaaatcaaccagatccaccacggatagcgggaaagttattcctgaatggtgttgccgctcctgcacaatgccgcctgtgagcttccatggtagtgatgggtgttggtatcccatggaaattaggccaaggaaaacgcatgaaagccatctggtgcgctcctgggttacagctggagaaatacatgctgtcccttttggtttggtgagcatgatgatagcaatggaagtggtcctaaggaaaagacagggaccaaagcaaatgttggttggaggagtagtgctcttgggagcaatgctggtcgggcaagtaactctccttgatttgctgaaactcacagtggctgtgggattgcatttccatgagatgaacaatggaggagacgccatgtatatggcgttgattgctgccttttcaatcagaccagggctgctcatcggctttgggctcaggaccctatggagccctcgggaacgccttgtgctgaccctaggagcagccatggtggagattgccttgggtggcgtgatgggcggcctgtggaagtatctaaatgcagtttctctctgcatcctgacaataaatgctgttgcttctaggaaagcatcaaataccatcttgcccctcatggctctgttgacacctgtcactatggctgaggtgagacttgccgcaatgttcttttgtgccgtggttatcataggggtccttcaccagaatttcaaggacacctccatgcagaagactatacctctggtggccctcacactcacatcttacctgggcttgacacaaccttttttgggcctgtgtgcatttctggcaacccgcatatttgggcgaaggagtatcccagtgaatgaggcactcgcagcagctggtctagtgggagtgctggcaggactggcttttcaggagatggagaacttccttggtccgattgcagttggaggactcctgatgatgctggttagcgtggctgggagggtggatgggctagagctcaagaagcttggtgaagtttcatgggaagaggaggcggagatcagcgggagttccgcccgctatgatgtggcactcagtgaacaaggggagttcaagctgctttctgaagagaaagtgccatgggaccaggttgtgatgacctcgctggccttggttggggctgccctccatccatttgctcttctgctggtccttgctgggtggctgtttcatgtcaggggagctaggagaagtggggatgtcttgtgggatattcccactcctaagatcatcgaggaatgtgaacatctggaggatgggatttatggcatattccagtcaaccttcttgggggcctcccagcgaggagtgggagtggcacagggaggggtgttccacacaatgtggcatgtcacaagaggagctttccttgtcaggaatggcaagaagttgattccatcttgggcttcagtaaaggaagaccttgtcgcctatggtggctcatggaagttggaaggcagatgggatggagaggaagaggtccagttgatcgcggctgttccaggaaagaacgtggtcaacgtccagacaaaaccgagcttgttcaaagtgaggaatgggggagaaatcggggctgtcgctcttgactatccgagtggcacttcaggatctcctattgttaacaggaacggagaggtgattgggctgtacggcaatggcatccttgtcggtgacaactccttcgtgtccgccatatcccagactgaggtgaaggaagaaggaaaggaggagctccaagagatcccgacaatgctaaagaaaggaatgacaactgtccttgattttcatcctggagctgggaagacaagacgtttcctcccacagatcttggccgagtgcgcacggagacgcttgcgcactcttgtgttggcccccaccagggttgttctttctgaaatgaaggaggcttttcacggcctggacgtgaaattccacacacaggctttttccgctcacggcagcgggagagaagtcattgatgccatgtgccatgccaccctaacttacaggatgttggaaccaactagggttgttaactgggaagtgatcattatggatgaagcccattttttggatccagctagcatagccgctagaggttgggcagcgcacagagctagggcaaatgaaagtgcaacaatcttgatgacagccacaccgcctgggactagtgatgaatttccacattcaaatggtgaaatagaagatgttcaaacggacatacccagtgagccctggaacacagggcatgactggatcctagctgacaaaaggcccacggcatggttccttccatccatcagagctgcaaatgtcatggctgcctctttgcgtaaggctggaaagagtgtggtggtcctgaacaggaaaacctttgagagagaataccccacgataaagcagaagaaacctgactttatattggccactgacatagctgaaatgggagccaacctttgcgtggagcgagtgctggattgcaggacggcttttaagcctgtgcttgtggatgaagggaggaaggtggcaataaaagggccacttcgtatctccgcatcctctgctgctcaaaggagggggcgcattgggagaaatcccaacagagatggagactcatactactattctgagcctacaagtgaaaataatgcccaccacgtctgctggttggaggcctcaatgctcttggacaacatggaggtgaggggtggaatggtcgccccactctatggcgttgaaggaactaaaacaccagtttcccctggtgaaatgagactgagggatgaccagaggaaagtcttcagagaactagtgaggaattgtgacctgcccgtttggctttcgtggcaagtggccaaggctggtttgaagacgaatgatcgtaagtggtgttttgaaggccctgaggaacatgagatcttgaatgacagcggtgaaacagtgaagtgcagggctcctggaggagcaaagaagcctctgcgcccaaggtggtgtgatgaaagggtgtcatctgaccagagtgcgctgtctgaatttattaagtttgctgaaggtaggaggggagctgctgaagtgctagttgtgctgagtgaactccctgatttcctggctaaaaaaggtggagaggcaatggataccatcagtgtgttcctccactctgaggaaggctctagggcttaccgcaatgcactatcaatgatgcctgaggcaatgacaatagtcatgctgtttatactggctggactactgacatcgggaatggtcatctttttcatgtctcccaaaggcatcagtagaatgtctatggcgatgggcacaatggccggctgtggatatctcatgttccttggaggcgtcaaacccactcacatctcctatgtcatgctcatattctttgtcctgatggtggttgtgatccccgagccagggcaacaaaggtccatccaagacaaccaagtggcatacctcattattggcatcctgacgctggtttcagcggtggcagccaacgagctaggcatgctggagaaaaccaaagaggacctctttgggaagaagaacttaattccatctagtgcttcaccctggagttggccggatcttgacctgaagccaggagctgcctggacagtgtacgttggcattgttacaatgctctctccaatgttgcaccactggatcaaagtcgaatatggcaacctgtctctgtctggaatagcccagtcagcctcagtcctttctttcatggacaaggggataccattcatgaagatgaatatctcggtcataatgctgctggtcagtggctggaattcaataacagtgatgcctctgctctgtggcatagggtgcgccatgctccactggtctctcattttacctggaatcaaagcgcagcagtcaaagcttgcacagagaagggtgttccatggcgttgccgagaaccctgtggttgatgggaatccaacagttgacattgaggaagctcctgaaatgcctgccctttatgagaagaaactggctctatatctccttcttgctctcagcctagcttctgttgccatgtgcagaacgcccttttcattggctgaaggcattgtcctagcatcagctgccttagggccgctcatagagggaaacaccagccttctttggaatggacccatggctgtctccatgacaggagtcatgagggggaatcactatgcttttgtgggagtcatgtacaatctatggaagatgaaaactggacgccgggggagcgcgaatggaaaaactttgggtgaagtctggaagagggaactgaatctgttggacaagcgacagtttgagttgtataaaaggaccgacattgtggaggtggatcgtgatacggcacgcaggcatttggccgaagggaaggtggacaccggggtggcggtctccagggggaccgcaaagttaaggtggttccatgagcgtggctatgtcaagctggaaggtagggtgattgacctggggtgtggccgcggaggctggtgttactacgctgctgcgcaaaaggaagtgagtggggtcaaaggatttactcttggaagagacggccatgagaaacccatgaatgtgcaaagtctgggatggaacatcatcaccttcaaggacaaaactgatatccaccgcctagaaccagtgaaatgtgacacccttttgtgtgacattggagagtcatcatcgtcatcggtcacagagggggaaaggaccgtgagagttcttgatactgtagaaaaatggctggcttgtggggttgacaacttctgtgtgaaggtgttagctccatacatgccagatgttctcgagaaactggaattgctccaaaggaggtttggcggaacagtgatcaggaaccctctctccaggaattccactcatgaaatgtactacgtgtctggagcccgcagcaatgtcacatttactgtgaaccaaacatcccgcctcctgatgaggagaatgaggcgtccaactggaaaagtgaccctggaggctgacgtcatcctcccaattgggacacgcagtgttgagacagacaagggacccctggacaaagaggccatagaagaaagggttgagaggataaaatctgagtacatgacctcttggttttatgacaatgacaacccctacaggacctggcactactgtggctcctatgtcacaaaaacctcaggaagtgcggcgagcatggtaaatggtgttattaaaattctgacatatccatgggacaggatagaggaggtcacaagaatggcaatgactgacacaaccccttttggacagcaaagagtgtttaaagaaaaagttgacaccagagcaaaggatccaccagcgggaactaggaagatcatgaaagttgtcaacaggtggctgttccgccacctggccagagaaaagaaccccagactgtgcacaaaggaagaatttattgcaaaagtccgaagtcatgcagccattggagcttacctggaagaacaagaacagtggaagactgccaatgaggctgtccaagacccaaagttctgggaactggtggatgaagaaaggaagctgcaccaacaaggcaggtgtcggacttgtgtgtacaacatgatggggaaaagagagaagaagctgtcagagtttgggaaagcaaagggaagccgtgccatatggtatatgtggctgggagcgcggtatcttgagtttgaggccctgggattcctgaatgaggaccattgggcttccagggaaaactcaggaggaggagtggaaggcattggcttacaatacctaggatatgtgatcagagacctggctgcaatggatggtggtggattctacgcggatgacaccgctggatgggacacgcgcatcacagaggcagaccttgatgatgaacaggagatcttgaactacatgagcccacatcacaaaaaactggcacaagcagtgatggaaatgacatacaagaacaaagtggtgaaagtgttgagaccagccccaggagggaaagcctacatggatgtcataagtcgacgagaccagagaggatccgggcaggtagtgacttatgctctgaacaccatcaccaacttgaaagtccaattgatcagaatggcagaagcagagatggtgatacatcaccaacatgttcaagattgtgatgaatcagttctgaccaggctggaggcatggctcactgagcacggatgtgacagactgaagaggatggcggtgagtggagacgactgtgtggtccggcccatcgatgacaggttcggcctggccctgtcccatctcaacgccatgtccaaggttagaaaggacatatctgaatggcagccatcaaaagggtggaatgattgggagaatgtgcccttctgttcccaccacttccatgaactacagctgaaggatggcaggaggattgtggtgccttgccgagaacaggacgagctcattgggagaggaagggtgtctccaggaaacggctggatgatcaaggaaacagcttgcctcagcaaagcctatgccaacatgtggtcactgatgtattttcacaaaagggacatgaggctactgtcattggctgtttcctcagctgttcccacctcatgggttccacaaggacgcacaacatggtcgattcatgggaaaggggagtggatgaccacggaagacatgcttgaggtgtggaacagagtatggataaccaacaacccacacatgcaggacaagacaatggtgaaaaaatggagagatgtcccttatctaaccaagagacaagacaagctgtgcggatcactgattggaatgaccaatagggccacctgggcctcccacatccatttagtcatccatcgtatccgaacgctgattggacaggagaaatacactgactacctaacagtcatggacaggtattctgtggatgctgacctgcaactgggtgagcttatctga

SEQ ID NO: 11177 - DNA, 42 bp, unidentified; identical to SEQ ID NO: 1987
  misc_feature 1..42: note = Synthetic
  source 1..42: mol_type = other DNA

SEQ ID NO: 11178 - DNA, 15 bp, unidentified
  misc_feature 1..15: note = Synthetic
  source 1..15: mol_type = other DNA
ctgctgttttcataa

SEQ ID NO: 11179 - DNA, 33 bp, unidentified; identical to SEQ ID NO: 1989
  misc_feature 1..33: note = Synthetic
  source 1..33: mol_type = other DNA

SEQ ID NO: 11180 - DNA, 423 bp, unidentified
  misc_feature 1..423: note = Synthetic
  source 1..423: mol_type = other DNA
atgacattgacagaaacggcagggggctccggacaatccctgcccgcatgcaggaaagacgcagaaaagaagagcaagagagcgaaaagccagggtgacggcggccgagaaagactttccttcatgttgttgccacgagtgcgtatgttcacgctcttacgccttgcccgacttctttttgtgttttgtgcgttgcctggcaaacgcgatttgggtgcgtgtgtccgagcaagccacggacatgtttgggttgtacttgcgttccgggatcacatgttgtcacatcgagactggtgcgtgtgtaagccgcgctcgcatgcacgcgtgtcgtcgactttgtctggtgtgcacttgcgaagaagacgcgagcacacggctcgtgtcacaacaacaagaagatgctcgagtacggttctcatataa

SEQ ID NO: 11181 - DNA, 30 bp, unidentified; identical to SEQ ID NO: 1997
  source 1..30: mol_type = other DNA
  misc_feature 1..30: note = Synthetic

SEQ ID NO: 11182 - DNA, 561 bp, unidentified
  source 1..561: mol_type = other DNA
  misc_feature 1..561: note = Synthetic
atgacaccagaaaacgacgaagagcaaacatctgtgttctccgctactgtttacggagacaaaattcagggaaagaataaacgcaaacgcgtgattggtctatgtattagaatatctatggttatttcactactatctatgattaccatgtccgcgtttctcatagtgcgactaaatcaatgcatgtctgctaacgaggctgctattaccgacgctgctgttgccgttgctgctgcatcatcatctaccaatagaaaggttgctgcttctagcactacacaatatgatcacaaagaaagctgtaatggtttatattaccagggttcttgttatatattccattcagactacaagtcattctcggatgctaaagcaaactgcactgcggaatcatcaacactacccaataaatccgatgtcttgactacctggctcattgaatatgttgaggatacatggggatctgatggtaatccaattacaaaaactacatccgattatcaagattctgatgtatcacaagaagttagaaagtatttttgtgttaaaacaatgaactaa

SEQ ID NO: 11183 - DNA, 4212 bp, unidentified
  source 1..4212: mol_type = other DNA
  misc_feature 1..4212: note = Synthetic
atgaaaacaatccttcgtatcgcctcaattttagcacaatgtgctatcatgatatgcttaccattgaagaactccataggtgggaggtgcttcacaggtggtgagccatttaaaaccattaatgcaacatcagcaccgagtgaggtctgcctcagagatgatatatcgatggttaaatctatcggaatacactcacgtggggatgactcagatatgatcacatctagcgtcacgttctatagactgtattatgttaaagattggcacgattgcaacccaatctcagaccacatgggtactttccttgttctaaatattgaggatagtggttctattaaagcagaaaactatgcatgccgaacaagatgtgacatttctttaaacagggaccgtggaactatagaattaacctctactaatctcaaccattattctattactgggacaactattgcatctgggtggttcaaactgaaattagaggtgcaattgctttcgacatgtgaaagcatcagtgtaacctgcggtcaaaaaacattggaattcaaggcatgtttcagacaacatcgtaagtgtatcaattatttccatggctctatactacccgagataatgattgaaggaatatgtgcaaacctggaagtgataatattggtcttctttatatgcttaaatacaatactagctataataattaccaatacatatgtgatatatgctttaatcccactaatatacccattttataaattatatggaataatatacaataagtgcttgaaaaagtgcaaaaattgtaagcttgctatacacccttttactatttgccctacaaaatgtatttgcggtatggtttataatagtacagaagctctgtatctacatagacaatgcaataattgtacagggtataaagcactaacccatgcacgtattgcatgcaaaaaaaagattcccaatgcaatcatggcaatatttactaccattttaatatttagctttttaacacctgtttctgctgaatgttacaatctcagcgagttaccacaggattatatcaatatggtcaattacatcggaatgcgatcgttgcttggatatgtcgtagcatctctcgctctgctaatagcgatagtggtgttgcttcagaacaaattagctgagcaagctttgaagctgtattatgtcaactgtgcattctgtgggatgatccatcataaaagaaatctcatactagaacaaggctttacaaatcaatgtctaacatgtatttgccacgacaaaaacatacataaagccacaaaaaagtgtactattagatacaaatggcacatcacaaacaatattagatggcttgtttttgtttccatactcataataatgccagcaagcatttacccaatgcaatgcttaagatctgaagaaataacaaatctagaagaggcttcagcttgcatatctgtttatcaaaatgtaacacaaaaaaagcaatatcacgagttgattaagtctatgagtgaacaactaagctcagatgaagtctctatattgctgccacaggttgtcccatcttatattaacttaatacacgagatagaaaatgaaaatgatctacatacagctatagtaaaagagataatcttagcaaatttatacccagaaatagtaaaaaaatactatagtgcagcaggacctgacactgttaaatggcgtacaatacttcttaatgctggactccacatctgttcagaacatgttgttaaaatgatatgtagatgtgctttattacaacaggaatgtcaatcagtcacaagcgatgatggaaatcaaattgagacttactataaatcacataaagaagaattttatgaagatatggcttcaattttcaaagttatatacactgcatttcctggtctcactaaattcttacttgtcagatcaatgtctagtaaagcattgcaagatgcagtcccagtacttgggaaattgaaatattacacgaggaacaacaatcatctaaacggtataattacattcgcagaacatataatatcgaagaatgtgacaagcgaaagtaggaccattaactttgaggtacgtaagttgactggtcagcaattcactgataaaaatgtcggctccagtggtatcacgacatgtcaaacacccaagttagttacatgcacagggaaaagattgagatcattgcaaaaggaatacatagcatgttcaaacaatggggttaaaatgtatctaaaggaagacaaaatctattgcagagtaggagcagacctgtgtgtaggtgacaaatattgtcttataagttttacaccgattactgacaaggaaaatgtagataaattaatatgttatgcaacagaatttcgggaccagtcaaatggtatgctaaaaagttcacaatcaattagagtaaaaaaactaggcagctgtgcacttaaaggccaattagtcaacatagcgatgtcatcagagaatttactgtataagtatgatacaatctatcataaaaaaacaccacttgtggacgagtactgcttatcagagaagtgtactagtgatcattatccttatagtagtgaaaaccttaaaaattgtgtgtggactataacgaaccacaaatttcagagtcaattgcatatagaccatcaagatatagaatctttcatatcaggtatcaaactatcattacataatgacttaattactcacaactacaaaccaacacaaaatatgccacacataattcctaattataagtctatatccatagctggaagcgataatggaaatacaataacagatgcttatgtccttttcactataccgctcaccactggcctctctcaaggttttagtgtaaatacaaaaacaaataaaggcttatttgatttagtagtctatataaagagagccactataaaagctgaatatacttttgagtatgaaaccgggccgactatcggcataaatgctgtccattctgaaaaatgcacaggattttgcccaagagagataccgcatgctacaaactggttaacatttacaaaagaacatactagttcatggggctgcgaagaatgggggtgctttgctataaatactggctgcgtatatggatcatgtcaagatataataaaaccagaaggcaaagtatataagaaaataggctctgaagcaattgatgcagaaatatgtataactgacagtagtgaaacattttgtacagagataacctcttataacccaatattaggtgaaaaagtacaaattgaaataatgtctcaagattcaagcctattgccatctaatatatttcaaaaaaacaataatatttacaaaggagatataaaccctaaaggcacttttgcaaaaaaatgcggatctgtgcagaaagtgcaagatcagatatatggttctggggagccacgatttgattatatatgtcatgctgctagtagaaaggatgtagtagtgcgcaagtgttacgataatgcatatatctcttgtagcacattggaatcgatccaaaatatggatctaatcaaagatgaatctaagtggtatttaagacaagatactggtttatatggttcagttaaagtaaagttactgctgggggatctaaattataagcaagatgatacaactaccacaaggataacagcgaaggctgtatgtggcggttgcacagactgctttgatgatgtatcatgccgagttgatgtcacgtctaataacattgcctcatgctcagtagagagtacatgctcgccatatataaataggttgtcattggtagaaggctcccagcaacttcatttaaagttcaaatgcaaaatggaagctatagcattttctatatgcggcattaaagcagagattagatcagagatagtgaaaagccataagatactggacttggcatcactgagccagacatcgtacattagagaatatgataaaaaatgcggaacatggctatgtcgtgtttacaacgagggtattgagggaatcatagggccaatatggaaagaatttaatatatggctcaagtatggtactgtagttgttgtattaatattctctgttattttaatagtgaaagtgataaatccgttaatcaaactaataattaacaccttaaagcacaatgaacaaatgtacttacttgagtctaagcaaaaataa

SEQ ID NO: 11184 - DNA, 117 bp, unidentified
  misc_feature 1..117: note = Synthetic
  source 1..117: mol_type = other DNA
gtgagccatttaaaaccattaatgcaacatcagcaccgagtgaggtctgcctcagagatgatatatcgatggttaaatctatcggaatacactcacgtggggatgactcagatatga

SEQ ID NO: 11185 - DNA, 261 bp, unidentified
  misc_feature 1..261: note = Synthetic
  source 1..261: mol_type = other DNA
atgcagctacatttaatccggatgcagggtatgtggcatttatcagtaagtatgggcagcagctcaactttactgttgctagagtcttcttcctcaaccagaagaaggccaagatggtcttacataagacgccacaaccaagtgtcgatcttacttttgcaggggtcaaatttacagtggttaataaccattttccccagtacactgcaaatccagtgtcagacactgcctttacgcttcaccgcatctcgggctacttag

SEQ ID NO: 11186 - DNA, 261 bp, unidentified; identical to SEQ ID NO: 11185
  source 1..261: mol_type = other DNA
  misc_feature 1..261: note = Synthetic

SEQ ID NO: 11187 - DNA, 4272 bp, unidentified
  misc_feature 1..4272: note = Synthetic
  source 1..4272: mol_type = other DNA
atagtgtcttgcaggatggatatttcaaagcacatgcaaatgttggtagtgctctacttgataagcttgtctggaactactccggtggtgtttaacaagtgtttcaccggtgggtctctggttttctcaaaaaagtcagacacaggaatgtctgaaatttgtcttaaagatgatatctccatgatcaaaacatctattgattttaaaaaggaaaataatacgatagtggccaccaataaagtttataaacaatggattgtccaagactggaaggactgtcatcctatgaaaatggttggaggaactattaatataatagaagtaacagcagatctaatgtttaaaagtgtaagttacacatgcacaacagattgcactattggcatagaccgtgaaaatgcactgattatattccaaacaaacaaattgaaccactttgaagtttctggtacaacaattaagaccggttggtttaaaaataaggcttcagtttccttagatcaaacatgtgaacatataaagataacttgtggaaggaaatcaatgcaattacatgcatgtttcaaagaccatatgtcatgcattagatttttgcacagaacaattctaccgggatatatggcaacatctatttgtcagaatatagaagtgatcctcttgaccgtatttacgcttataatctttggagtactttgtatactgattaaaacatatatatgttacctatttcttcctctgtacatgattccagcttacatttacgggtgtgtgtataataaaagctgtaagatatgcattaattgtggcttagcttatcacccattcaccaattgtgggtctcactgtgtatgcggggccaaatttgaaacatctgatagaatgaggatacacaggcagtctggattctgccctgggtacaaaagcctaagagcagccaggtctatgtgtaaaagcaagacttgctccctcattttctcaataggaggagctatcttgatattatcatttgttacaccaattgctggagaaaagctatatacattggatgagctcccagaggcatacactacagaaattaattcaattaaaatcatgcagaactatttggagttaaaattgtggataacaataactgcattattcattattgctttaataatgatgatttctaattttattgttgtcaatatatgtaaattgttttactttcattgttatgaatgcaacatgtatcatacaaagagaaatattaggtataatggagatttctgtaacaagtgtggtttttgcatgtgtggtgtattagaggatgtagaaggtttgaaaatacacaagaccacagaaagctgcaagataaaaatgcattatagatctaccaattttgctcttatcttatttgggttactattaatacttatctcagttagtgcatccttagcaagttgtgatgcagaagaacctaacataaattgcataggttataaaataaatttgacatgcaataaaccccttacaaatgaagaagctgtaaattacttagttgaaaataatataattgaggatgtagagagggaaaaagcattagaattaacaactgatttagctaatatgaaaaagcagttaaacttccaaacaaattttaaaacttgtttagtacttgaacatgtattcttgttgaatcaatgtgggtactataaagacttagaaagtaataatgagatcaagcagataccctggagaacaattgcaaaaacagaagcttttgatatatgttctataaggaaacatcagcatttctgtagatgtatggcgacaggagaaaagtgcaattctgctaattgggactttgctaaagaaatgaatgacacatataattttaagccaactttctatagaagagatgtcaacttatttttgaggattttttcagaagcattccccggaagcacttatagatacttatacagcatactaaaaaataaggacattgagaagataaaggagcttctgactgatatagaaaaaagatttccttataatcaattgttagttggttttattaaatttggtcatatcctcctaatagataatttggcttactcactccctccagacgtttcacggatgggtgcagaatctagaagtaaagtggaaacatctggttatcaagtaggacagccgatactctcatgtaataatcctttaataatacgatgcatgagcccaaagctggatgttgtcatccctgcattattaaaatgccatagaaataataaggattcattgtattatatagaccataaagtatatacatcttttcaacacccgcaatcatggtgttttgctgacaaacattgtctaatacactttagaccagtaccaggatcagagttgaatgcagttaaaaagagaaattgtttcagtagtcaagtgacagaggaccaggatcagtataatactaaacaagccttttgcagagcaattaagttcggaatatgtacaaacatattaaatcaacagtcaagaagcattgaatgtgacaacaatttgatttacaacacagacagtaagctcacaaatgaattaacaggtgatgtcaatgaaatttgcctgaatactggctgcaaagatggacgttacccattaaatccaataaattctgtaaactgtacttgggaagagaatgtgttaaaatcaaagcatgcgcagttgatagctgtggaaaacatagaagaattgaagcgtttgacacaagataggttaacacacacactcgacatatatagattcaagaagacaatcaacttcccaaaaataataccctctaagaaatacattagtttacaagggatagattcgagcgatgggattgatagttcttatatagaggttgatataacagcaaggacaaatgaggcacttgggatacaggtccgtgctcctgataatcagccaatcatggatctaattatacatataactctagcttcaacaaaggcagattatcttagaatctatgagacaggcccaacagtaggaattaatgtcaaccatgatgaacattgtactgggtcctgtcctgaacaaatacctcataaacaaaattggctgaccttctcaaaagaacgaacaagccaatggggatgtgaagagtttggatgcttagcaataaatgaaggatgtctttttggttcgtgtcaagacattattaaaagtgaggctagagtttttaaaaaaacaacagtagagaagcacatagttcggctttgtattatccatgcaaacgaagataagtgtactgatttagacccagaggaaccgttaataacagaaagcttagaattgcaattggatagtatcacaacaaagaacctaccagaattaattctaattaaagatcacaaggtttatactgggcaaattaatgatctgggagcggtatcatcaggatgcggtgatgtccaggtggtgaacaacactatatttggtggtggtactgttaaatttgactatctgtgttatggggctcacaggaaggatgttgtcgtccgtaaatgttataataaccattatgaatcgtgtaaattattagctgaacagaaagaattaacattcttagacgagtcatcagctgtgagtttagagcataataactatataatcggatctttaaaattaaaaattgtgctaggcgatataagatacaaattattcagaaaagacattcagttagaggttgaaggggagtgcattggatgtaaaaattgtttaagcggcatagattgcaattttaaagtaacatctcctagtgaaacatcatgtaaaatcgagagtccctgttcaatgtttatagagaatttgattatcaaagcaggccacacagacacaaactttaaaattcattgcaaaacaattgacagcaaggtaattgaattcaagatatgcaataatatttacaaagtgcatattacggagactaagggtaatgataaaattgaattaaacacaggagatcaaacatcttatgtacagcagcatgataatagatgtggaacctggctgtgcagacttaaagaagaaggaataggcctgttgcttgagccattaaaggcaatatttgggacttatattacatggttttgggttattctagggattattgtgttcttatttataggggtatatatatttttgcctatgattttcaaggtaagagatatattgaaaaagaatgaagaggaatacaaaaaggacatcagatatagagaataa

SEQ ID NO: 11188 - DNA, 4329 bp, unidentified
  misc_feature 1..4329: note = Synthetic
  source 1..4329: mol_type = other DNA
aagatgatttgtatattggtgctaattacagttgcagctgcaagcccagtgtatcaaaggtgtttccaagatggggctatagtgaagcaaaacccatccaaagaagcagttacagaggtgtgcctgaaagatgatgttagcatgatcaaaacagaggccaggtatgtaagaaatgcaacaggagttttttcaaataatgtcgcaataaggaaatggctagtctctgattggcatgattgcaggcctaagaagatcgttgggggacacatcaatgtaatagaagttggtgatgacctgtcactccatactgaatcatatgtttgcagcgcagattgtaccataggtgtagacaaagagactgcacaggtcaggcttcagacagataccacaaatcattttgaaattgcaggcactactgtgaagtcaggatggttcaagagcacgacatatataactcttgatcaaacttgcgaacaccttaaagtttcctgcggcccaaaatctgtacagttccatgcctgcttcaatcagcatatgtcttgcgtcagatttttacacaggacaatattgcctggctctatagccaattccatatgtcagaatatcgaaatcataattttagttacacttactctattaatctttatattgttaagcattttaagtaagacttatatatgttatttattaatgcctatattcatccccatagcatatatatacggtataatttacaataagtcgtgcaaaaaatgcaaattatgtggcttagtgtatcatccattcacagagtgtggcacacattgtgtctgtggtgcccgctatgatacttcagatagaatgaaactgcatagagcttctggattgtgccctggttataaaagcctaagagctgccagagtcatgtgcaagtcgaaagggcctgcatcaatattgtctataattactgcggtactggtcttaacctttgtgacaccaatcaactccatggttttaggagagagtaaagaaacctttgaacttgaagatcttccagacgacatgttggaaatggcatcgagaataaattcttattatctcacctgtatcttgaattatgctgtaagctggggtcttgttatcattggattgttgatcgggctgctttttaagaaataccagcacagattcttaaatgtttacgcaatgtactgtgaagaatgtgacatgtatcatgacaagtctgggttgaaaagacatggtgatttcaccaacaaatgcagacagtgcacatgtggtcaatatgaagatgctgcaggtttgatggctcacaggaaaacctataactgcttagtgcagtacaaagcaaagtggatgatgaacttcctgataatttacatattcttaattttgatcaaagattctgctatagttgtacaagctgctggaactgacttcaccacctgcctagagactgagagtataaattggaactgcactgggccatttttgaacctcgggaattgccaaaagcaacaaaagaaagaaccttacaccaacattgcaactcagttaaagggactaaaggcaatttccgtactagatgtccctataataacagggataccagatgatattgcgggtgctttaagatatatagaagagaaggaagatttccatgtccagctaactatagaatatgcgatgttaagcaaatactgtgactattatacccaattctcagataactcaggatacagtcagacaacatggagagtgtacttaaggtctcatgattttgaagcctgtatactatatccaaatcagcacttttgcagatgtgtaaaaaatggtgagaagtgcagcagctccaattgggactttgccaatgaaatgaaagattattactctgggaaacaaacaaagtttgacaaggacttaaatctagccctaacagctttgcatcatgccttcagggggacctcatctgcatatatagcaacaatgctctcaaaaaagtccaatgatgacttgattgcatacacaaataagataaaaacaaaattcccaggtaatgcattgttgaaggctataatagattatatagcatatatgaaaagtttgccaggtatggcaaatttcaaatatgatgaattctgggatgaattactgtacaaacccaacccagcaaaggcctcaaaccttgctagaggaaaggagtcatcttacaacttcaaactagcaatttcatcaaagtctataaaaacctgcaagaatgttaaggatgttgcctgcttatcgccaaggtcaggtgctatatatgcttcaataattgcgtgtggtgaacccaatgggccaagtgtgtataggaaaccatcaggtggtgtattccaatctagcactgatcggtctatatactgcttgctggatagccattgtctagaagaatttgaggccatcggccaggaggagctggatgcggtaaagaaatccaaatgttgggaaattgaatatcctgacgtaaagctcatccaagaaggcgatgggactaaaagctgtagaatgaaagattctgggaactgcaatgttgcaactaacagatggccagtgatacaatgtgagaatgacaaattttactactcagagcttcaaaaagattatgacaaagctcaagatattggtcactattgcttaagccctggatgtactactgtccggtaccctattaatccaaagcacatctctaactgtaattggcaagtaagcagatctagcatagcgaagatagatgtgcacaatattgaggatattgagcaatataagaaagctataactcagaaacttcaaacgagcctatctctattcaagtatgcaaaaacaaaaaacttgccgcacatcaaaccaatttataaatatataactatagaaggaacagaaactgcagaaggtatagagagtgcatacattgaatcagaagtacctgcattggctgggacatctatcggattcaaaatcaattctaaagagggcaagcacttgctagatgttatagcatatgtaaaaagtgcctcatactcttcagtgtatacaaaattgtactcaactggcccaacatcagggataaatactaaacatgatgaattgtgtactggcccatgcccagcaaatatcaatcatcaggttgggtggctgacatttgcaagagagaggacaagctcatggggatgcgaagagtttggttgcctggctgtaagtgatgggtgtgtatttggatcatgccaagatataataaaagaagaactatctgtctataggaaggagaccgaggaagtgactgatgtagaactgtgtttgacattttcagacaaaacatactgtacaaacttaaaccctgttacccctattataacagatctatttgaggtacagttcaaaactgtagagacctacagcttgcctagaattgttgctgtgcaaaaccatgagattaaaattgggcaaataaatgatttaggagtttactctaagggttgtgggaatgttcaaaaggtcaatggaactatttatggcaatggagttcccagatttgactacttatgccatttagctagcaggaaggaagtcattgttagaaaatgcttcgacaatgattaccaagcatgcaaatttcttcaaagccctgctagttacagacttgaagaagacagtggcactgtgaccataattgactacaaaaagattttaggaacaatcaagatgaaggcaattttaggagatgtcaaatataaaacatttgctgatagtgtcgatataaccgcagaagggtcatgcaccggctgtattaactgcttcgaaaatatccattgcgaattaacgttgcacaccacaattgaagccagctgcccaattaaaagctcgtgcacagtatttcatgacaggattcttgtgactccaaatgaacacaaatatgcattgaaaatggtgtgcacagaaaagccagggaacacactcacaattaaagtctgcaatactaaagttgaagcatctatggcccttgtagacgcaaagcctatcatagaactagcaccagttgatcagacagcatatataagagaaaaagatgaaaggtgtaaaacttggatgtgtagggtaagagatgaaggactgcaggtcatcttggagccatttaaaaatttatttggatcttatattgggatattttacacatttattatatctatagtagtattattggttattatctatgtactactacctatatgctttaagttaagggatacccttagaaagcatgaagatgcatataagagagagatgaaaattagatag

SEQ ID NO: 11189 - DNA, 4341 bp, unidentified
  source 1..4341: mol_type = other DNA
  misc_feature 1..4341: note = Synthetic
gtgtactaccacatacaacaaacttttcagagaattaaaatgatcgctgtacttttgctatcagctgttgctgcaatagcttcagcacaccctcttgctaaaagccacatgggcgagaggtgttttgcaggaggctccatattaaaagatgttaaccaaactacgggcataggtgaagtctgtgtaaaggatgacatatcaataatcaaaagtgtcgttataccaagaaaagaaggcaaggtctcaatgaattggataagattctatagagtgtacattgtcaaagactggcacgactgtaatccaattgtagacaaaaaaggagatttcatgatactggatgtaacagaggcagggactctagtccctaaaatgcatatttgcagagctacatgtgatatatccctcgatagagataacgcggaaatcattttcatgtcatccaaaacaaatcactatgaagtctcaggtactactgtgataaatggctggtttaagcaaactataagtgtgtcattagagcatacttgtgagcatttaactgccacatgtggtcaaaaaacattaaggttccatgcttgttttaggcaacacaggtcatgtgtgaggtatttcaaaaatagttacataccatataggatgatagaatctatgtgccagaatcttgaactaataataatgatattatttacgtttgtagcatttgcatttagtatgattataacaagaacttatattgcttatttaatgattcctgtcttttacccggccacttatatatacggaaaactttacaataaatacttcaagttatgtgtcaattgcaacttagcagtgcacccgttcaataattgtggaaatttatgtatatgtggatccagattcacatgcacagagcaagtgaaggtccatcggatatgtggagcttgtcccggatacaagtcattgagcaaagccagggctatgtgtaaatctaaaacctggtcattcatctctgctatactggctggtatcttcttattttcatttataacaccaataaacgcagatgagagactgtataagttagacgagttagcagatgattttatcgaaatttctaataaattatcagagaaccaatttaatagaatggtgtacaaaatcacattgtctacgattctaggtataattatggctatacttctatctgaaaaatgtgtttttaataaaatgttcaaccatttctatagacactgttctatatgcagcatgatacattatagacctggactaagattcaactcatctgtgacaaataggtgcgggacatgtatctgtggatataatgagcagcagccagatgaaaatggttatgaaatccccctaagagacatgcacaagcaacaggagtcatgcaagtatatttctgttagaaatcattatagaaatatgaaaataatattgattatattagttttaaccactcaagttattactgcttcatctgacgaaaaagagtgcttaaaatatccatttgttattgataaaattaacttaacaagatgctttggccattttttgaatctaacagattgtagcctaactaacaaagagagactttttacgagtttaaaatctgaaaaccttattactgacatggataaaatagattttgacatactagattataaatcagatactgcttttgaaaggatagagatgtcccaagacttacacaagatgatactattagagtatatttatttcaaaggaaactgcgagaagctcaacactatgaaaggcaactctgggccattcaacgtggcatggaggacctatattaaagcccatcatttggatgcatgtgggcaacttccacacaaaattatatgcagatgcataagctctcaccagtactgtcagagtgctgatattgatgccttaagtgaacttgagacatattacactacacaccaagctgcttacttaatggattatgagactatcataacaactatagccttagcttttagagggattgggaaagtcttaatagaagactttgcagcagggaattcagactcggagctagatatacttttaacaaatatggattatagtttgaaaaccaatttgcaactaagaggtataatcagatttgctaagatgatggggaaaatgtctagagctaagccatcaagactgcagagatcttcaatattttcaataagtgaggagcctgaattgaaaggatctcaattttcagacttcagtattcacaatgaggatattaaaatttgcaaagagccccactctatgatgtgttattccaaaagacagagaacttctcaaaacaatttccttttgtgtaaaattgaatccaaatggaaggttttcaaatggccagaaaagccaactctgaatactgactctggattatgctatggggacaagcattgtaatctgaaattccctaggctagatgcggatactgctatcaagcaagtctcttgtttcaagtcaagctttacagagaacccatcaggaatgaatgaacaactcaagaaatgcactgctatatccgttggtgattgtgatacaatttctggggtctcatggcctgttattcattgtaaaaatgataaatactatcacagcgatactaaagagcatgcaaaagatggcaacattaatagttactgcctatcagaagcttgcaaattagataaactgcctgttcataagtcatggtttaaattatgcaattgggattcagttgtaaaagaagacctcgaaataaaagaatttacgcatctcgacatcgaatcctatagaaaagctattgagtcagatatcaaaacagacctaatattgaaccatttcaaactaacaaaaaacttgccacatacagtcccgaaatatagatcgatgacagttcagggggtagactatcaagatggaatacagaatgcttatataactggaacactcccagctattagtgggttagcagctggttatcatcttagcgcaccagatggacagcaactatttgatattgtaatcttcttgaaaaaagctgtttataaagccagatataccaagatttactcaactgggccaactatatcaattaatatccaacacaatgaacagtgtacagggtcatgccctaaaagtatcccaaagcaggatggatggctaacgttctctaaagaacacacaagtaattggggctgtgaagaattcggttgtttagcaatagatagcggatgtctgtatggatcatgccaagatgtaattagacccgaaatggatgtatataaaatacaaggttctgagcagacactgattgagatatgcataagcacacctcatgagactatgtgcaatgatctagatgttttagaacctttaataggtgacaaaatagaagtatctttccaaacaactcagtctgtgcatatgccaactcttatgggcttgaggaaagggggcctatacactggtcaaataaatgatattggcaatactgctgaaatgtgtggatcagttcaattaataaacgggtcactgataggccagggaacacctaaatttgactatatctgccatgctgcaaaaaggaaagatgtaattgtcaggaggtgttacaacaatcactatgtaacatgtgaattgttggagaagagaaataatatcctgcacaccatacaggggactgacatgtatgcgtcattaagtggtaataacttaggtttgatgaacttccggattgcacttggagatataaactacaaagcatttattaaagacactaattttgaaataaaaggatcgtgtgtaggatgtgttagatgttccgaagaaattgtttgtgagatgtctatagtttctcaaggtgaaatattatgcccaataaactcagaatgtgatttatatatgagcaatctactaatcaagcctgaaattgaaaaatacgccattaagatgtcatgcaaaaaagcatcagattctgttgaaattggaatatgtgggcggtcaggaaaatacagcttaactgttaaaccacatcagcagaaaatcgacttgtctaaactagacgagtcaaattttgttaaagaagaggatcttaagtgtggaacttggttatgcaaagtcaaagatgaaggcataggttttattttcgataatatttttaacaagataggaaaaatttggagcattgtcatatattgtttaagtgggatccttgttgtcatgttgctaatatacttcatttacccatgctgtaagagattaaaaggtgttttagagaagaacgagatggagttcttagcggagcagaaaataaaatag

SEQ ID NO: 11190 - DNA, 279 bp, unidentified; identical to SEQ ID NO: 10705
  misc_feature 1..279: note = Synthetic
  source 1..279: mol_type = other DNA

SEQ ID NO: 11191 - DNA, 279 bp, unidentified; identical to SEQ ID NO: 10705
  source 1..279: mol_type = other DNA
  misc_feature 1..279: note = Synthetic

SEQ ID NO: 11192 - DNA, 321 bp, unidentified
  source 1..321: mol_type = other DNA
  misc_feature 1..321: note = Synthetic
atgatgaacctctacggattcaaagtggatttgatcctgaaagacaatacatggaatttatccgtggtgtcggaaatgggatcagtctgccttccattaaaatcttcttcctcaatgccaggaaagccaaagataaactctctcttagatctgacaggaagattagtcttaaatttgggacatggtcggtggaggtggtcaataaccattttcaaggcaacagggacagtacaatcggcaacatggatctcaccttgcacagactgtcagggtatcttgcacggcatgtgctcgaattgtaccttgcagcaaaccctgtaa

SEQ ID NO: 11193 - DNA, 321 bp, unidentified; identical to SEQ ID NO: 11192
  misc_feature 1..321: note = Synthetic
  source 1..321: mol_type = other DNA

SEQ ID NO: 11194 - DNA, 291 bp, unidentified; identical to SEQ ID NO: 10837
  misc_feature 1..291: note = Synthetic
  source 1..291: mol_type = other DNA

SEQ ID NO: 11195 - DNA, 291 bp, unidentified; identical to SEQ ID NO: 10837
  misc_feature 1..291: note = Synthetic
  source 1..291: mol_type = other DNA

SEQ ID NO: 11196 - DNA, 6810 bp, unidentified
  source 1..6810: mol_type = other DNA
  misc_feature 1..6810: note = Synthetic
attctaagaacatatcaatcaaaaatgaatcctgataaaattgaggaataccgtaataggattgaattgtgccgagacccagaaagagctcaggagatatggagagctttactggttgaaaggcataattacttctctagagaattttgtgattctgcaggatgggagtacaggaatgatgtgccgtctgaagatatttgctcagaagttctaccgaatgatattgctaggcgggttaggtattgcacacctgacaactactatatagacactaatgggaaaatttacatcattgactttaaagtagccatagatgaaagaagtgcaagggaggcccgagaaaagtacaatgaaatttttggtgaaatattcaatgcaaatggaatagattatgagatcgtgattataaagcataatccaacgacaaacactaccatgatagactcagataatttaaggagagaattaggccacataaaccttactatagacctatcttggttttttgaattaaaagacttcctatttggaaaatttaaagatgatgaaagattcctggaaattataaaccagggagatttcactatgaccatgccctggcttgaagaggatacaccagagttatttgagcatagaaagtttttagaatttatagaatctatgcctgaagaagaacgtgagactttctttcaagcattaggctttcgttctgatgacgcatcaaaatggaatgaatgcttacaaaccataatggatcaatataaaagtcggtataattcctttatcagaaagagtgcccaagagatcttcaatacatctgggcaatatcctagaccaacaaaggaagctatcgacgagggatgggcggaaatggttgccagagttaaaaacgaaagaaatgtaaccactgatatggcaaaacagaaacctagctttcattttatctggtcacccaactcggatgagtcaaattccaatataccgaaaatactaaaactgtcaaaaaaattacaatctataacaggggtagggtcatttgtaaaggccttccgatcactaggaaagttgatggatttcagtggcgatatctctgggtatgagaggttttgtaacaaattgaaaatcgatgccaggtcgacacctaaacgattagacaaaaagatagaggagttcacatcagggacttgtactgcattatgggagcagcagtttaaattggacacagctgttattactaaagaagatcggatacatttaatgaaggattattttgggataggaaatcataaatcatttgctaagagactaaatgatgatttagatttagataagcctaccattttggatttcaatgatcctgatattatcaggaaatgtaaggcccaatacaacaatgtagaagagatactaggaaaagtcaatcgtttagacaaaattggaaattacttagatcactattcacccaaaatccagagtgcaagtacaaaaatgtgggacgtggttttcaaaatatccaaaacacaattttggcaatgcataaacgattactccacactgatgaagaatatgcttgctgtatctcaatacaacaaatacaacactttccgagtagtcacttgtgcaaataacaacatcttcggcattgtgatgccgagctcagacatcaagacaaaaaaagcaacactagtatattgtgttgtaaccattcatagcaatgaagaagatgttgcacaccttggttcattgtatgggacctttaggtcttctaactgttatgtcagcatatctaaggcatttagactagataaagagagatgtcaaagaatagtctcttcaccaggtctatttatgatgacagcatgtctattcattggagacaataataccttacacttcgacaacctcttgaacttctcgtttcatacatcagtctcgataacaaaggcgatgctatctttgactgaaccttctagatatatgatgatgaactcgttagcaatgtctagtcatgttaaagaatatatctctgaaaaattcgccccttatacaaaaactgctttttctgtagttatgacagacctaataaagaaaggttgttacaatgcattcaatcaaagagaaaaagtgcaattgagagatatacatatgacagattatgatgtcacacaaaaaggtgttcagaaaaaaagagatctaagatcaatctggtttcctggtaaagttgatcttaaagaatatataaaccagatatatatgccattttactttaactctaaaggtttgcatgagaaacatcatgttctagttgatctcgcaaaaaccattctggagatagaaaaagatcaaagagaaaatctaccagaaccatggagtgaaaagccaaaaaaacagacagtgaatcttgatatacttatatatgctattgcaaaaaacctgaatctagacacttcaagacataattttgtaagaagtagagttgagaattctaacaacctaaaaaggtcaataactactattgccacttttaccagttccaaatcatgtatcaaaagaggggattttacagaattcaaaacaaggattcaaaagaaagttgacaagaatataaaaaaagaggtaaaaaaagtcacgattgctaacccatctctgatagaagaaataactaacgacatggaaatacatcatgcaacttatttagatatcaaaaaagcagtcccagagtatatagattttatgtctaccaaagtatttgatagactttatgaaatactaaaagaaaacaaatacaatactgaaaggacaatagatattatctttaaagtaatgcatgaacatacagagtttgtttttgcattttttaataaaggccagaagacagctaaagatagagaaatctttttaggtgaatttgaagccaaattgtgtctatacttaattgaaaggatagcaaaagaacgttgcaaactcaatccagatgagatgataagtgaaccgggagattctaaacttagaatactggagaagcaagctgaagatgaaataaggttccttgcaaaaactatcaaaaatgtaaataaagaacttttggataaacttaagataggagcatggggtggagatttcagcctagatgatctaggccatgacaaggcacatgggatgaaattagaaatcaatgcagacatgtcgaaatggagtgctcaagatgtgatctacaagtacttctggttgattgctatggatcccatcctatacccaaatgaaaaaaagagaatcctctatttcctatgcaattatatggaaaagaagctactcttacctgatgagttaatgcagataattctagatcagagagttcctagatacaatgatatcatagggcagatgaccgaaggttaccacagaaattgggtggttattgagagaaattggctccagggaaacatgaattatacatccagttaccttcatagttgttctatgtctgtctttaaagatgtaatgagagagtgtgccaatctattagaaggggaggtgttagttaactctttagtacattctgatgacaatcaaacatccatttgcatggttcaaaacaaagtgaaggatgacaatgttatagaattcacaatcaaattatttgaatttatctgcttgacattcggaaaccaagcaaatatgaagaaaacctatgttactaattttattaaagaatttgtctctctttttaatatacatggtgagccattctcagtctacggtaggtttctattaactgctgttggagactgtgcatatttagggccatatgaagacttagcaagcagactctcagctactcaaactgctattaaacatggctgcccagcatccttagcatggatttcaatagctttaaatcattggattacacatactacctacaacatgttgccaaatcaaataaatgacccattacctttttttcctactacaaatagagaggaaatacccattgaaatgtgcggtctgctcaattcagaacttcaaactatagcactagttggcttagaggcaggaaatttatcatatttaacctcactactcagaagaatgtcccctataactcatcaaagagagtctgtacaaagccaatgtagccagataaagacatgggatctaaaattgctaacatctatggatctaattaagttaaaatctctaagatacatttctttagatagcgaagttaccactgatgatggaatgggtgaaactagcgaaatgaggtctagatctctcctaactcctaggaaattcactaccagtggatcattaaatcgattaatatcatacaatgacttccaaagagtaatatccgatgaggctgaaaaagaaagaatgtttgaattttttgtcagacatcctgaattattagtaacaaaaggtgaaactgctcaagaatacatgaattctgtagtattcagatataactcaaagaaattcaaagaatcactatctatccaaaatccatcacagcttttcatagagcagatactgttctcaagcaaacctgttatagattacacaagcatacatgataaaatatttggattgcaagaccaccctgacttagaagaaatggacaccattataggcaagaaaacatttgttcagagctatgttcaaattatagatgacttgtccaaattcgatttaacccatgatgatatcgaaacagtttactcgtattgcttacttaatgaccctttgttagtaacagcatcgaataacatcgtcatgtctgttaaaggagctgaacaagaaagacttggacagtcagcttgcaggatgccagaaatgagaagtttaaaattgatatatcactcaccagcattagtgttaagagcctatgtaaatcagagccctgaggtgccaggtgctgatccagatgaaatgcttagagatttgacacatctagaggaatttattgaaaaaactagacttcgatctcatatgagagaaagaatagagataaaccagaagaaaatgatgaagcgagacatccagttcgaagtaaaagaattgactagattttatcaagttctctatgattacattaagtctactgagcacaaaatcaaggtctttatactcccgtataaagtttatacacctattgatttttgcgcggcacttacaggaaacctcattaaagatgacaaatggcatattattcacttcctcaaaaacataatttcaaccacacacaaagctcaagttgcaacttcgccagacttggaggttcagcttgctatggagtgttttagactcattgctcatttcggggatatgtttttagcagaagaatctagagtcccattcctcaaaggaattattgaaaagttttcctataaggccatccctgtgtctagactctatgataaattaagagaatctaagcatagaataaagtttatacccatattattccatatggatgatttaacacagagggatttaaacaaatatgatgcagacaaatctgatgagagaataacatggaacaactggcaagtatcacgggaaatgaacactggtccgatagatctaattattactggttatgatagacaaattcagattcggggagaagatgaccaattattaggtgcagaattaaaattagctagagtaagtagagaaaccatttcaggtcatgctaaatctatccttaacagaaaacatggcttgaagtttgaaaagatgaagaaaatagaggaaatgtctgataaattagactacattgtttaccaacagcggggcaggaataggttcttttataatatattgccgaaacagattatattggaccacaattcaagagtcgacaagacaaaaagcattggagaatcaaaatggatacctgtatgtccagtagtggtaagaaaattatatcagcaaaagaggccagacaaagacaaaattatgagattgaatatgcaggtttacactttgagcaaattacaagtaaatccaaatgagtatgctacagttaggaaagcacatttccaaaagatgacattcttttctggtccccctattaaaagcggagggatggatatagctgcattgatgtcaagcccaagtctattgagcttgaattatgatacaatggcacaagcgtccctcattgatatgtgcagagttttcaaatgtgaaggttacaaagaagaccagatggcatttgagtttttatcagatgaagtgatgcaagtcgacatagaagagcagttggagtgtaaccccatattctctgttgtctacaacaccaaaggtgagagaggaatgacctacaaaggggcatttaggactgccttaataagagaatgtgagaaattcgaaaaagcatttgacttccttgacatgggattttgctcaaacgagaatctatcaatactcgaagaaatacattggattgtgattgaattaaaaactaaccaatggtcaacagaattagaccaatgtatacacatgtgtatgtatagaaacaacatggatccagagtttcaccaatttgacatccctaaagtattcttagaagacccgattttaaggacaattaagtggaagcgtgtgcggaaatttttagaagttcttcgagatttcaaggtcaaagaagaaccttggaagtcaatcattcagcatttttgcgacaaagcattcagattaaccaatgaaaggattagacagaaccaaaaatcagaagggtttgaagctttcatagaccctgaaaaaagaggtggtagatccaaatttgaatttaattag

SEQ ID NO: 11197 - DNA, 6792 bp, unidentified
  misc_feature 1..6792: note = Synthetic
  source 1..6792: mol_type = other DNA
atggactatcaagagtatcaacaattcttggctaggattaatactgcaagggatgcatgtgtagccaaggatatcgatgttgacctattaatggccagacatgattattttggtagagagctgtgcaagtccttaaatatagaatataggaatgatgtaccatttgtagatataattttggatataaggcccgaagtagacccattaaccatagatgcaccacatattaccccagacaattatctatatataaataatgtgttatatatcatagattataaggtctctgtatcgaatgaaagcagtgttataacatatgacaaatattatgagttaactagggacatatccgatagattaagtattccaatagaaatagttatcgtccgtatagaccctgtaagtaaggatttgcatattaactctgatagatttaaagaactttaccctacaatagtggtggatataaacttcaatcaatttttcgacttaaaacaattactctatgaaaaattcggtgatgatgaagaattcctattgaaagttgcacatggtgacttcactcttacagcaccctggtgcaagactgggtgccctgaattttggaaacaccccatttataaagaatttaaaatgagtatgccagtacctgagcggaggctctttgaagaatctgtcaagttcaatgcttatgaatctgagagatggaatactaacttggttaaaatcagagaatatacaaagaaagactattcagagcatatttcaaaatctgcaaaaaatattttcctggctagtggattttataagcagccaaataagaatgagattagtgaggggtggacattaatggttgagagggttcaagatcagagagaaatctcaaaatctctccatgaccagaaacctagcatacattttatatggggagcccataacccaggaaatagtaataatgcaaccttcaaactcatattgctttcaaagtccttacaaagcataaaaggtatatcaacttacacagaagcgttcaaatctttaggaaaaatgatggatattggagataaggctattgagtatgaagaattctgcatgtccctaaaaagcaaagcaagatcatcatggaagcaaataatgaacaaaaaattagagcctaaacaaataaacaatgcccttgttttatgggaacagcagtttatggtaaataatgacctgatagacaaaagtgagaagttgaaattattcaaaaatttctgcggtataggcaaacacaagcaattcaagaataaaatgctagaggatctagaagtgtcaaagcccaaaatattagactttgatgacgcaaatatgtatctagctagcctaaccatgatggaacagagtaagaagatattgtccaaaagcaatgggttgaagccagataattttatactgaatgaatttggatccaaaatcaaagatgctaataaagaaacatatgacaatatgcacaaaatatttgagacaagatattggcaatgtatatccgacttctctactctgatgaaaaatatcttatctgtgtcccaatataacaggcacaacacatttaggatagctatgtgtgctaataacaatgtctttgctatagtatttccttcggctgacataaaaactaagaaagcaactgtagtttatagcattatagtgctgcataaagaggaagaaaacatattcaacccaggatgtttgcacggcacatttaagtgtatgaatgggtatatttccatatctagagctataaggctagataaagagaggtgccagagaattgtttcctcacctggactgtttttaacaacttgcctactattcaaacatgataatccaactctagtgatgagcgatattatgaatttttctatatacactagcctgtctatcacaaagagtgttctatctttaacagagccagcacgctacatgattatgaactcattagctatctccagcaatgttaaggactatatagcagagaaattttccccttacacaaagacactgttcagtgtctatatgactagactaattaaaaatgcttgctttgatgcttatgaccagagacagcgtgtccaacttagagatatatatttatctgattatgacataacccaaaaaggtattaaagacaatagagagctaacaagtatatggttccctggtagtgtaacattaaaggagtatttaacacaaatatacttaccattttattttaatgctaaaggactacatgagaagcaccatgtcatggtggatctagcaaagactatattagaaatagagtgcgaacagagggaaaacataaaggagatatggtctacaaattgtaccaaacagacagtgaaccttaaaattttgatccattccttgtgcaagaatttactagcagacacttcaagacacaaccacttgcggaacagaatagaaaataggaacaattttagaaggtctataacaactatttcaacatttacaagttcaaagtcttgcctcaaaataggggactttagaaaagagaaagagctgcagtcagttaaacagaagaaaatcttagaggtgcagagtcgcaaaatgagattagcaaacccaatgttcgtgacagatgaacaagtatgccttgaagttgggcactgcaattatgagatgctgaggaatgctatgccgaattatacagattatatatcaactaaagtatttgataggttatatgagttattagataaaggagttttgacagacaagcctgttatagagcaaataatggatatgatggtcgaccacaaaaagttctatttcacatttttcaataaaggccagaaaacgtcaaaggatagagagatattcgttggagaatatgaagctaaaatgtgtatgtacgcagttgagagaatagcaaaagaaagatgtaaattaaatcctgatgaaatgatatctgagccgggtgatggcaagttgaaggtgttggagcaaaaatcagaacaagaaattcgattcttggtcgagactacaaggcaaaagaatcgtgaaatcgatgaggcaattgaagcattagctgcagaaggatatgagagtaatctagaaaaaattgaaaagctttcacttggcaaagcaaagggcctaaagatggaaataaatgcagatatgtctaaatggagtgctcaggatgttttttataaatatttctggctcatagccttagaccctatcctctacccacaggaaaaagagagaatattatactttatgtgcaactacatggataaagaattgatactgccagatgaattattattcaatttgctggaccaaaaagttgcataccagaatgatataatagctactatgactaatcaattaaattcaaatacagttctgataaagagaaattggctccaagggaatttcaactacacctcaagttacgtccatagctgcgcaatgtctgtgtataaagaaatattaaaagaggccataacattactagacgggtctatattagtcaactcattagtccattcggatgataaccaaacatcgataacaatagttcaggataagatggaaaatgataaaattatagattttgcaatgaaagaatttgagagagcctgtttgacatttggatgccaagcaaatatgaaaaagacatatgtaacaaattgcataaaagagtttgtttcattatttaacttgtacggcgaacccttttcaatatatggcagattcctattaacatctgtgggtgattgtgcctatatagggccttatgaagatttagctagtcgaatatcatcagcccagacagccataaagcatggttgtccacccagtctagcatgggtgtccatagcaataagtcattggatgacctctctgacatacaacatgctaccagggcagtcaaatgacccaattgattatttccctgcagaaaataggaaggatatccctatagaattgaatggtgtattagatgctccattgtcaatgattagtacagttggattggaatctgggaatttatacttcttgataaagttgttgagcaaatataccccggtcatgcagaaaagagagtcagtagtcaaccaaatagctgaagttaagaactggaaggtcgaggatctaacagacaatgaaatatttagacttaaaatactcagatatttagttctagatgcagagatggaccctagtgatattatgggtgagacaagcgacatgagagggaggtctattttgacacctagaaaattcacaacagcaggcagtttaaggaaattatattctttcagtaagtaccaggatagactgtcttcccctggaggcatggttgaattgttcacttatttgcttgagaaacctgagttgttagtgactaaaggggaagatatgaaagattatatggaatctgtgatattccgatataattccaaaaggttcaaagaaagtttgtcaatacagaacccagcacaattatttatagaacagatattgttctcacataagcccataatagacttttctggtatcagggacaaatatataaacctacatgatagtagagctctagagaaggaacctgacatattaggaaaagtaacatttacagaggcttatagattattaatgagggacctgtctagcctagaactaaccaatgatgacattcaagtaatttattcttacataatacttaatgaccctatgatgataactattgcaaacacacatatattgtcaatatacgggagtcctcaacggaggatgggcatgtcctgttcaacgatgccagaatttagaaatttaaaattaatacatcattccccagccttagttttgagagcatatagtaaaaataatcctgacatccagggtgctgatcccacggaaatggctagagatttagttcatctgaaagagtttgttgagaacacaaatttagaagaaaaaatgaaagttaggattgctataaatgaagcagagaaaggacaacgggatatagtctttgaactaaaagagatgactagattttatcaggtttgctatgagtatgtcaaatctacagaacacaagataaaagtcttcattctcccgacaaaatcatacacaacaacagatttctgttcactcatgcaggggaatttaataaaagataaagagtggtacacagttcactacctaaaacagatattgtctggtggccataaagccataatgcagcataatgccactagtgagcaaaatattgcttttgagtgtttcaaattaattacccattttgcagactcattcatagattcattatctaggtcagcttttttgcagttgataatagatgaattcagttataaagatgtgaaggttagcaaactttatgacataataaagaatgggtataatcgaactgacttcataccattgctttttagaactggcgatttaagacaagctgacttagacaagtatgatgctatgaaaagtcatgagagggttacatggaatgattggcaaacatctcgtcacttggacatgggctcaattaatctaacaataaccggttacaatagatcaataacaataatcggagaagataacaaattgacatatgcagaattatgtctgactaggaaaactcctgagaatataactataagtggcagaaaattgctaggtgcaaggcatggacttaaatttgaaaatatgtccaaaatccaaacatacccaggcaattattatataacatatagaaagaaagatcgccaccagtttgtataccagatacattctcatgaatcaataacaaggaggaatgaagagcatatggctatcaggaccagaatatacaatgaaataactccagtatgtgtagttaacgttgcagaggtggatggggaccaacgtatattgataagatctttagactatctaaataatgatatattttctctttcaaggattaaagtcgggcttgacgaatttgcaacaataaaaaaagcacactttagtaaaatggtctcatttgaaggacccccaattaagacagggctcctcgaccttactgaattgatgaaatctcaagatttgcttaaccttaattatgataatataaggaatagcaacttgatatctttttcaaaattgatttgctgtgaggggtcagataatataaatgatgggttagagtttctgtccgatgaccctatgaactttacagagggtgaagcaatacattcaacaccgatctttaatatatattactcaaaaagaggagaaagacatatgacatacaggaatgcaattaaattactgatagaaagagaaactaagatttttgaagaagctttcacattcagtgagaatggcttcatatcgccagagaatcttggttgcttagaagcagtagtatcattaataaaattgttgaaaactaatgagtggtccacagttatagataaatgtattcatatatgtttaataaagaatggtatggatcacatgtaccattcatttgatgtccctaaatgttttatggggaatcctatcactagagacatgaattggatgatgtttagagaattcatcaatagtttaccagggacagatataccaccatggaatgtcatgacagagaacttcaaaaagaaatgtattgctctgataaactctaagttagaaacacagagagatttctcagaattcactaaactgatgaaaaaggaaggtgggaggagtaatatagaatttgattag

SEQ ID NO: 11198 - DNA, 48 bp, unidentified; identical to SEQ ID NO: 2019
  source 1..48: mol_type = other DNA
  misc_feature 1..48: note = Synthetic

SEQ ID NO: 11199 - DNA, 6747 bp, unidentified
  source 1..6747: mol_type = other DNA
  misc_feature 1..6747: note = Synthetic
atggctattttgcttgaagatgtcatcagacaatattctgctaggatcaggaattgtaataatcctgagattggtcgtgatatcctagcagagataactatgactagacacaactattttgctcaacgtttttgtgaggctataggaatagaataccggaatgatgtgccagctgctgatattgtcttagagatgatgccaggtttagatttaacccgtatcaggattccaaatataactcctgataattattatcgtgacggaaccaaaatttacattatagattttaaggtatcggtaagtgatgaatcagctcaacatacatacaaaaagtacgattccctctttggagacgtttttaaccaactgaatatagaatatgaagttgtcataattcgaatgaacccaagcgacatgcatctacacatctctagtgataacttttcagctttgttcccaaatatcactcttaatgtaacttttgattggtactttagacttagagatgatctattccaacaatttagagacaacgaagaatttatggaattaatagctcatggagagtttactcctacaataccttgggttaatgagacaaccccagaattatttgaccatgaagttttccatgattttattgcatccatgcctctagaaaatagagaggatttctattatgctttaaatcataatgcattccaatcagataaatggaatgatttactgcatgtgataatgcggaaatatggtgacaaatatagagactttattaaggcaaatgctagacgcatatttttaaccgacagtaattataatagacctacgacagaagcaattctacaaggctggtctgaaatgatagagcgtgttcacgatcaaagagaagtgatagatgatttatcgaaacaaaaaccaagcatacacttcatatggggtcctaattcaaggaatgaatccaatgagaataatactaagataataaggttatcaaaaaaattacagcaaatcaaagagaaggatagttttagtttggcttttaaaaacatagggttgttaatggactttagtgaagacatagacaaatatgaagcattttgtgctaaattgaagtcagatgctagatctagtttaaaacctaaaagtaagaaaattgacccaattaagataggaaactcaactatattatgggaacaacagtttaagatggatacagatacaatacctaaagagataagattgaaattcttgaaagaattttgcggtattggaaaccataaacagtttaaagatagaatgatggaggatctagatttaggaaaaccaaaaattcttaattttgaaaatcaagatataaaaaatcaagcctatgccatgatgcagaatacggcatactttatgtctaaagatagtggattagcgaaggtcggaaatattctggaagaatttaaagataaaattataaatgctaatgaggatacatggaaccttataagcgaaattgcaaaaacacggtactggcaaagcattaatgatttctctatattaatcaagaatatactagctgtttctcaatacaacaagcacaatacatttagaattgtatgtactgcaaataacaacttcttcggaatagtttacccatccaccagtatacagtctaaaagatctactatagtattctcaacaatagtactacatgaatcggagaatgaaattttaaaatgtggtgcattgtacaaaacatataggatgaagaatgggtttctatctatatcaaaagctataaggttagataaagaaagatgtcagcgtctagtgatatcaccgggattattcatgttaacagcattgcttttcaaaggtgaatgtgaggtgaatttaacagatgttatgaattttgctttcttcacatctctgtctataactaaaagtatgctgtcactgacagaaccttcaagatatatgataatgaattcattggctttgtcaagccatgtgcgagaatatatagctgaaaaattctcaccatataccaagacattattttcagtatatatgactgacctaattaaaagaggttgcatgtctgctaatgatcagaggcagcagatatcaatcaaagatgtgttcttaaatgaatttgagataacacaaaaaggtgtaacaaatgatagaaatctgcaatcaatctggtttcctggtaaggtgaaccttaaggaatacataaatcaaatatatatgccattttatttcaatgcaaaagggttgcataataaacatcatgttatgattgatctagcaaaaacagtacttgaaatagagctagatcaacgggttaatcttcctacaccatgggggacgaatctaatgaagcaatctgtcaatttggatgttttagtattttctattgcgaaaatgttaaatctggacacatctagacataaccatttacgcagcagagttgaaaacagaaataatttcaagaggtcactagcaagtatctctacattcacaagttctaaatcttgcattaaagtaggagatttcaaggagcataaagaaaggaatgcccttcatatgaaaaaattacaagggaaagaagctaaaaagactagaatagcaaatactgaattcgtgtctgacaacgatcgggacttagagattgttcatagcacttatctagatctaagaaaatcagtacctaattacacagattatatgtcaacaaaagtgttcgacagattatatgaaaggttcaagaatcatgattttgaagataagcctgcaattgaagtaattatggacgtcatgaggaaccataaagattttaaattttgcttttttaataaagggcaaaagacagccaaagatagggaaatatttgttggtgaactagaagcaaagctatgcttatatggagtagaaaggattgcaaaagaaagatgcaaattgaaccctgatgaaatgatatctgaaccaggggatgggaaactaaagaaattagaaataaatggagaatcagaaatacgatacttaattgatgctacaaaaaacttatctagagagcaatcccagattgacgaattgttagacactcctaaaggtataaaattagagataaatgctgacatgtcaaaatggagtgcccaggatgttttttataaatatttctggttaattgcattagatcctatactatacccatttgaaaaacaaaggattatatatttcttttgtaattatatgaataaagaattaattctccctgatgagatgatgtgctcgttgttagatcaaaaagcacaaagagataatgatttgatccgccaaatgactaatggtttcactacaaatactgtcaatataagaagaaattggctccagggaaacttaaattatacatctagctacattcatagttgttccatgatggtatttaaagacatactaaaagaggtttctgctctattggaaggcaggtgcaacgtaaatagcatggtccattcagatgacaatcaaacatcagtcataatggttcaagataaactgaataatgatattatcactaaatttgtatgtgatacttttgagagatgttgtctatcatttggcaatcaagcaaatatgaaaaaaacatatattactaaccatataaaagaatttgttagtttattcaatatatacggagaaccttactcagtatatggcagattcttactacctgcagtaggagattgtgcatatatagggccatatgaagatatggcaagcagactttcagcaacacaaacagctatcaaacatggttgccctccaagtttagcatgggtaagcatagcgttaaaccattggataaccttcaatacgtataatatgttacctgggcagataaatgacccaacaaagatattccatttcgaaaggaaagagcttccaatagagctatgtgggcttttacaggctgatttgtcaaccatagcattagtagggctggaatcaggaaatatctcttttctgacctccttattaaaaaagatgtctcctccacagttggtaaaagagtcagtacaagcacaatgccaaaatatagatcagtgggatttagaaaatttatctgaaagcgagatgatgagactaaaaatattgcgatatgttgttttggattctgaagtgagagaagacagtactatgggggaaacaagtgacatgcgcagtcgatcgctaattaccccaagaaagttcaccactcctgcatcattagaacgtctagtctcgtataaagacttccaagaaatattggcagatccattacgcacagaagatttactagacactatgataaacaatcccgaattactagtgactaagggtgaaaattcagaagaatttatgacaacaattctatatagatataactcaaagaaatttaaggaatctttgtctatacaaagcccaactcaactctttatagaacaaatattatttgccaataaaccggtcattgactatactggtattcaagatagatatttaagtatattagatgttcctaaaatccaggaaaacgaggggattataggaaggaaaacaattccagaaacatttgtggctataaagcgagatttatcattgatgactatagataataaagatataaaactagtctactcattttgcatacttaatgatcctttaaatactacagcatgcaatgcaatgctattgtctcaagttcaatccttaatggatagaacaagcttgtctgctgtaactatgccagagtttagaaatatgaaactaatcagatattccccagcattggtattaagatcatatatacataacaatctgactatcggcggagctaatgaaaacgcaatgaagagagacttattccatcttcaagaatttataaatcaaactaagataagggagagattagaacggcgtatagctgataatgaggaaattaaaggtgaaagggatcgaatgtttgaaataaaagagataacaaagttttatcaagcatgttatgattacataaaatcaacagagcatcgtgtaaaggtgtttattctccctatgaaaacatacacagcatttgatttctgcgcaacaatacatggaaatcttatgaaagataaaggctggtttgctgtccattacctgaagcaaattatatcagggactgcaaaagctagtgtaagccaggcaccagctagtgagatgattgtagttggtgaatgctttcgtcttatagcacatttttgcgatacatttattgatgtgggatcaagattgcaattcttatataacataattgacaatttctcttacaagaatatccctgtaaaagccttacttgatacaatgatgaggacaaacaaaaggcaacatttcttacccatcttgcattggttaaatgaattgacacagcatgacatagataaatatgatgcatataaggcaaatgaacgtgttatttggaatgattggcaagtgaatagagacatgaatactggaaatatagatcttacgataaagggttatcagagaactattaggatcataggagaagatgattttctgagaataggtgaattagaagtcttgaaggatgatactactccgattgaaacacatggtaggaagctcttaaatgcacgacatggattaaaatttgaaaaaatgcagcggtataaagttatcgaaccaaatacttactacatttgctggcagaataggacaaggttttcatatacttatcaattactattatccaatatcatagaagcacgaaatgctcaaactgtatctgtcactggtggaaaattcaacgagttagtcccggtatgcccagtaataataagcaaggttgactcagatgaaaaaatgaatttaaggcagatcaaattcttgaatatggattgctcattaactcgattgcaattgaatcaaaatgaatttgcaattgtcaaaagatgccatttttccaaaatggtattcttcaatgggcctgaaatgatagtaggaaatatgaacattacaaacttaattcaaacccccagcttattaaccacaaattatatatcattgtctcaaatgcctatgatgactctaacaagaatatttaactgcaatggagaggatagtgaagttgatgaatttgaattcctatctgatgaaatcttagaagagacagagacagctacaatcaatgcacaaccaatgtttaatattcaatatgagacaaaatcaaaaaaaggttttacatacaaaaaagcactacaggaagcactatctagaggaattcaagagattgaagaaaattttgacttttgcaaggacggattttactctcctaaaaatattgcgataatcgcattattagttaatgttattgatcgtcttcatacaaatgaatggtctaccattattaggaagtcctttcatatgtgtttcttcaataatggaaaagatcggttgttccatatgatgaatatcccaaagacttttataaagaatccaattggagagattccaaactgggaaaaaatcagaacatttatagttcaactagaaactgctttcccaggcaataattggcatcaaatgtttgaacactttaaagaaaagtgcatcttattgattgatagggaaataaaaatggaagggatgagttggggagagatgcttgatgaattagatgattacaaagatacagaaatgttccattttagttaa

SEQ ID NO: 11200 - DNA, 72 bp, unidentified; identical to SEQ ID NO: 2021
  source 1..72: mol_type = other DNA
  misc_feature 1..72: note = Synthetic

SEQ ID NO: 11201 - DNA, 6717 bp, unidentified
  misc_feature 1..6717: note = Synthetic
  source 1..6717: mol_type = other DNA
atggaggaccaagcttatgatcaatacctgcacagaatccaagcagctagaacagctacagttgctaaagacatcagtgctgatatccttgaggcaaggcatgactattttggtcgggagctttgtaactctttaggaattgaatacaaaaataatgttcttttggatgaaatcatccttgatgttgtgccaggtgttaacttgttaaactataacatacccaatgtgacaccagacaactatatatgggatggtcacttcttgataattcttgattacaaagtctcagttgggaatgatagtagtgaaatcacatataagaaatacaccagtttgattctcccagtgatgtctgaattgggtatagatacagaaatagctattattagggcaaatcctgttacatatcagatatctataattggagaagaattcaaacaaagattcccaaatatacctatacaattagattttggtaggttctttgaactgagaaaaatgttgctggacaagtttgctgatgatgaggaatttctgatgatgatagcacatggagatttcactttgacagcaccatggtgcacatctgacacccctgagctagaggagcatgaaatatttcaagagtttattaattccatgccaccaagatttgtatcacttttcaaagaagcagtcaattttagtgcatactcttcagaaagatggaatacattcttatatagagccagagcagagacagaggtggattataatcaatttctatcagacaaggcacataagattttcatgctagaaggagactatatgagaccaacacaagctgaaatcgataagggttgggagctaatgagtcagagagtttacacagagagagaaattataacagatgtgacaaaacagaagccttctatccattttatttgggtaaagaatgcagatagaaagctaataggttcaacagcaaaattaatatacctatctaatagtttacaaagtatcactgaacagtcaacttggacagatgcactaaaagcaataggaaagagtatggatattgatggtaaagtagggcaatatgaaaccttatgtgctgaaagaaaaatgattgccaggtcaactggcaaaaaggtagataacaagagattggaagcggttaagattggcaatgcacttgtgttatgggaacaacaattcatcttagcaaacgacttatttaaaaatcaagaaaggcagaagttcatgaaaaacttctttggcataggaaagcataagagttttaaagataagacatctagcgacattgaaacggataagcctaaaatcttagatttcaataatactatagtcctgatggctgcaagaacaatggttaataaaaacaaagctctgttagctaaggataacacattgcaagacctacatcctattatcatgcagtatgcttcagaaataaaagaggcatctaaagacacatttgatgcgctactaaaaatttccaaaacttgcttctggcaatgtatagtagatgtttcaacaataatgaggaatatattagctgtgtcacaatataatagacataatacatttagagttgcaatgtgtgctaatgactctgtttatgcattagtatttccttcatctgacataaaaacaaagagagcaacagtagtctttagtatagtttgcatgcacaaggaaaaaaacgacctgatggatgcaggtgcattattcactactttagaatgtaaaaataaagaatatatatctataagtaaagcaattagattagataaagagaggtgccaaaggattgtatcatcacctgggcttttcatattaagttctatgttactttataataataatccagaagtaaatttagtagacgttctaaattttacattctatactagcttgtctataacaaaaagtatgctttcgctgactgagccatctagatatatgataatgaattcgcttgccatttcaagccacgttagagattatatagctgagaaattctctccttacaccaaaacacttttcagtgtatacatggtcaatttgataaagagaggatgcgcatccgcaaatgagcaatcatcgaagatccagctgagaaatatatatctttcagattatgatattacacaaaaaggtgttaatgatggtaggaacttagactctatttggttccctggtaaagttaatttaaaagaatatataaaccaaatatatctaccattttacttcaatgcaaaaggccttcatgagaaacatcacgtaatgattgacttagcaaagactgttctggaaatagagatgaaccaaagaagtgataatttaggtatatggtctaaagcagaaaagaaacaacatgtcaatctaccaatattaatacactctatagcaaaatctttgatattggatacatcaagacacaatcacttgcgaaaccgtgtagaaagtagaaataattttagaagaagcatcacaacaataagcacttttacaagctctaaatcttgtataaagattggtgatttcagagaaattaaagataaagaaacagaaaaatcaaaaaaatcaactgagaaatttgataaaaagttcagactttcaaatccattattcttagaagatgaggaagccaatcttgaagttcaacattgcaattatagggctctgatacaaaaaattcctaattataaagactatatttcagtaaaggtgtttgatcgtctatatgagttgctaaaaaatggagtcttaacagacaaacctttcattgaattagctatggaaatgatgaagaatcacaaggaattctctttcacattctttaataagggccaaaagacagctaaagatagagagatattcgttggagaatttgaagctaaaatgtgtatgtatgtagtggagagaatatcaaaagagagatgtaagctgaacacggacgagatgataagtgaaccaggtgattcaaaattgaaaatattggaaaagaaagcagaagaggaaatccgctatattgttgagagaacaaaagacagtataattaaaggagacccatcaaaagcattgaaactggaaataaatgcagacatgtcaaaatggagtgctcaagatgtattttacaaatatttttggctgatagcaatggaccctatactttatccagcagaaaaaacacgtattctgtattttatgtgcaattatatgcaaaaactattaatacttccagatgatttaattgcaaatatcttagatcagaaaagaccttataatgatgatttgatccttgagatgactaatggtctaaattataattatgtccaaattaaaagaaactggctccagggcaatttcaattacatttctagttatgtgcatagttgtgcaatgcttgtttacaaagatatcctcaaagaatgtatgaagttactagacggagactgcttgattaactcaatggtgcattcagatgacaatcaaacatcgttagcaattatccaaaataaagtctctgatcaaatagtaattcaatatgcagcaaacacatttgagtctgtttgtttgacatttggatgtcaggcaaacatgaaaaaaacatatattactcatacatgcaaagaatttgtctcacttttcaatttacatggagaaccactatctgtctttggcagatttttattgcctagtgtaggtgattgtgcttacattgggccatatgaagatttagccagccgtttatctgcagcacaacagagcttaaagcatgggtgccctccaagtctagtttggttagcaataagctgtagccactggataacatttttcacttacaacatgctggatgatcaaattaatgcaccacagcagcatttgccattcaataatcggaaggaaataccagttgagttaaatgggtacttgaatgcaccattatatttgatagcattagtcggcttggaagctgggaacttatggtttttaataaatatattgaaaaaattggtgccattggataaacagaaagaaactatacaaagccaatgtttacacttatgcaattcaattgataagctgacagaatcagaaaagttcaaattaaaaatattgagatatcttactcttgacactgagatgtcagttgataacaacatgggagaaacaagtgatatgcgaagtagatcactcttaacgcctcgcaaatttacaacattgggatccttaaataaactagtttcctataatgactttagatcttctttagacgaccagagatttactgataatttgaacttcatgcttaataacccagaattgttagttactaaaggtgaaaataaagagcagttcatgcaatctgtccttttcagatataattcaaaaagatttaaagaaagcctttccatccaaaacccagcacaattatttattgagcagatactgttttcccataaaccaatcatagattacagcagtatatttgataaattaacctcacttgcagaagcggatatcattgaagagctaccagagatcattggaagagttacatttcctcaggcataccagatgataaatagagatattggccaactacctttagatatagatgatattaagttaatattccggtattgtatattgaatgatccactaatgatcacagctgcaaacacttccttattatgtgttaaaggaacaccacaagatagaactggcctcagtgcaagtcaaatgcctgaatttagaaatatgaaacttattcaccattcccctgctctagttcttaaggcgtttagcaaagggacatcagatattcctggggctgatcctatagaattggaaaaagatcttcatcacttaaatgaatttgttgaaacaacagcaattaaagaaaagattttgcacaacatagacaatcctcctaagcatttaatagggaatgaaatcctaatttatagaatcagagagatgaccaaactctatcaggtttgttatgattatgttaaatctacagagcataaggttaaaatatttatattaccaatgaaatcttatactgcaattgacttttgcacattgattcagggcaacactatctctgataataaatggtacacaatgcattatttaaaacagattgctagcggatctatcaaagggaatatagtaacaactagtacaagcgagcaaataatagcaaatgagtgttttagagtgctctgccactttgctgattcctttgtggaagaggcaagcagattgagctttattaatgaagttcttgataatttcacatataaaaacataagtgttaactccttatttaacactctattagccagcactacaaggttagactttattcctctattatttagactcaaagttttaactcagacagatttaaatagatttgatgcccttaaaactaatgaaagagtttcatggaataactggcagacaaaccgttccttaaattcaggtctgattgatttgacaatatccggctatttaagatcaataagggttgtgggggaagataataaactcaaaattgctgaactaacaatacctaatttctatccaaatacagtgttccatgcagggaacaaacttctaaattctagacatggattaaaatttgaatacatggaggaaattgttctagatgaaaaatataactattatataacataccaaaaaaagagggctcatatttatacatatcaagtatctacaatagaacatattttgagaaggaataatgaaggattacaatccagaggccctaggtataacaaaatggttcctgtctgtccagttgttttaagtgtcagggatgaattatttagaatgtctctagaaaatgtttttagtttaaacatgacaaactttagcatgtctagattatttgtttcacctgacgaagttgctactgtaaagaaagctcatatgtccaaaatgatgttcttttccgggccaacaataaaagcaggaattattaatttaacatctttaatgaggacccaagagcttttaacattgaattatgataatctatgcaaatctagcattgtcccgttttgtagaatattagaatgtaatggcgatgagcaaggagaactaatatttctttcagatgaagtcatggatttcacaatttctgaggagatagaatctatgccattatttacaataaggtatcagaaaagaggtactgaaattatgacttataaaaatgctataatgaagttagtttcagcaggggtagatgagatcaaagaagtttttgatttttcaaaacaagggttctattcaaagaaaaacttaggtataataaatacaatttgttctataataaatatactagagacaaatgagtggtccacaattctatacaattccttccatatagcaatgttattagagtctatggatcgagaattccatatgttcacattacccgaagcctttttcataaatgtggcaggtggtgttgttaattggactaagctgctaaaatttataaagtcattgccagtgatagagcaagagccttggtcaatgatgatgtcaagatttgtagaaaaaactgtgtatttgatagaaagagaaatgaacaaagatgttgacttcactgatttcttagatgagttagaatttagttcaggaaagtctctatttacctttttctga

SEQ ID NO: 11202 - DNA, 6732 bp, unidentified
  source 1..6732: mol_type = other DNA
  misc_feature 1..6732: note = Synthetic
atactaaatatccttcttgagaatccaaagaagaggatggatcaggcattatatcaacaatttgtgcgtcggattgaaaacgccaaggatgccacagtggcaaaggatatagatgttgatctgctgattgcaaggcatgattactttggcagggaactgtgtagatcattagggatacagtacaggaatgatgttcctctagttgacatcataattgagattatgccaactgtagaccctatgtcattagaaataccaaatatcactccagacaattacattattatcaatggcacactagtactaatagattataaagtgtctgtgagtgatgaatctactataatgaccctagagaaatatagaagatgcatggaaattgttagagatcaggtagaactagaatatgagattgcagttattagaatcaatcccgttagcaaagcgataaccatatcaagtgacttatttaagagccaatacccagacctcaccttagatgtcaattttcagcaatttttcgatttgaaaacatacctatttgaaaaattccgtgatgatgaagaattcatgctaaaagtgtcgcacggtgattttacattgacagcaccatggtgttatgaagacacaaatcttgaagaccacaaggaatatttgctattcactaatagcctggatcaagagtacagagaattatttcttgaagcacttagttttgatgcttatggttcggagagatggaactatatgttacacaaagtcaaggataagacacaagcagcatataaggattatacacgaaaaatgtcaagagatgttttcctaatgaccgggaactatagtaaaccttcaagggatgaaattgataaaggctggtcagagatggtagaacgtataaaggaggagaggatattagtaaccgacaagaataaacagaagccatcagttcacatgatatggtcaccagcatcaaacagggaaatacagggttccactagaaaattggtctttctttctaattgcttaatgggtatcaaggaaaatactcaactgtcagatgtgatgcggtctattgggaagtctatggatatagatgggaaaattagcgagtatgaatctatttgccaaaacaaaaaactgatagcgagaagcacaattggtcaggttaaaaacaagaaaataacaattgataaagttgggaatgcaatggttttatgggaacaacaatttatactgaataacgaccacttcaaaaagaacaataggagagacttcttaaagtctttcctagggattggtggacataaagtattttcagataagacttcagcagatattgacctcaataaacctaaaatgttagattttacaaataaaaggattattgaagaatcaattttcttcgtgaatgaaataggagacttgttgtctaaaccctcgcctataaaattgagtgagcaaatgtttgattacttcttagacaaggtgtcatcctctaatccagaaacactgaccatcttcaacaaaataataaatacaaattattggagatgcattatggatattagcaatttaatgaagaatatattgtctgtctcccaatataataggcacaatacatttagaatagcattctgtgcaaatgactctctttatgcaattgtttatccttctgcagatattaaaacaaagagggcaacagttgtattccaaactatcacaatacataaaaacatgaaagatgttatggaccctgggtgtctggctgcaacatttaaaacaatagatggaaattacataagcctaagcaaaggaatacgattagacaaagaaagatgtcagaggattattgtttcccctggtctattcttaataagcagcattttgatgtataataataatgaaaatttaaaattagaagatgtccttaaattttgctttttcacttccttatctattacaaagagcatgctatctctaactgaaccatcccgatatatgattatgaattcactagcaatatctagccaagtaaggcaatacatctctgaaaaatttagtccatacaccaaaacattatttagtgtttacatgactaaccttatcaaaaaaggatgtgaatctgcaaacgaccagtcaaataaaatagaattaaaaaatatatttatgagtgattatgaactaacacagaagggggtaagcgaggaaaggcaattacaatccatttggtttagaggattcgtaagtctgaaggaatatttaaatcagatctatttaccattttactttaattcaaaaggactacatgaaaaacatcatgttatgattgatttattaaaaacagttgctgaaatagaaagagatcaaagagaatccctcacacgcttgtggtcagatgatttcttgaaacagcatgtcaacctacctgttttcctacactctctatcaaagaatctaatccttgacacttcaaggcataatcatcttaggaacaaagttgaagatagaaataattttaagagaagtataacgacaataagcacattcaccagttccaaggcttgtatcaaagtaggtgactttacagatataaagaaaaaggcaaaaaaacaagaaattaaggacacagaaaatgcccaaaaaaaagtatttgctgcaaaccctttattttttgatgatgagtctcaaaaccaaaaaattaatcatgcaaattatgaaactatcaagcaatgtgtaccagactatacggatattgtatctgtaaaagtcttcgatagactttatgaattaataaagacaaaggaattagaagagaaaccttttataaatattgctatggatatgatgctgaaacataccaatcatgtattttcatttttcaataaggggcaaaagacattcaaagatagggagatatttgtaggacaatttgaaacaaaaatgtgtatgtatgttatcgaaaggatcgcaaaggagagatgtaaactgaactcagatgagatgatcagtgaaccaggtgataacaaattaagattgcttgaacagaagtcggagggcgatatcagattcatgatcgaaaaatcaaggaatactgagaatcctttaccatcgctaaaactagaaattaatgctgatatgtctaaatggagtgcccaagacatgttctttaaatacttttggctaattgcactagatccaattctctatcctaaagaaaagaaaagaattctattcttcttgtgcaattacctaaataaaaaattagttatcccagatgagttaatgtgcaccttggtggaccaaaaaattgtcagagaaaatgatttaattcatgagatgactaactacctccagacgaattcaattcagataaggatgaactggttacaagggaatttcaactatatctcaagctacatacatacatgtgcaatgctaacatttcgtgacgtggtgaaagaaacagcttctatattagaaggacatgcaaacgctacctctatggtacactcagatgataatcaaacatccgtcatatattttcaagacaaactcccaaaagaatcattgatagaacatacaatgagggtattcgaacgtgtctgtcttagctttggatgtcaagctaatatgaagaaaacatacttaacccatagtattaaagaatttgtttcactattcaatctacacggagaaccattctctgtttacggtagattcttgctgcctagtgttggtgattgtgcatatattggtccatatgaggatcttgctagtaggttatcagcagcaatcactagtatcaagcatggttgcccaccaagttacgcttggatagcaatagcatgtagccactggataacatactcaaactataatatgttacctggtcagtccaatgatccagaagcatatttggggatagacagagaggaaatacctatagagttaggtggtttaattagtgcaccactatacatgctatccttgtgtgggatagaggcagaaaatatactattcctcatgaaaatgctaaaaaaactagtacctatagaattactcaaagaatcagttattaatcaagtaccccatataaataaattaccggaattaagtagatctgaagaatttagactaaagttgttaagatatttcgttttggatgcaacaataagctcagaatcaaattttggagaaacaagtgacatgagatcccgtgctattctgacaccaaggaaattcacaacactaggttcccttaggaagttgatttcttataatgattatcgtaattctgtggatgataactctataatcgagaacttaaaatatatgattgacaatcctgctttattggtcactaaaggtgagaattaccaagattatatagaatcaatcaggtatagatataattccaagagatttaaggagagtctatctattcaaaatccagcacaattgtttattgaacaagtgctattttctaaaaagcccgtgatagattataacagtataaatgaaaagtacgggccactacttgactctgatataatagataacgcagatcaaattatagggaggttgacttaccctgaagcatttatcaaactatatgctgacacaaagcaactgccattattaatagacgacttgcatgtagtatacaaccattgtatatgtaatgatcccttgcttgttacttgtgcaaatagttacaatcttgcagtccaaggtgttagagtagagagatcctcgaattcagcatgttctatgccggaatttaggaatatgaaattgatacaccattcacctgcattagtccttaaagcatactctaaaggtattgaatctgttccaactgccaatcatgaagaaatcaccagagacctttaccatctagataatttcctcatggaatcagggatcttgaataagatcacagctaccctttcatctttaactgatgataattttgagacatatattaatagattacgggaattaacaaggctatatcaaatatcatatagttacatcaaatctacagaacataaagtaaagatattcatactacctaagagagcacacacaaatttagaattctgttcattaatacaaggcaatcttgtagaagataagaaatggttgactatgcattacctcaaacctatatctagtgggaatgccaaaggaaatatagttagatcacaaaattcagaaattgggatagcttgtgaagcatttagagtgttagcatttttcactgattcttttattagtgaagagcacagggttggtttcattaaaaaagtaacggaagaccatacatataagggtgttagattagattacttatatcacttaataaaggagcctagccaaaggcttgattatttaccattacttttcaaaatgggggatatcacacaatatgatttaaataagtttgatgccatgatgacgaatgaaagaatttcatggaatgattggcagacatcaagaaaattgaatgtgggatcaatcgacttgacaataagcggatatttaagaagtatcagaattgttgggattgacaatacacttaaaatggctgagatgtctgtcccgaattttcatccatccactatacatcatgctggatttaaattattgaattgtaaacatggcttaaggtttgaattcatgcaagaggttatattagatgataaaataaattattatatcacataccagaaaaagagaggcaatgtctataactaccaagtctcatcaacaactaatatattaacaagattaaaagattttaatgagagaccaaaaacaactcaaagactaattccagtttgcccagtgatacttgcagttaaagaaactagctatagattaaccatggaaaatataacaatgctgaatatgaataatcagtctatttcaagactatacacatttccagaagaatcatgttacatacggagaggccatctatcaaaaatgatcttctttgatggtccagacttaacaattggcaatataaatataaccaaactgatgcaaacccaggagatgctaaccctaaaccttaataatatcaagtctcttaatctaataccattctgcaatatatttagctgcaatggtgagaagaatgatgagattgtctttagtgatacagagattgaaattctagaaagtgaggaattagaatcagtaccattattccattacacttatcaaaagaagcacgggaaaaggttgaactacagagactccatatatgaatcattagataatagcttaaaagaattcaaaaagaattttacgtttgttggaatcaacttttactccaaggagaatctgggaattatatcagtattatcaactactatcaaacaattaggaacaaatgagtggtcaacacatattgacaatgcaatacatatagcaatgtaccgaaaaggttttgatagtgtctatcatctttttaacttcccaaaagcactttatatcaactccaatcctgctctaggcagactagattggatcaaattgaatgcttttatattaaatttaaacaatgagatggaagaaccatggctatcaatgttcaacagatttaaagaaaaagcctctgagttcatattaggaaagtctaaagaggatactgacaccacttcatttgttgaaatgtttaaattggatattggtggtgatattaatgatattgaagattaa

SEQ ID NO: 11203 - DNA, 27 bp, unidentified
  source 1..27: mol_type = other DNA
  misc_feature 1..27: note = Synthetic
gtgtttgtgaggattaacaacaattaa

SEQ ID NO: 11204 - DNA, 27 bp, unidentified
  source 1..27: mol_type = other DNA
  misc_feature 1..27: note = Synthetic
gtgtttgtgaggattaacaacaattaa

SEQ ID NO: 11205 - DNA, 27 bp, unidentified
  source 1..27: mol_type = other DNA
  misc_feature 1..27: note = Synthetic
gtgtttgtgaggattaacaacaattaa

SEQ ID NO: 11206 - DNA, 27 bp, unidentified
  source 1..27: mol_type = other DNA
  misc_feature 1..27: note = Synthetic
attaacacagtgcgagctgtttcttag

SEQ ID NO: 11207 - DNA, 27 bp, unidentified
  misc_feature 1..27: note = Synthetic
  source 1..27: mol_type = other DNA
attaacacagtgcgagctgtttcttag

SEQ ID NO: 11208 - DNA, 27 bp, unidentified
  misc_feature 1..27: note = Synthetic
  source 1..27: mol_type = other DNA
attaacacagtgcgagctgtttcttag

SEQ ID NO: 11209 - DNA, 10302 bp, unidentified
  source 1..10302: mol_type = other DNA
  misc_feature 1..10302: note = Synthetic
atgtctaagaaaccaggagggcccggcaagagccgggctgtcaatatgctaaaacgcggaatgccccgcgtgttgtccttgattggactgaagagggctatgttgagcctgatcgacggcaaggggccaatacgatttgtgttggctctcttggcgttcttcaggttcacagcaattgctccgacccgagcagtgctggatcgatggagaggtgtgaacaaacaaacagcgatgaaacaccttctgagttttaagaaggaactagggaccttgaccagtgctatcaatcggcggagctcaaaacaaaagaaaagaggaggaaagaccggaattgcagtcatgattggcctgatcgccagcgtaggagcagttaccctctctaacttccaagggaaggtgatgatgacggtaaatgctactgacgtcacagatgtcatcacgattccaacagctgctggaaagaacctatgcattgtcagagcaatggatgtgggatacatgtgcgatgatactatcacttatgaatgcccagtactgtcggctggtaatgatccagaagacatcgactgttggtgcacaaagtcagcagtctacgtcaggtatggaagatgcaccaagacacgccactcaagacgcagtcggaggtcactgacagtgcagacacacggagaaagcactctagcgaacaagaagggggcttggatggacagcaccaaggccacaaggtatttggtaaaaacagaatcatggatcttgaggaaccctggatatgccctggtggcagccgtcattggttggatgcttgggagcaacaccatgcagagagttgtgtttgtcgtgctattgcttttggtggccccagcttacagcttcaactgccttggaatgagcaacagagacttcttggaaggagtgtctggagcaacatgggtggatttggttctcgaaggcgacagctgcgtgactatcatgtctaaggacaagcctaccatcgatgtgaagatgatgaatatggaggcggccaacctggcagaggtccgcagttattgctatttggctaccgtcagcgatctctccaccaaagctgcgtgcccgaccatgggagaagctcacaatgacaaacgtgctgacccagcttttgtgtgcagacaaggagtggtggacaggggctggggcaacggctgcggactatttggcaaaggaagcattgacacatgcgccaaatttgcctgctctaccaaggcaataggaagaaccatcttgaaagagaatatcaagtacgaagtggccatttttgtccatggaccaactactgtggagtcgcacggaaactactccacacaggttggagccactcaggcagggagactcagcatcactcctgcggcgccttcatacacactaaagcttggagaatatggagaggtgacagtggactgtgaaccacggtcagggattgacaccaatgcatactacgtgatgactgttggaacaaagacgttcttggtccatcgtgagtggttcatggacctcaacctcccttggagcagtgctggaagtactgtgtggaggaacagagagacgttaatggagtttgaggaaccacacgccacgaagcagtctgtgatagcattgggctcacaagagggagctctgcatcaagctttggctggagccattcctgtggaattttcaagcaacactgtcaagttgacgtcgggtcatttgaagtgtagagtgaagatggaaaaattgcagttgaagggaacaacctatggcgtctgttcaaaggctttcaagtttcttgggactcccgcagacacaggtcacggcactgtggtgttggaattgcagtacactggcacggatggaccttgcaaagttcctatctcgtcagtggcttcattgaacgacctaacgccagtgggcagattggtcactgtcaacccttttgtttcagtggccacggccaacgctaaggtcctgattgaattggaaccaccctttggagactcatacatagtggtgggcagaggagaacaacagatcaatcaccattggcacaagtctggaagcagcattggcaaagcctttacaaccaccctcaaaggagcgcagagactagccgctctaggagacacagcttgggactttggatcagttggaggggtgttcacctcagttgggaaggctgtccatcaagtgttcggaggagcattccgctcactgttcggaggcatgtcctggataacgcaaggattgctgggggctctcctgttgtggatgggcatcaatgctcgtgataggtccatagctctcacgtttctcgcagttggaggagttctgctcttcctctccgtgaacgtgcacgctgacactgggtgtgccatagacatcagccggcaagagctgagatgtggaagtggagtgttcatacacaatgatgtggaggcttggatggaccggtacaagtattaccctgaaacgccacaaggcctagccaagatcattcagaaagctcataaggaaggagtgtgcggtctacgatcagtttccagactggagcatcaaatgtgggaagcagtgaaggacgagctgaacactcttttgaaggagaatggtgtggaccttagtgtcgtggttgagaaacaggagggaatgtacaagtcagcacctaaacgcctcaccgccaccacggaaaaattggaaattggctggaaggcctggggaaagagtattttatttgcaccagaactcgccaacaacacctttgtggttgatggtccggagaccaaggaatgtccgactcagaatcgcgcttggaatagcttagaagtggaggattttggatttggtctcaccagcactcggatgttcctgaaggtcagagagagcaacacaactgaatgtgactcgaagatcattggaacggctgtcaagaacaacttggcgatccacagtgacctgtcctattggattgaaagcaggctcaatgatacgtggaagcttgaaagggcagttctgggtgaagtcaaatcatgtacgtggcctgagacgcataccttgtggggcgatggaatccttgagagtgacttgataataccagtcacactggcgggaccacgaagcaatcacaatcggagacctgggtacaagacacaaaaccagggcccatgggacgaaggccgggtagagattgacttcgattactgcccaggaactacggtcaccctgagtgagagctgcggacaccgtggacctgccactcgcaccaccacagagagcggaaagttgataacagattggtgctgcaggagctgcaccttaccaccactgcgctaccaaactgacagcggctgttggtatggtatggagatcagaccacagagacatgatgaaaagaccctcgtgcagtcacaagtgaatgcttataatgctgatatgattgacccttttcagttgggccttctggtcgtgttcttggccacccaggaggtccttcgcaagaggtggacagccaagatcagcatgccagctatactgattgctctgctagtcctggtgtttgggggcattacttacactgatgtgttacgctatgtcatcttggtgggggcagctttcgcagaatctaattcgggaggagacgtggtacacttggcgctcatggcgaccttcaagatacaaccagtgtttatggtggcatcgtttctcaaagcgagatggaccaaccaggagaacattttgttgatgttggcggctgttttctttcaaatggcttatcacgatgcccgccaaattctgctctgggagatccctgatgtgttgaattcactggcggtagcttggatgatactgagagccataacattcacaacgacatcaaacgtggttgttccgctgctagccctgctaacacccgggctgagatgcttgaatctggatgtgtacaggatactgctgttgatggtcggaataggcagcttgatcagggagaagaggagtgcagccgcaaaaaagaaaggagcaagtctgctatgcttggctctagcctcaacaggacttttcaaccccatgatccttgctgctggactgattgcatgtgatcccaaccgtaaacgcggatggcccgcaactgaagtgatgacagctgtcggcctaatgtttgccatcgtcggagggctggcagagcttgacattgactccatggccattccaatgactatcgcggggctcatgtttgctgctttcgtgatttctgggaaatcaacagatatgtggattgagagaacggcggacatttcctgggaaagtgatgcagaaattacaggctcgagcgaaagagttgatgtgcggcttgatgatgatggaaacttccagctcatgaatgatccaggagcaccttggaagatatggatgctcagaatggtctgtctcgcgattagtgcgtacaccccctgggcaatcttgccctcagtagttggattttggataactctccaatacacaaagagaggaggcgtgttgtgggacactccctcaccaaaggagtacaaaaagggggacacgaccaccggcgtctacaggatcatgactcgtgggctgctcggcagttatcaagcaggagcgggcgtgatggttgaaggtgttttccacaccctttggcatacaacaaaaggagccgctttgatgagcggagagggccgcctggacccatactggggcagtgtcaaggaggatcgactttgttacggaggaccctggaaattgcagcacaagtggaacgggcaggatgaggtgcagatgattgtggtggaacctggcaagaacgttaagaacgtccagacgaaaccaggggtgttcaaaacacctgaaggagaaatcggggccgtgactttggacttccccactggaacatcaggctcaccaatagtggacaaaaacggtgatgtgattgggctttatggcaatggagtcataatgcccaacggctcatacataagcgcgatagtgcagggtgaaaggatggatgagccaatcccagccggattcgaacctgagatgctgaggaaaaaacagatcactgtactggatctccatcccggcgccggtaaaacaaggaggattctgccacagatcatcaaagaggccataaacagaagactgagaacagccgtgctagcgccaaccagggttgtggctgctgagatggctgaagcactgagaggactgcccatccggtaccagacatccgcagtgcccagagaacataatggaaatgagattgttgatgtcatgtgtcatgctaccctcacccacaggctgatgtctcctcacagggtgccgaactacaacctgttcgtgatggatgaggctcatttcaccgacccagctagcattgcagcaagaggttacatttccacaaaggtcgagctaggggaggcggcggcaatattcatgacagccaccccaccaggcacttcagatccattcccagagtccaattcaccaatttccgacttacagactgagatcccggatcgagcttggaactctggatacgaatggatcacagaatacaccgggaagacggtttggtttgtgcctagtgtcaagatggggaatgagattgccctttgcctacaacgtgctggaaagaaagtagtccaattgaacagaaagtcgtacgagacggagtacccaaaatgtaagaacgatgattgggactttgttatcacaacagacatatctgaaatgggggctaacttcaaggcgagcagggtgattgacagccggaagagtgtgaaaccaaccatcataacagaaggagaagggagagtgatcctgggagaaccatctgcagtgacagcagctagtgccgcccagagacgtggacgtatcggtagaaatccgtcgcaagttggtgatgagtactgttatggggggcacacgaatgaagacgactcgaacttcgcccattggactgaggcacgaatcatgctggacaacatcaacatgccaaacggactgatcgctcaattctaccaaccagagcgtgagaaggtatataccatggatggggaataccggctcagaggagaagagagaaaaaactttctggaactgttgaggactgcagatctgccagtttggctggcttacaaggttgcagcggctggagtgtcataccacgaccggaggtggtgctttgatggtcctaggacaaacacaattttagaagacaacaacgaagtggaagtcatcacgaagcttggtgaaaggaagattctgaggccgcgctggattgatgccagggtgtactcggatcaccaggcactaaaggcgttcaaggacttcgcctcgggaaaacgttctcagatagggctcattgaggttctgggaaagatgcctgagcacttcatggggaagacatgggaagcacttgacaccatgtacgttgtggccactgcagagaaaggaggaagagctcacagaatggccctggaggaactgccagatgctcttcagacaattgccttgattgccttattgagtgtgatgaccatgggagtattcttcctcctcatgcagcggaagggcattggaaagataggtttgggaggcgctgtcttgggagtcgcgacctttttctgttggatggctgaagttccaggaacgaagatcgccggaatgttgctgctctcccttctcttgatgattgtgctaattcctgagccagagaagcaacgttcgcagacagacaaccagctagccgtgttcctgatttgtgtcatgacccttgtgagcgcagtggcagccaacgagatgggttggctagataagaccaagagtgacataagcagtttgtttgggcaaagaattgaggtcaaggagaatttcagcatgggagagtttcttctggacttgaggccggcaacagcctggtcactgtacgctgtgacaacagcggtcctcactccactgctaaagcatttgatcacgtcagattacatcaacacctcattgacctcaataaacgttcaggcaagtgcactattcacactcgcgcgaggcttccccttcgtcgatgttggagtgtcggctctcctgctagcagccggatgctggggacaagtcaccctcaccgttacggtaacagcggcaacactccttttttgccactatgcctacatggttcccggttggcaagctgaggcaatgcgctcagcccagcggcggacagcggccggaatcatgaagaacgctgtagtggatggcatcgtggccacggacgtcccagaattagagcgcaccacacccatcatgcagaagaaagttggacagatcatgctgatcttggtgtctctagctgcagtagtagtgaacccgtctgtgaagacagtacgagaagccggaattttgatcacggccgcagcggtgacgctttgggagaatggagcaagctctgtttggaacgcaacaactgccatcggactctgccacatcatgcgtgggggttggttgtcatgtctatccataacatggacactcataaagaacatggaaaaaccaggactaaaaagaggtggggcaaaaggacgcaccttgggagaggtttggaaagaaagactcaaccagatgacaaaagaagagttcactaggtaccgcaaagaggccatcatcgaagtcgatcgctcagcggcaaaacacgccaggaaagaaggcaatgtcactggagggcatccagtctctaggggcacagcaaaactgagatggctggtcgaacggaggtttctcgaaccggtcggaaaagtgattgaccttggatgtggaagaggcggttggtgttactatatggcaacccaaaaaagagtccaagaagtcagagggtacacaaagggcggtcccggacatgaagagccccaactagtgcaaagttatggatggaacattgtcaccatgaagagtggagtggatgtgttctacagaccttctgagtgttgtgacaccctcctttgtgacatcggagagtcctcgtcaagtgctgaggttgaagagcataggacgattcgggtccttgaaatggttgaggactggctgcaccgagggccaagggaattttgcgtgaaggtgctctgtccctacatgccgaaagtcatagagaagatggagctgctccaacgccggtatggggggggactggtcagaaacccactctcacggaattccacgcacgagatgtattgggtgagtcgagcttcaggcaatgtggtacattcagtgaatatgaccagccaggtgctcctaggaagaatggaaaaaaggacctggaagggaccccaatacgaggaagatgtaaacttgggaagtggaaccagggcggtgggaaaacccctgctcaactcagacaccagtaaaatcaagaacaggattgaacgactcaggcgtgagtacagttcgacgtggcaccacgatgagaaccacccatatagaacctggaactatcacggcagttatgatgtgaagcccacaggctccgccagttcgctggtcaatggagtggtcaggctcctctcaaaaccatgggacaccatcacgaatgttaccaccatggccatgactgacactactcccttcgggcagcagcgagtgttcaaagagaaggtggacacgaaagctcctgaaccgccagaaggagtgaagtacgtgctcaacgagaccaccaactggttgtgggcgtttttggccagagaaaaacgtcccagaatgtgctctcgagaggaattcataagaaaggtcaacagcaatgcagctttgggtgccatgtttgaagagcagaatcaatggaggagcgccagagaagcagttgaagatccaaaattttgggagatggtggatgaggagcgcgaggcacatctgcggggggaatgtcacacttgcatttacaacatgatgggaaagagagagaaaaaacccggagagttcggaaaggccaagggaagcagagccatttggttcatgtggctcggagctcgctttctggagttcgaggctctgggttttctcaatgaagaccactggcttggaagaaagaactcaggaggaggtgtcgagggcttgggcctccaaaaactgggttacatcctgcgtgaagttggcacccggcctgggggcaagatctatgctgatgacacagctggctgggacacccgcatcacgagagctgacttggaaaatgaagctaaggtgcttgagctgcttgatggggaacatcggcgtcttgccagggccatcattgagctcacctatcgtcacaaagttgtgaaagtgatgcgcccggctgctgatggaagaaccgtcatggatgttatctccagagaagatcagagggggagtggacaagttgtcacctacgccctaaacactttcaccaacctggccgtccagctggtgaggatgatggaaggggaaggagtgattggcccagatgatgtggagaaactcacaaaagggaaaggacccaaagtcaggacctggctgtttgagaatggggaagaaagactcagccgcatggctgtcagtggagatgactgtgtggtaaagcccctggacgatcgctttgccacctcgctccacttcctcaatgctatgtcaaaggttcgcaaagacatccaagagtggaaaccgtcaactggatggtatgattggcagcaggttccattttgctcaaaccatttcactgaattgatcatgaaagatggaagaacactggtggttccatgccgaggacaggatgaattggtaggcagagctcgcatatctccaggggccggatggaacgtccgcgacactgcttgtctggctaagtcttatgcccagatgtggctgcttctgtacttccacagaagagacctgcggctcatggccaacgccatttgctccgctgtccctgtgaattgggtccctaccggaagaaccacgtggtccatccatgcaggaggagagtggatgacaacagaggacatgttggaggtctggaaccgtgtttggatagaggagaatgaatggatggaagacaaaaccccagtggagaaatggagtgacgtcccatattcaggaaaacgagaggacatctggtgtggcagcctgattggcacaagagcccgagccacgtgggcagaaaacatccaggtggctatcaaccaagtcagagcaatcatcggagatgagaagtatgtggactacatgagttcactaaagagatatgaagacacaactttggttgaggacacagtactgtag

SEQ ID NO: 11210 - DNA, 7662 bp, unidentified
  misc_feature 1..7662: note = Synthetic
  source 1..7662: mol_type = other DNA
atgtctaagaaaccaggagggcccggcaagagccgggctgtcaatatgctaaaacgcggaatgccccgcgtgttgtccttgattggactgaagagggctatgttgagcctgatcgacggcaaggggccaatacgatttgtgttggctctcttggcgttcttcaggttcacagcaattgctccgacccgagcagtgctggatcgatggagaggtgtgaacaaacaaacagcgatgaaacaccttctgagttttaagaaggaactagggaccttgaccagtgctatcaatcggcggagctcaaaacaaaagaaaagaggaggaaagaccggaattgcagtcatgattggcctgatcgccagcgtaggagcagttaccctctctaacttccaagggaaggtgatgatgacggtaaatgctactgacgtcacagatgtcatcacgattccaacagctgctggaaagaacctatgcattgtcagagcaatggatgtgggatacatgtgcgatgatactatcacttatgaatgcccagtactgtcggctggtaatgatccagaagacatcgactgttggtgcacaaagtcagcagtctacgtcaggtatggaagatgcaccaagacacgccactcaagacgcagtcggaggtcactgacagtgcagacacacggagaaagcactctagcgaacaagaagggggcttggatggacagcaccaaggccacaaggtatttggtaaaaacagaatcatggatcttgaggaaccctggatatgccctggtggcagccgtcattggttggatgcttgggagcaacaccatgcagagagttgtgtttgtcgtgctattgcttttggtggccccagcttacagcttcaactgccttggaatgagcaacagagacttcttggaaggagtgtctggagcaacatgggtggatttggttctcgaaggcgacagctgcgtgactatcatgtctaaggacaagcctaccatcgatgtgaagatgatgaatatggaggcggccaacctggcagaggtccgcagttattgctatttggctaccgtcagcgatctctccaccaaagctgcgtgcccgaccatgggagaagctcacaatgacaaacgtgctgacccagcttttgtgtgcagacaaggagtggtggacaggggctggggcaacggctgcggactatttggcaaaggaagcattgacacatgcgccaaatttgcctgctctaccaaggcaataggaagaaccatcttgaaagagaatatcaagtacgaagtggccatttttgtccatggaccaactactgtggagtcgcacggaaactactccacacaggttggagccactcaggcagggagactcagcatcactcctgcggcgccttcatacacactaaagcttggagaatatggagaggtgacagtggactgtgaaccacggtcagggattgacaccaatgcatactacgtgatgactgttggaacaaagacgttcttggtccatcgtgagtggttcatggacctcaacctcccttggagcagtgctggaagtactgtgtggaggaacagagagacgttaatggagtttgaggaaccacacgccacgaagcagtctgtgatagcattgggctcacaagagggagctctgcatcaagctttggctggagccattcctgtggaattttcaagcaacactgtcaagttgacgtcgggtcatttgaagtgtagagtgaagatggaaaaattgcagttgaagggaacaacctatggcgtctgttcaaaggctttcaagtttcttgggactcccgcagacacaggtcacggcactgtggtgttggaattgcagtacactggcacggatggaccttgcaaagttcctatctcgtcagtggcttcattgaacgacctaacgccagtgggcagattggtcactgtcaacccttttgtttcagtggccacggccaacgctaaggtcctgattgaattggaaccaccctttggagactcatacatagtggtgggcagaggagaacaacagatcaatcaccattggcacaagtctggaagcagcattggcaaagcctttacaaccaccctcaaaggagcgcagagactagccgctctaggagacacagcttgggactttggatcagttggaggggtgttcacctcagttgggaaggctgtccatcaagtgttcggaggagcattccgctcactgttcggaggcatgtcctggataacgcaaggattgctgggggctctcctgttgtggatgggcatcaatgctcgtgataggtccatagctctcacgtttctcgcagttggaggagttctgctcttcctctccgtgaacgtgcacgctgacactgggtgtgccatagacatcagccggcaagagctgagatgtggaagtggagtgttcatacacaatgatgtggaggcttggatggaccggtacaagtattaccctgaaacgccacaaggcctagccaagatcattcagaaagctcataaggaaggagtgtgcggtctacgatcagtttccagactggagcatcaaatgtgggaagcagtgaaggacgagctgaacactcttttgaaggagaatggtgtggaccttagtgtcgtggttgagaaacaggagggaatgtacaagtcagcacctaaacgcctcaccgccaccacggaaaaattggaaattggctggaaggcctggggaaagagtattttatttgcaccagaactcgccaacaacacctttgtggttgatggtccggagaccaaggaatgtccgactcagaatcgcgcttggaatagcttagaagtggaggattttggatttggtctcaccagcactcggatgttcctgaaggtcagagagagcaacacaactgaatgtgactcgaagatcattggaacggctgtcaagaacaacttggcgatccacagtgacctgtcctattggattgaaagcaggctcaatgatacgtggaagcttgaaagggcagttctgggtgaagtcaaatcatgtacgtggcctgagacgcataccttgtggggcgatggaatccttgagagtgacttgataataccagtcacactggcgggaccacgaagcaatcacaatcggagacctgggtacaagacacaaaaccagggcccatgggacgaaggccgggtagagattgacttcgattactgcccaggaactacggtcaccctgagtgagagctgcggacaccgtggacctgccactcgcaccaccacagagagcggaaagttgataacagattggtgctgcaggagctgcaccttaccaccactgcgctaccaaactgacagcggctgttggtatggtatggagatcagaccacagagacatgatgaaaagaccctcgtgcagtcacaagtgaatgcttataatgctgatatgattgacccttttcagttgggccttctggtcgtgttcttggccacccaggaggtccttcgcaagaggtggacagccaagatcagcatgccagctatactgattgctctgctagtcctggtgtttgggggcattacttacactgatgtgttacgctatgtcatcttggtgggggcagctttcgcagaatctaattcgggaggagacgtggtacacttggcgctcatggcgaccttcaagatacaaccagtgtttatggtggcatcgtttctcaaagcgagatggaccaaccaggagaacattttgttgatgttggcggctgttttctttcaaatggcttatcacgatgcccgccaaattctgctctgggagatccctgatgtgttgaattcactggcggtagcttggatgatactgagagccataacattcacaacgacatcaaacgtggttgttccgctgctagccctgctaacacccgggctgagatgcttgaatctggatgtgtacaggatactgctgttgatggtcggaataggcagcttgatcagggagaagaggagtgcagccgcaaaaaagaaaggagcaagtctgctatgcttggctctagcctcaacaggacttttcaaccccatgatccttgctgctggactgattgcatgtgatcccaaccgtaaacgcggatggcccgcaactgaagtgatgacagctgtcggcctaatgtttgccatcgtcggagggctggcagagcttgacattgactccatggccattccaatgactatcgcggggctcatgtttgctgctttcgtgatttctgggaaatcaacagatatgtggattgagagaacggcggacatttcctgggaaagtgatgcagaaattacaggctcgagcgaaagagttgatgtgcggcttgatgatgatggaaacttccagctcatgaatgatccaggagcaccttggaagatatggatgctcagaatggtctgtctcgcgattagtgcgtacaccccctgggcaatcttgccctcagtagttggattttggataactctccaatacacaaagagaggaggcgtgttgtgggacactccctcaccaaaggagtacaaaaagggggacacgaccaccggcgtctacaggatcatgactcgtgggctgctcggcagttatcaagcaggagcgggcgtgatggttgaaggtgttttccacaccctttggcatacaacaaaaggagccgctttgatgagcggagagggccgcctggacccatactggggcagtgtcaaggaggatcgactttgttacggaggaccctggaaattgcagcacaagtggaacgggcaggatgaggtgcagatgattgtggtggaacctggcaagaacgttaagaacgtccagacgaaaccaggggtgttcaaaacacctgaaggagaaatcggggccgtgactttggacttccccactggaacatcaggctcaccaatagtggacaaaaacggtgatgtgattgggctttatggcaatggagtcataatgcccaacggctcatacataagcgcgatagtgcagggtgaaaggatggatgagccaatcccagccggattcgaacctgagatgctgaggaaaaaacagatcactgtactggatctccatcccggcgccggtaaaacaaggaggattctgccacagatcatcaaagaggccataaacagaagactgagaacagccgtgctagcgccaaccagggttgtggctgctgagatggctgaagcactgagaggactgcccatccggtaccagacatccgcagtgcccagagaacataatggaaatgagattgttgatgtcatgtgtcatgctaccctcacccacaggctgatgtctcctcacagggtgccgaactacaacctgttcgtgatggatgaggctcatttcaccgacccagctagcattgcagcaagaggttacatttccacaaaggtcgagctaggggaggcggcggcaatattcatgacagccaccccaccaggcacttcagatccattcccagagtccaattcaccaatttccgacttacagactgagatcccggatcgagcttggaactctggatacgaatggatcacagaatacaccgggaagacggtttggtttgtgcctagtgtcaagatggggaatgagattgccctttgcctacaacgtgctggaaagaaagtagtccaattgaacagaaagtcgtacgagacggagtacccaaaatgtaagaacgatgattgggactttgttatcacaacagacatatctgaaatgggggctaacttcaaggcgagcagggtgattgacagccggaagagtgtgaaaccaaccatcataacagaaggagaagggagagtgatcctgggagaaccatctgcagtgacagcagctagtgccgcccagagacgtggacgtatcggtagaaatccgtcgcaagttggtgatgagtactgttatggggggcacacgaatgaagacgactcgaacttcgcccattggactgaggcacgaatcatgctggacaacatcaacatgccaaacggactgatcgctcaattctaccaaccagagcgtgagaaggtatataccatggatggggaataccggctcagaggagaagagagaaaaaactttctggaactgttgaggactgcagatctgccagtttggctggcttacaaggttgcagcggctggagtgtcataccacgaccggaggtggtgctttgatggtcctaggacaaacacaattttagaagacaacaacgaagtggaagtcatcacgaagcttggtgaaaggaagattctgaggccgcgctggattgatgccagggtgtactcggatcaccaggcactaaaggcgttcaaggacttcgcctcgggaaaacgttctcagatagggctcattgaggttctgggaaagatgcctgagcacttcatggggaagacatgggaagcacttgacaccatgtacgttgtggccactgcagagaaaggaggaagagctcacagaatggccctggaggaactgccagatgctcttcagacaattgccttgattgccttattgagtgtgatgaccatgggagtattcttcctcctcatgcagcggaagggcattggaaagataggtttgggaggcgctgtcttgggagtcgcgacctttttctgttggatggctgaagttccaggaacgaagatcgccggaatgttgctgctctcccttctcttgatgattgtgctaattcctgagccagagaagcaacgttcgcagacagacaaccagctagccgtgttcctgatttgtgtcatgacccttgtgagcgcagtggcagccaacgagatgggttggctagataagaccaagagtgacataagcagtttgtttgggcaaagaattgaggtcaaggagaatttcagcatgggagagtttcttctggacttgaggccggcaacagcctggtcactgtacgctgtgacaacagcggtcctcactccactgctaaagcatttgatcacgtcagattacatcaacacctcattgacctcaataaacgttcaggcaagtgcactattcacactcgcgcgaggcttccccttcgtcgatgttggagtgtcggctctcctgctagcagccggatgctggggacaagtcaccctcaccgttacggtaacagcggcaacactccttttttgccactatgcctacatggttcccggttggcaagctgagggcaatgcgctcagcccagcggcggacagcggccggaatcatgaagaacgctgtagtggatggcatcgtggccacggacgtcccagaattagagcgcaccacacccatcatgcagaagaaagttggacagatcatgctgatcttggtgtctctagctgcagtagtagtgaacccgtctgtgaagacagtacgagaagccggaattttgatcacggccgcagcggtgacgctttgggagaatggagcaagctctgtttggaacgcaacaactgccatcggactctgccacatcatgcgtgggggttggttgtcatgtctatccataacatggacactcataaagaacatggaaaaaccaggactaaaaagaggtggggcaaaaggacgcaccttgggagaggtttggaaagaaagactcaaccagatgacaaaagaagagttcactag

SEQ ID NO: 11211 - DNA, 3588 bp, unidentified
  source 1..3588: mol_type = other DNA
  misc_feature 1..3588: note = Synthetic
atgtctaagaaaccaggagggcccggcaagagccgggctgtcaatatgctaaaacgcggaatgccccgcgtgttgtccttgattggactgaagagggctatgttgagcctgatcgacggcaaggggccaatacgatttgtgttggctctcttggcgttcttcaggttcacagcaattgctccgacccgagcagtgctggatcgatggagaggtgtgaacaaacaaacagcgatgaaacaccttctgagttttaagaaggaactagggaccttgaccagtgctatcaatcggcggagctcaaaacaaaagaaaagaggaggaaagaccggaattgcagtcatgattggcctgatcgccagcgtaggagcagttaccctctctaacttccaagggaaggtgatgatgacggtaaatgctactgacgtcacagatgtcatcacgattccaacagctgctggaaagaacctatgcattgtcagagcaatggatgtgggatacatgtgcgatgatactatcacttatgaatgcccagtactgtcggctggtaatgatccagaagacatcgactgttggtgcacaaagtcagcagtctacgtcaggtatggaagatgcaccaagacacgccactcaagacgcagtcggaggtcactgacagtgcagacacacggagaaagcactctagcgaacaagaagggggcttggatggacagcaccaaggccacaaggtatttggtaaaaacagaatcatggatcttgaggaaccctggatatgccctggtggcagccgtcattggttggatgcttgggagcaacaccatgcagagagttgtgtttgtcgtgctattgcttttggtggccccagcttacagcttcaactgccttggaatgagcaacagagacttcttggaaggagtgtctggagcaacatgggtggatttggttctcgaaggcgacagctgcgtgactatcatgtctaaggacaagcctaccatcgatgtgaagatgatgaatatggaggcggccaacctggcagaggtccgcagttattgctatttggctaccgtcagcgatctctccaccaaagctgcgtgcccgaccatgggagaagctcacaatgacaaacgtgctgacccagcttttgtgtgcagacaaggagtggtggacaggggctggggcaacggctgcggactatttggcaaaggaagcattgacacatgcgccaaatttgcctgctctaccaaggcaataggaagaaccatcttgaaagagaatatcaagtacgaagtggccatttttgtccatggaccaactactgtggagtcgcacggaaactactccacacaggttggagccactcaggcagggagactcagcatcactcctgcggcgccttcatacacactaaagcttggagaatatggagaggtgacagtggactgtgaaccacggtcagggattgacaccaatgcatactacgtgatgactgttggaacaaagacgttcttggtccatcgtgagtggttcatggacctcaacctcccttggagcagtgctggaagtactgtgtggaggaacagagagacgttaatggagtttgaggaaccacacgccacgaagcagtctgtgatagcattgggctcacaagagggagctctgcatcaagctttggctggagccattcctgtggaattttcaagcaacactgtcaagttgacgtcgggtcatttgaagtgtagagtgaagatggaaaaattgcagttgaagggaacaacctatggcgtctgttcaaaggctttcaagtttcttgggactcccgcagacacaggtcacggcactgtggtgttggaattgcagtacactggcacggatggaccttgcaaagttcctatctcgtcagtggcttcattgaacgacctaacgccagtgggcagattggtcactgtcaacccttttgtttcagtggccacggccaacgctaaggtcctgattgaattggaaccaccctttggagactcatacatagtggtgggcagaggagaacaacagatcaatcaccattggcacaagtctggaagcagcattggcaaagcctttacaaccaccctcaaaggagcgcagagactagccgctctaggagacacagcttgggactttggatcagttggaggggtgttcacctcagttgggaaggctgtccatcaagtgttcggaggagcattccgctcactgttcggaggcatgtcctggataacgcaaggattgctgggggctctcctgttgtggatgggcatcaatgctcgtgataggtccatagctctcacgtttctcgcagttggaggagttctgctcttcctctccgtgaacgtgcacgctgacactgggtgtgccatagacatcagccggcaagagctgagatgtggaagtggagtgttcatacacaatgatgtggaggcttggatggaccggtacaagtattaccctgaaacgccacaaggcctagccaagatcattcagaaagctcataaggaaggagtgtgcggtctacgatcagtttccagactggagcatcaaatgtgggaagcagtgaaggacgagctgaacactcttttgaaggagaatggtgtggaccttagtgtcgtggttgagaaacaggagggaatgtacaagtcagcacctaaacgcctcaccgccaccacggaaaaattggaaattggctggaaggcctggggaaagagtattttatttgcaccagaactcgccaacaacacctttgtggttgatggtccggagaccaaggaatgtccgactcagaatcgcgcttggaatagcttagaagtggaggattttggatttggtctcaccagcactcggatgttcctgaaggtcagagagagcaacacaactgaatgtgactcgaagatcattggaacggctgtcaagaacaacttggcgatccacagtgacctgtcctattggattgaaagcaggctcaatgatacgtggaagcttgaaagggcagttctgggtgaagtcaaatcatgtacgtggcctgagacgcataccttgtggggcgatggaatccttgagagtgacttgataataccagtcacactggcgggaccacgaagcaatcacaatcggagacctgggtacaagacacaaaaccagggcccatgggacgaaggccgggtagagattgacttcgattactgcccaggaactacggtcaccctgagtgagagctgcggacaccgtggacctgccactcgcaccaccacagagagcggaaagttgataacagattggtgctgcaggagctgcaccttaccaccactgcgctaccaaactgacagcggctgttggtatggtatggagatcagaccacagagacatgatgaaaagaccctcgtgcagtcacaagtgaatgcttataatgctgatatgattgaccctttttcagttgggccttctggtcgtgttcttggccacccaggaggtccttcgcaagaggtggacagccaagatcagcatgccagctatactgattgctctgctagtcctggtgtttgggggcattacttacactga

SEQ ID NO: 11212 - DNA, 24 bp, unidentified
  source 1..24: mol_type = other DNA
  misc_feature 1..24: note = Synthetic
aagataaatcgttcaatagtgtag

SEQ ID NO: 11213 - DNA, 465 bp, unidentified
  misc_feature 1..465: note = Synthetic
  source 1..465: mol_type = other DNA
atgttaaacaagatactcaagtcaatggacaaaagcatagacactttgtctgaaataagtggagctgctgaactggacagaacagaagaatatgctcttggtatagttggagtgctagagagttacataggatctataaacaacataacaaaacaatcagcatgtgttgctatgagtaaacttcttattgagatcaatagtgatgacattaaaaagctgagagataatgaagaacccaattcacctaagataagagtgtacaatactgttatatcatacattgagagcaatagaaaaaacaacaagcaaacaatccatctgctcaaaagactaccagcagacgtgctgaagaagacaataaaaaacacattagatatccacaaaagcataatcataagcaacccaaaagagtcaaccgtgaatgatcaaaatgaccaaaccaaaaataatgatattaccggataa

SEQ ID NO: 11214 - DNA, 705 bp, unidentified
  source 1..705: mol_type = other DNA
  misc_feature 1..705: note = Synthetic
atggcacacgccagagacaaggcaggcgctgtcctggccatgatactcatctgtgagacaagccttatctggacatctagtggcagttcgacggcctcggcggggaacgtgacaggcacaacggctgtgactacaccatcaccgtcggcatcgggtcctagcacaaaccagtctacgaccttgaccacgaccagcgcccctataaccacaactgctatcctgagcaccaacacaaccacggtgacatccactgggacaactgtcacaccagtcccaacaacttccaacgcatccaccatcaatgtcaccactaaggttactgcacagaacatcactgccaccgaggccggaacaggaacctccacgggtgtgactagcaatgtcaccaccaggtcctccaccaccaccagtgctactacccgtattaccaacgctaccaccttggcccccacgctgtcctccaaagggacgtccaatgccacaaaaacaactgctgagcttcccaccgttccagatgagaggcagccatctttatcttacggtcttcctctctggacactggtgtttgtggggctcacttttctgatgctaattctgatatttgcggctgggctaatgatgtccgccaagaacaagcccctggacgaagccctgctcacgaatgccgtcacgcgagacccgtcgctttacaagggactggtgtag

SEQ ID NO: 11215 - DNA, 705 bp, unidentified
  source 1..705: mol_type = other DNA
  misc_feature 1..705: note = Synthetic
atggcacacgccagagacaaggcaggcgctgtcctggccatgatactcatctgtgagacaagccttatctggacatctagtggcagttcgacggcctcggcggggaacgtgacaggcacaacggctgtgactacaccatcaccatcggcatcgggtcctagcacaaaccagtctacgaccttgaccacgaccagcgcccctataaccacgactgctctcctgagcaccaacacaaccacggtgacatccactgggacaactgtcacaccagtcccaacaacttccaacgcatccaccatcaatgtcaccactaaggtcactgcacagaacatcactgccaccgagtccggaacaggaacctccacgggcgtgactagcaatgtcaccaccaggtcctccaccaccgccagtgctactacacggattacaaacgctaccaccttggcccccacgctgtcctccaaagggacgtccaatgccacaaaaacaactgctgagcttcccaccgttccagatgagaggcagccatctttatcttacggtcttcctctctggacactggtgtttgtgggactcacttttctaatgctaattctgatatttgcagctgggctaatgatgtccaccaagaacaagcccctggacgaagccctgctcacgaatgccgtcacgcgagacccatcgctttacaagggactggtgtag

SEQ ID NO: 11216 - DNA, 99 bp, unidentified; identical to SEQ ID NO: 2034
  source 1..99: mol_type = other DNA
  misc_feature 1..99: note = Synthetic

SEQ ID NO: 11217 - DNA, 705 bp, unidentified
  source 1..705: mol_type = other DNA
  misc_feature 1..705: note = Synthetic
atggcacacgccagagacaaggcaggcgctgttatggccatgatactcatctgtgagacaagccttatttggacatctagtggcagttcgacggcctcggcggggaacgtgacaggcacaacggctgtgactacaccatcaccgtcggcatcgggtcctagcacaaaccagtctacgaccttgaccacgactagcgcccctataaccacaactgctattctgagcaccaacacaaccacggtgacattcactgggacaactgtcacaccagtcccaacaacttccaacgcatccaccatcaatgtcaccactaaggttactgcacagaacatcactgccaccgaggccggaacaggaacctccacgggtgtgactagcaatgtcaccaccaggtcctcctccaccaccagtgctactacccgtattaccaacgctaccaccttggcccccacgctgtcctccaaagggacgtccaatgccacaaaaacaactgctgagcttcccaccgttccagatgagaggcagccatctttatcttacggtcttcctctctggacactggtgtttgtggggctcacttttctgatgctaattctgatatttgcggctgggctaatgatgtccgccaagaacaagcccctggacgaagccctgctcacgaatgccgtcacgcgagacccgtcgctttacaagggactggtgtag

SEQ ID NO: 11218 - DNA, 18 bp, unidentified
  misc_feature 1..18: note = Synthetic
  source 1..18: mol_type = other DNA
atggagaaacaacagtag

SEQ ID NO: 11219 - DNA, 8370 bp, unidentified
  source 1..8370: mol_type = other DNA
  misc_feature 1..8370: note = Synthetic
ctgatagggtcctgccgcaggatccgtgggtgcggctgtacatgtaccatggaagtttcagtctcaagttctacccaaaccagaagtagatcacgatcccgcaggcgacgagcttctcgctctcgctcgcgacgccgtcccggggttaccgtcgtggttcctacctccactgacggtggccgcaggcgtcggcgtaatcggcagcgtgactatgcctggccttatatagatactgggctgtcgtatttcgtcggtgctgtgactccggttggttcaccatctcacgatccttaccgccggagccagaacatcggccgacttattgatggccccctttcttgggctgctgattgcctcaggaagattcccgttctggggcctcctgttggctggtgtgctcgggtcgttggtagagccgttcgcgtttgcgaggactttgtcaatggcctgacgcgctcaacagtcggcatgtccatctttattctctgcctatttagtgtttgtgtttctgggtatcgcttggtcaaggtgggctcgcactatcaacttaccaactgctgccaggagggtgacgtgctttactctaccaaggagtttgcttaccacctccccggttgcgttatctgcactgacgatcaatgctgggatcctgtcaccgttttcctcagcgttaagcccaatggttctacttatgaccatcatctgcggaaccatgtacttgggctgggcgtcggtgcggctgtatgtgatatgcttgacatcaatgaccaatgcggtatgctagctgtgtctctgatctctctctttgacattctgcctactcatatccaactcaatactactgctgcttgctatttggaagtggattactcaccctttggtaccatcgttgggtgggtcaattgggctgtgaatgaggcgggggtagtgacctgggctttgtcaatagtcacccgcataccatatgcggtgttccatttgatggagctcagctcgaccccgtttctgattgccgttgtgtggttcgcgatacaggggcagtgggctagacttctcttgcttgctgttctagttgttgaggccaccacgacggaatgctcacgccatgatgaaatctcaagaaatgccactaccaaatggggtcacatgaccagttgttccttacaaatgattccctgcaagtgtcgcaatgtgacctactctgttgaggacatgtggtgcttcggtgacgccgtcgtgaacgtaccaatctatcgcgaccggtcgggaggcaagaacgtgtccttagctaggctgccttatctaccaggcctccgtgggtgcgaatacaaggtaaacggtacgtggagctgttgcagcctcatggaccgtgaccctgtttgtaaacaacatcattgccctacggactgcacgtggaaggacccttcactgacgtgggaaaggtgtggtgtagtctcctgcatcacatcctaccactccgggaacggttcagcggcgtgcgccgcctggatagttagagctgccatgtgggatacttttgcgatatcctttgatgacaagaattggatcaatgtgagatacaacaagtccatgtccaacaacatcacaaccgccgcacgccttccgggcgcccggcggctgtacagtggtatgtgggtcttttctcctaaggggacctactttcctttgggtgatctggctactgggcttatttctaaggctagacatgatccgaacatgcaaatcatttactctggtgggggttccttagctgtacctcacttggaaaccactctgtttctggctttagtagctggcgttttccgatcgcggtctacgcttttgtggattctctttgtctctctctggaaatctgcgactgcagctttgctggccccatgggtcaccgctgttgccatcgcttcaacttgggatgaatggtatctcaggctcctcatatatctctttttgtgtaagagtcgcaggccttaccgttttatgctttgcaataagttccctcttactatgctccttttgttgcttaatgtactaggggttactgctttagatgttgattatactactcatattcccttggcttatgtcacctttgtcgctcttatcggttctggcttgtttgctacaactgcaccatctgttagcttcacatgccattaccttttggagtggctgagttgcatcagctatagtcttgagtctaatcattccatctttatgcttggtcttgtcctgtctccgtctcttatgctggatattactatgggtttgcttgctatacactgctctgtctggattattgctgttactgtgccaaatttcatgctcccaaaacatcggggtacttatgaaattttgcttaaatttgcgaagggtctgcctgccggtaggtggatccaacgcatcatcctttatgtggcgggtgaagctggtgtattgtggtatcaacaccttgggcagcaactagatttgttgcctggggtcgaccagcttaacggcgacccgtacggtgccataaggtcgcgcctggaatactttgaggatgcaggtcataggtacgcttgtggcgacttagtgagagggagacctgtcctaggccgccagggatccctggttgcttttgggtggtccactctcccaactgggtttgccccttgcgctcctatcggcgtccgacaggtctctaggcgtggtgagcttaagacctgggcagtttcgctcacgggaattgacacggctttgtgggaaggtaacatctttaccatgggcactatgtcgcgccgttatatgggcttcacttgtggggggcttctccatacggtctgccatggggcaggtcatcgctctttggcaagcacttctggagccctcccgccggtggtgtttgatgacggtgctgactacgccatgcatatggcgccccgcggagccaaggatctggacgtctgcacttgtgcagctacgtcggggttcatggttacccgcgttggtacagtgatcccactcaagctgtctgctcaaaacctgtgggcggttcaagccccacttgctctctccatctgtaagggcagttctggtgctcccgtgttgtgttctgccggccatgttatcgctatggttcagcgttgcagagctgtctccggctctgtggcttatgtctgtactactcctgtcagacacactgctgtcggcaaaccaacacctactcgcactgacatgtcggctccgccggcagttggtaccagttgggaagtccaaactgtctatgcacctacggggtctgggaaaacaacactgctgccgatgcattatgtccgcaagggctataatgtgctggttttgaacccgtctgttgccactaccatgtccatgcctgcttatatgaaggacgcatttggcatcaatccaaatttaaaggctgctgagatgacactgaatactggtgccagattgacctattccacttacgggagattccttgcagatggcaaaaataatatcaattttgatgtggttatttgtgatgagtgtcacgccactgactccactaccattcttggaatcggtgccgtcttgtcaatcacacccaatactaagtgcaaattggtccttcttgccactgcaactcctcctggccagcctgtgctaccacaccccaatatacaggaattggagctagatgatgttggggacatcaatttccacggcagaaaactcaaattggcatcctataaaacaggtagacatttgattttccaaaacagtaagaagcactgtgaggctctcgctgctgaccttcgttctaggggcattcgggctgtggcttactatcgcggcctccctatcagtactattcccactgagggggactgcgtggttgtcgctacggatgcccttatgactggttacaccgggaacttcgacagtgttacagactgcaatttggccactgttgaagacatcgaaattgattttgacccaactgtttcaatcactctcaaaactgttccagctaactcagtcacacgagcacagagacggggccggactggccgcggcagtcccggtgtctactattatgttacacaggacacaccgctgtccggtactgtctctgaggcatcagtgtttggcgcattcgacagtggtatggcatggttcggcatgtctcctgctgaggtccttgaacatctggaccactacagggtcacgcctggcctccctatcctgaagggtgtgctatctgagatatctgccttctacgggtgccttggctgggttacaccagctttccttgccaaggcacgcatacactctacctcctttacgtggcttaacgctgcgcagaggcagatttgttatgagaatggttgtaacccacctgatccccaatctcccatatggaagggtgtgcgtgtcacgggtgagccatgcagaattctttgtcatcttgaagggcaccagcccatgcagggcccatgccctgacgttgtcacgcaactgcagttagccttcacagaattggacgtatggggcgctggcgtcgctgcgtccgccgcttcagtgtttgcacttggtttggctctcgactacttcggctccgtggctataacatcagctatggtcatcgatagtggtgagccacctaatgccccagagcctgcggatgatgacgatggtttcgaagagtgttgggggttacccgagttctcggagccgatagtcactcgctgcaggatctgggtagaaagggtgcagctctgggcggcgggcatggcgaagtccggtgccgtcaatgatattaacaattggtttgcatccaacttgatcacaattgcatcagcattacaattaggagctggtatcctaatttctccagacaatcccttacttgctggcttgcttagcttttctggcgccgtcaccttgccattgagccggtctcttcaggcaatcgtgattactctcggtgccatcttgaccgcccgccttaccacggccgagggggccgttttcatcgcgggcgctaccctagcaggcttccagttatccgggactcctttactatctctaatattttccattcttggcacttatgcttcctttgtaccagcttttggagttgttttcaagctactcgatggacagctcccttccacggttgagctcgctagcttgataaactgcgcctttgctccgggggctgctgtggcggcgatagctgtcgctgttggcgccattgctttaacccagggcacgggcgtggtgtggatgaacaggctcctgtctatggtcgctaagtctaatgttatctctcctgactatttcgtggaagcccgcgacatcaggwtgacaatcaagaccttgtttgagaaaatacatccctggaacgtcgtgaagacagccattaagttcctgacgactccaactgacgtgccatgtgggtttaacatctttgattgcttttacagtgtttggcatgtcctctgtaagtgggccaaagccctttacgaggctctcatcggtggtgttaagcgtgccatttctctcccgggggtccctgtcgccggctgtcaggctggctacacgggtccctggaagggggagggcatgatcaccacacggtgtgggtgtggcagggaactggtttattcggtggagttcggaaccgctaaagtcatcagcggctcaaagctctgccggaattactggacctctgctgtgccgattaacaacactacatcaggtgttgccaaacctgctccctcctcttggaagacgatgactgtacaagtcggatttggttttgtggagtaccgcatggatggtgatgtgatctcggtcgttgccacgtcctctccagatgtgaccgtgcctagggttattcccagggtattcagtgcggctgctattaacggtcgtcgcaccgatccatactctggggagcccaacaccccttggcgcggtgaagtttggagggacactggctccggccgagagcgcattaagcttccgtacgctctccgtgattaccagaccgattcgacagttgctcgctcctttgagatggggggagagagtccaaaagaagacccctttaccactgatattggagttgtccacatccaacaagctgtttctaacgaacgggccgaggacattctcgaggggcctagcgacactccgcttgaccctcctgatgttgctgctgagcgaagtagactggatcgagaggccgctcaacgcgcagacgtcggcactgacggcttctgggcggggctgcaaccttttggccaactacaggtgtttgaaactccaccacccccttacacgaaaccacactccgttagttttgtgtccctcagctcgccaggggctcctgtgtccacctctcaacccactgatgaagatggtagcactagggtggtcctttccggcaggctcacccctccggatcggcctccttcacagatctcatactccagcatgccatcgctggaacctagtgctacgggcactgagcactcctgctcgggctggcgagacgctactttacctgcaccttctgaagattctttgtccgccttaggtgctgctgcgcctaaggagtgcagctacagctacatatgggacgggctcccatatgtagctcatcttgcaaagcgttccttctctgctgttgctgccatcactcacggcttggtgtcgcgtaatcttgtgtatgtcactaaacctgagaatgtcttggagcgaatgaagaaagtgactcggtttcgcccacctgcgacgccgaacccacacttagaggctcttaccaaacaggctgtgcggctggtttccacattggacatgcagcctatgacctattgggaggccgctgctatcacgtctgcacgcacggcccgatctgctgtcaccggccataccggcggtgatgtgaagagcggtgccgcgcgcaaggatgtggagcagttgtacaggactctcgaaagcgagtctttgcagaggccttacaatgaggttgtggtcatgccaaaatcagaagtcttcatgagaaataaagcaactgagaaaccaccccgcatcatagcttatcctcatcttgagaccagggtcgctgagaagatggtacttggtaatataggacccggcacagttaaaaaggtgctgggaaaagcctacggctttgtgccacctaaagatagaatcaataggctcctgaccatgtggcgccggcccaaccccatggcttttgcttgcgacgtcatcactttcgactccacaatcacacccgaggatgttgatcgtgaagcacgtctgtatgcatctgctactaaggattcggccacgcgcgcaagaatctggaacctacacaaattttatgcatcaggacccatggtggaccagagaggaaactatttgggcactcgtaattgcagggcctctggtgtgttcactacttccagttccaacacaatgacggccttcctgaaagtcaaagcagctgctatgactgccgggtttgttaggcctgagttcatcgtcgcaggcgacgatgtcgttgttgttacccaagcagaacccgttcctgatagggacaagaagaaactagctgtctttgctaatgcaatgaaagacatgggtgccccaatagagctgcccagcccaaagtactcattggaggacgtcaccagctgctcaagcaacgtgacgacgggattcacgagggacgggcgtcaggtgtatttcttgacgcgtgaccccagtgtcccgtttgcgcgctgctctgcagaaggtgaagggttcaacccgatgggcgcctgggttggcaacctgctgtggcatttcccatgtttatgggtgcggatcatcagcactcacatgctagagacgtacctcgagtcagaatttccagatgagatcacatgcgactggtatgggaggcaggtctcactgaaaatccaggatctgccttacatcctcaccgcaatgcacgggaacgatggcttcgatgtcgtccgctttactccttatgagatgaaccgggttgctgctactctcaaggcttgccacatgaagccactgagatggtggcgcaagcgtgctcgtaccatcagagctgcttgcttccgtaaaggaggattgcacaaatttcttgcttaccacttgctttcctttgcttctaactctgttaggcaacccctcaacccaaaagctgtgtctcgattctcggttgagctcggagcggatgtggaggaacccattgtaatcgggaaacctccgggtccgccgtggatcggggccatagctctctctgtgttggctctactgttcttctttctcaaacactga

SEQ ID NO: 11220 - DNA, 957 bp, unidentified
  misc_feature 1..957: note = Synthetic
  source 1..957: mol_type = other DNA
atgacgaccgtaccagtgacagatatacaaaacgacttaattacagagttttcagaagataattatccatctaacaaaaattatgaaataactcttcgccaaatgtctattctaactcacgttaacaacgtggtagatagagaacataatgccgccgtagtgtcatctccagaggaaatatcatcacaacttaatgaagatctatttccagatgatgattcaccggccactattatcgaacgagtacaacctcatactactattattgacgatacgccacctcctacttttcgtagagagttattgatatcggaacaacgtcaacaacgagaaaaaagatttaatattacagtatcaaaaaattctgaagcaataatggaatctagatctatgataacttctatgccaacacaaacaccatccttgggagtagtttatgataaagataaaagaattcagatgctagaggatgaagtggttaatcttagaaatcaacgatctaatacaaaatcatctgataatttagataattttaccagaatactatttggtaagactccgtataaatcaacagaagttaataagcgtatagccatcgttaattatgcaaatttgaacgggtcccccttatcagtcgaggacttggatgtttgttcggaggatgaaatagatagaatctataaaacgattaaacaatatcacgaaagtagaaaacgaaaaattatcgtcactaacgtgattattattgtcataaacattatcgagcaggcattgctaaaactcggatttgaagaaatcaaaggactgagtaccgatatcacttcagaaattatcgatgtggagatcggagatgactgcgatgctgtagcatcaaaactaggaatcggtaacagtccggttcttaatattgtattgtttatactcaagatattcgttaaacgaattaaaattatttaa

SEQ ID NO: 11221 - DNA, 960 bp, unidentified
  source 1..960: mol_type = other DNA
  misc_feature 1..960: note = Synthetic
atgacgaccgtaccagtgacagatatacaaaacgacttaattacagagttttcagaagataattatccatctaacaaaaattatgaaataactcttcgtcaaatgtctattctaactcacgttaataacgtggtagatagagaacataatgccgccgtagtgtcatctccagaggaaatatcatcacaacttaatgaagatttatttccagacgatgattctccggccactattattgaaagagtacaacaaccgcatactactattattgacgatacgccacctcctacgtttcgtagagagttattgatatcggaacaacgtcagcaacgagaaaaaagatttaatattacggtatcaaaaaatgccgaagcgataatggaatctagatcgatgataacttctatgccaacacaaacaccatccttgggagtagtttatgataaagataaaagaattcagatgctagaggatgaagtggttaatcttagaaatcaacaatctaatacaaaatcatctaataatttggataattttaccagaatactatttggtaagactccgtataaatcaacagaagttaataagcgtatagccatcgttaattatgcaaatttgaatgggtcccccttatcagtagaggacttggatgtttgttcagaggatgaaatagatagaatctataaaacgattaaacaatatcacgaaagtagaaaacgaaaaattatcgttactaacgtgattattattgtcataaacattattgaacaggcattgctaaaacttggatttgacgaaatcaaaggactgagtaccgacatcacttcagaaattatcgatgtggagatcggagacgactgtgatgctgtagcatcaaaactaggaatcggcaacagtccggttcttaatattgtattgtttatactcaagatatttgttaaacgaattaaaattatttaa

SEQ ID NO: 11222 - DNA, 4290 bp, unidentified
  misc_feature 1..4290: note = Synthetic
  source 1..4290: mol_type = other DNA
gtgtgctaccggcaacaaacagtgacaatggcgaatttaataattatttcaatggttctgggcgttgcctatgggcatccgctttcaacaagtcaaattggtgaccgctgttttgctggtggtaacctcttcaaggagatgaacttgagtgtaggacttggcgaaatatgtgttaaagatgacatatctattgttaagagtactactgtttttagcaagaataaaccagctcttgaggcaactacaaaattttatagatcttttattgtgaaagattggtctgagtgcaatccagtgctagacaaatttggaaattttatggttttaagtgttgatgataatggccatataatacctaaaatgtatacatgtagagcagcatgtgatattagattaaacaaagataatgccgaaataatattatcgtcaacaaaactcaaccactttgaaattgtcgggacaacttcgacatcaggctggttcaagaacacaataacaaacaacttagaacatacatgcgagcatgtaaccgtaaattgtggtcagaaatcagtaaaattccatgcatgctttagacaacataggggttgtataagattctttaaaggaacatatatgccatactcaatgattgaagcaatgtgcgttaacatagagctaataattctgacattatatatctttgctgcaattatatttgcattaattataacaaagagttatgtggcatacttgctcctgccgttattttatccagtgacgtggttttacggaaaggtttataaaaagattaattcttgcccaaattgtctacttgcatctcaccctttcaccagctgccctaaattctgtatatgcggttctaggtttagttgcacagaagctcttaaggtacatagaatgggaaaggactgcttaggttataagtctctaagcaaagctagacagatgtgtaaatcgaaaagctggtccttcacagcagctatattaactggattaatattgatggaattcatctcaccaattgcaggagagagaatgtataagcttgaggagctggctgatgagtttataaagctaacagagcaggtaaatattttagaaagagaaatggaagtcttgaagcagtcaataattgttatgtttgcaatcattttggtattgttgctttttgaaaatatgatattcaaccggcttttccgcattttttatcgttcttgctccatgtgcggcttgatacattatagaccaggactcaagatcgatttaaccaaaactaacagatgtggtagttgcatctgtggattcgacgagcagcaatcatctggttttgaatatgaaatatttctaaaggatatgcatgtccagaaagaatcatgcaaatttagtccaagagtaaaccactttaggaatattaaagctttattatttgcacttgtaatctgtgctactatatatacagtttatgcagatgaagattgcttatctaaagatattaaaataacatatcaagagttgcacaattgcataggtccaaagataatgggcgatacttgtgtatcaaagagtgaattgtattctgatttattctcaaaaaatctagtcacagaatatgataaaaaatattttgaacccgatactgtaaatgatcaattcaacaagatagagtttgcccaagatgcacatagaatgatactattagaaagaatactttacaagacagaatgtgaaatgctaagcttaaaaaagaacagtggaccttataatgttgcctggcgcacatatttaaaaaatcataatatagacttatgcagtaggcacaactataaaatgatatgtcagtgtattaatacacactctatgtgtaataatacagatatagattataacaaagagatcgaaacatattataaaagcaatgctgcagcctatagagctgacctgaacaccataatggacacattaaaaacagcattcagagggcttacaaaggtcctaattgaaaattatatagaaaaagatgactctgatgctcttaaggccttatttagtaatattactgattctgttcaggacaattatcagatgattggaatattgaaatttgccagtaagctattagatattaaccttggtagatccacccgctcagctcatcattctataatgacaaacgaaattcccaaatctaatccttttactgattacagttattctaatctgaatataaaggagtgcatgtcaccagagagcttgaaatgttttaagaagagaggcagtacaccgcatacaaaccacctgctttgcaagatagacaacaaatataaagcatttgactggccagagatagaaacaattcaaaaaggtcaaaaattgtgccttggtgacagtcattgcaacttggaatttacagccataactgcagacaagattatgtcattaactaactgttataaagaatctttcactgcgcaaccagcagatatgcaggctggaattaaaaaatgctcagctgatgaaattggagaatgtacaacacttgaagacaagacatggccaattatattctgtggtggcaaatattactactctgatagcaaggagcatgccaaggacggttctatcaacaattattgtttaaccaacaaatgctctgaacaacgtttcccaatacatgaaaattggttcaaaaaatgtaattgggacaagacccacaaagaatttagcactatgagacaaataaactataatgatataacttcttatagaaaggcaatagaatctgagataggaacagatttgatgacacaccattataagcccacaaagaaccttccacatgttgtaccaaggtatcatagtatagatgtacaaggtacagaatcaacagagggtattatcaatggtttcatacaaaatacaatacctgctattagtggtctaggtgtcggttatcatctgaattttcaaagcaatcagttatttgacatagttatttttgtgaaaaaagctgtatataaagcacagtaccagaaagcatacaccacaggtcctagcatatccataaatattgaacacaacgaaagatgcacaggccactgccccgaaaagattcctgcaaaagaaggttggttaacattttctaaagagcatactagttcttggggatgtgaagaatatggctgtcttgctatagatacaggctgtctatatggctcttgtcaagatgtcatacgcccagaattagatgtttataagaagattggcagtgaggtatcactgatagaaatatgtataactttgcctcatgaaacttattgcaatgatatggacatattagaaccgattataggagataaattaagtgcatcctttcagaatacacagactaatcaacttccgacccttatagcttataaaaaagggaagatatacacaggtcaaatcaacgatattggaaacacagcattgcagtgcggctcaatccaagtaatcaatggatcaactatcggaactggcagccccaaatttgattatatatgccatgctatgagaaggaaagatgttattgtaaggaagtgtttcaatgacaattatcagtcgtgcactaggctagaaaaacggaacgacttgatcccttatagaaaaggcgatgtcatcgaagtatcaaaaacaggatcgaacatgggccaaatgacatttaaaatagaactaggtgatatcaactataaaatatttactaaatcaatagatcttcaaatgtctggcatttgtgctgggtgcattgactgtgctgaaggcatttcatgctctataaatgctgaagtgccagccgaaacagtctgccattgcaaaacaaactgtgaagattttataaacaatatagtgttttcaccgcaaatcaagaattacaatataaaagtccactgtaaatctaaagttgaaaaaataacagcacatatctgtgggagagacattgatttacagttaacaattaagccatacaatcagaagatagacttgtcgcagttagatgaatcaaattacataagggaagaggacctccagtgtggaacatggttatgtaaagtgcaaaaagaggggattgatattatatttaaaggattattttcaggcttagggagatattggaccatattaatttattcaattataggtgtggtaataattgtgatattggtttatatcctgttgcccataggtcggcttttaaaagcattcctaatcagacatgaaatagaatatgccatggagcagaaaatcaagtag

SEQ ID NO: 11223 - DNA, 276 bp, unidentified
  misc_feature 1..276: note = Synthetic
  source 1..276: mol_type = other DNA
atgtaccacaacggactacatctacatttgatccggaggcagcatatgtggcatttgaagctagatacggacaagtgctcaatgctggtgttgttagagtcttcttcctcaaccaaaagaaggccaaagatgtcttacgtaagacatcgaggcccatggttgaccttacttttggtggggtccaatttgcaatggttaataaccatttcccacagttccagtcgaatccagtgccggacaacggtcttaccctgcaccgtctgtcaggatacctag

SEQ ID NO: 11224 - DNA, 276 bp, unidentified; identical to SEQ ID NO: 11223
  source 1..276: mol_type = other DNA
  misc_feature 1..276: note = Synthetic

SEQ ID NO: 11225 - DNA, 36 bp, unidentified; identical to SEQ ID NO: 2052
  source 1..36: mol_type = other DNA
  misc_feature 1..36: note = Synthetic

SEQ ID NO: 11226 - DNA, 18 bp, unidentified
  misc_feature 1..18: note = Synthetic
  source 1..18: mol_type = other DNA
atgcataatatcctttaa

SEQ ID NO: 11227 - DNA, 78 bp, unidentified; identical to SEQ ID NO: 2057
  source 1..78: mol_type = other DNA
  misc_feature 1..78: note = Synthetic

SEQ ID NO: 11228 - DNA, 48 bp, unidentified; identical to SEQ ID NO: 2058
  source 1..48: mol_type = other DNA
  misc_feature 1..48: note = Synthetic

SEQ ID NO: 11229 - DNA, 48 bp, unidentified; identical to SEQ ID NO: 2058
  misc_feature 1..48: note = Synthetic
  source 1..48: mol_type = other DNA

SEQ ID NO: 11230 - DNA, 432 bp, unidentified
  source 1..432: mol_type = other DNA
  misc_feature 1..432: note = Synthetic
ataagtcggccagagcccaaggggagacatatgttcttcgacaacatgctcgtgcgacaaagtactgttcggaacttagccccatggtcttacgcgctcgtactcgttgccgtgcccatctccttgtctgcaagcgtgactcacctccagtgtccgagtcagctcgaccttggagttcacgtgacgattacagtgtcctgcgttgcatgtagccacacccctctctttagccgtctctactggattaagaatggctctcacgcggaacatcagggctcgacatggattacgtacacgccaaacgggacgcggttgagccgacagctccacctgggggcggacttcaccttgacgcaaaatctgacgtgtcgcctagccgacggcgagcatgtgcaagaaaagtcgatcgtcttggcagacttctggtgctag

SEQ ID NO: 11231 - DNA, 54 bp, unidentified; identical to SEQ ID NO: 755
  misc_feature 1..54: note = Synthetic
  source 1..54: mol_type = other DNA

SEQ ID NO: 11232 - DNA, 372 bp, unidentified; identical to SEQ ID NO: 10358
  misc_feature 1..372: note = Synthetic
  source 1..372: mol_type = other DNA

SEQ ID NO: 11233 - DNA, 24 bp, unidentified
  source 1..24: mol_type = other DNA
  misc_feature 1..24: note = Synthetic
aagactccgggggcagttttttga

SEQ ID NO: 11234 - DNA, 45 bp, unidentified; identical to SEQ ID NO: 2063
  misc_feature 1..45: note = Synthetic
  source 1..45: mol_type = other DNA

SEQ ID NO: 11235 - DNA, 216 bp, unidentified
  source 1..216: mol_type = other DNA
  misc_feature 1..216: note = Synthetic
atttacaaacgaaagtccaggtttgatagagacaaacaattaactattttgtctctgtttttaacacctccacagtttttaatttctttggtaatgaaattattcactatatcagtatcttctttatctaccagagattttactaacttgataaccttggctgtctcattcaatagggtagtgatatttgtatgtgtgatattgatatctttttga

SEQ ID NO: 11236 - DNA, 15 bp, unidentified
  source 1..15: mol_type = other DNA
  misc_feature 1..15: note = Synthetic
atggcagccttctga

SEQ ID NO: 11237 - DNA, 27 bp, unidentified
  source 1..27: mol_type = other DNA
  misc_feature 1..27: note = Synthetic
ctgcagatagctctattcacaacgtaa

SEQ ID NO: 11238 - DNA, 27 bp, unidentified
  misc_feature 1..27: note = Synthetic
  source 1..27: mol_type = other DNA
ctgcagatagctctattcacaacgtaa

SEQ ID NO: 11239 - DNA, 39 bp, unidentified; identical to SEQ ID NO: 2069
  source 1..39: mol_type = other DNA
  misc_feature 1..39: note = Synthetic

SEQ ID NO: 11240 - DNA, 21 bp, unidentified
  misc_feature 1..21: note = Synthetic
  source 1..21: mol_type = other DNA
atgctcagcaatttttattaa

SEQ ID NO: 11241 - DNA, 18 bp, unidentified
  misc_feature 1..18: note = Synthetic
  source 1..18: mol_type = other DNA
ttggactcgacttcctaa

SEQ ID NO: 11242 - DNA, 615 bp, unidentified
  source 1..615: mol_type = other DNA
  misc_feature 1..615: note = Synthetic
atgcgctggttcaagttgtggtctatcttgctggtcggttcactgctggtatctggaacgcggggcaagttgccggacgcccccgagtttgaaaaggatcttctcattcagagactcaattggatgctatgggtgatcgatgaatgcttccgcgacctctgttaccgtaccggcatctgcaagggtattctagagcccgctgctatttttcatctgaaactaccagccatcaacgatactgatcactgcgggttaataggatttaatgagactagctgccttaaaaagctcgccgatggctttttcgaattcgaggtgttgtttaagtttttaacgacggagtttggaaaatcagtgataaacgtggacgtcatggagcttctgacgaagaccttaggatgggacatacaggaagagctcaataagctgactaagacgcactacagtccacccaaatttgaccgcggtctattagggaggcttcagggacttaagtattgggtgagacactttgcttcgttttatgttctgagtgcaatggaaaagtttgcaggtcaagcggtgcgtgttttgaactctatcccagacgtgactcctgacgtccacgataagtaa

SEQ ID NO: 11243 - DNA, 615 bp, unidentified
  source 1..615: mol_type = other DNA
  misc_feature 1..615: note = Synthetic
atgtgctggttcaagttgtggtctctcttgctggtcggttcactgctggtatctggaacgcggggcaagttgccggacgcccccgagtttgaaaaggatcttctcattcagagactcaattggatgctatgggtgatcgatgaatgcttccgcgacctctgttaccgtaccggcatctgcaagggtattctagagcccgctgctatttttcatctgaaactaccagccatcaacgatactgatcactgcgggttaataggatttaatgagactagctgccttaaaaagctcgccgatggcttttttgaattcgaggtgttgtttaagtttttaacgacggagtttggaaaatcagtgataaacgtggacgtcatggagcttctgacgaagaccttaggatgggacatacaggaagagctcaataagctgactaagacgcactacagtccacccaaatttgaccgcggtctattagggaggcttcagggacttaagtattgggtgagacactttgcttcgttttatgttctgagtgcaatggaaaagtttgcaggtcaagcggtgcgtgttttggactctatcccagacgtgactcctgacgtccacgataagtaa

SEQ ID NO: 11244 - DNA, 36 bp, unidentified; identical to SEQ ID NO: 2088
  misc_feature 1..36: note = Synthetic
  source 1..36: mol_type = other DNA

SEQ ID NO: 11245 - DNA, 36 bp, unidentified; identical to SEQ ID NO: 2088
  source 1..36: mol_type = other DNA
  misc_feature 1..36: note = Synthetic

SEQ ID NO: 11246 - DNA, 21 bp, unidentified
  misc_feature 1..21: note = Synthetic
  source 1..21: mol_type = other DNA
atgcgaatgaagttcttctag

SEQ ID NO: 11247 - DNA, 36 bp, unidentified; identical to SEQ ID NO: 2088
  source 1..36: mol_type = other DNA
  misc_feature 1..36: note = Synthetic

SEQ ID NO: 11248 - DNA, 21 bp, unidentified
  misc_feature 1..21: note = Synthetic
  source 1..21: mol_type = other DNA
atgcgaatgaagttcttctag

SEQ ID NO: 11249 - DNA, 21 bp, unidentified
  source 1..21: mol_type = other DNA
  misc_feature 1..21: note = Synthetic
atgcgaatgaagttcttctag

SEQ ID NO: 11250 - DNA, 1089 bp, unidentified
  source 1..1089: mol_type = other DNA
  misc_feature 1..1089: note = Synthetic
atggccccaacaaaaagaaaaggaagttgtccaggggcagctcccaaaaaaccaaaggaaccagtgcaagtgccaaagctcgtcataaaaggaggaatagaagttctaggagttaaaactggagtagacagcttcactgaggtggagtgctttttaaatcctcaaatgggcaatcctgatgaacatcaaaaaggcttaagtaaaagcttagcagctgaaaaacagtttacagatgactctccagacaaagaacaactgccttgctacagtgtggctagaattcctttgcctaatttaaatgaggacttaacctgtggaaatattttgatgtgggaagctgttactgttaaaactgaggttattggggtaactgctatgttaaacttgcattcagggacacaaaaaactcatgaaaatggtgctggaaaacccattcaagggtcaaattttcatttttttgctgttggtggggaacctttggagctgcagggtgtgttagcaaactacaggaccaaatatcctgctcaaactgtaaccccaaaaaatgctacagttgacagtcagcagatgaacactgaccacaaggctgttttggataaggataatgcttatccagtggagtgctgggttcctgatccaagtaaaaatgaaaacactagatattttggaacctacacaggtggggaaaatgtgcctcctgttttgcacattactaacacagcaaccacagtgcttcttgatgagcagggtgttgggcccttgtgcaaagctgacagcttgtatgtttctgctgttgacatttgtgggctgtttaccaacacttctggaacacagcagtggaagggacttcccagatattttaaaattacccttagaaagcggtctgtgaaaaacccctacccaatttcctttttgttaagtgacctaattaacaggaggacacagagggtggatgggcagcctatgattggaatgtcctctcaagtagaggaggttagggtttatgaggacacagaggagcttcctggggatccagacatgataagatacattgatgagtttggacaaaccacaactagaatgcagtga

SEQ ID NO: 11251 - DNA, 1695 bp, unidentified
  misc_feature 1..1695: note = Synthetic
  source 1..1695: mol_type = other DNA
atggcacactccaaggaggttccaagctttagatggactcagtccttaaggagaggtttgagccaattcactcagactgtcaagtcagatgttttgaaggacgccaagctaattgctgacagcatcgacttcaaccaagtggcacaggtgcagcgggcactcagaaagactaaaaagggggaagaagacctcaataagttgagggacctgaataaagaggttgacagactcatgtccatgaggagtgttcaacgaaacacagttttcaaggtgggagatctggggagggatgaactgatggagttggcgtctgaccttgagaaattaaaaaacaagataagaagagcagagacaggctctcagggggtttacatgggtaacttgtcccagtcacaacttgctaaaagatcagagatattgagaacactgggatttcaacagcaagggactgggggaaatggtgtggtgaggatatgggatgttaaagacccttcaaagctaaacaatcagtttggctctgttcctgcattgacaattgcatgcatgactgttcaaggaggtgagacaatgaacagtgtcatacaagctttaacctcacttgggcttctatacactgtgaagtatccaaacttaagtgaccttgacagactgactcaggaacatgactgccttcagattgtgactaaagatgaaagctccatcaatatttctggttacaacttcagtctttcagctgcagtaaaggctggagcatctattcttgatggtggaaacatgttggaaacaatcagagtcaccccagaaaacttctcttccctcataaaatcaaccattcaggttaaacgaagagaaggcatgtttattgatgagaaaccaggcaatagaaatccttatgaaaaccttttgtacaaactttgtctttctggcgatggttggccttatattggttctagatcacaaatcacaggcaggtcatgggacaacacaagtattgatctgacaaggaaaccagttgctggtcctagacagccggaaaaaaacggtcagaatttgagattggctaacttgacagagatacaagaagctgtcatcagagaggcagtggggaaactcgaccccaccaacaccctttggctcgacattgaaggaccagccactgaccctgttgagatggcattattccaacctgcaggtaagcagtacattcactgcttcagaaaaccacatgatgagaaagggtttaaaaatggtagcagacactctcacggcatcttaatgaaggacatagaagatgcaatgccaggagttcttagttacgtgatcggcttgctgcctccagacatggttgtgactactcaaggatccgatgacatcaggaagttgtttgacctccatggaagaagagatcttaaactggttgatgttaagctcacatctgaacaagccaggcagtttgatcaacaggtctgggagaaatatggtcacttatgcaaatatcacaatggagtggttgtcaataagaaaaagagggaaaaggatactcccttcaagttggcctccagtgaaccacactgtgctctgctagactgcataatgtttcagtcagtgctagatgggaagctctatgaggaggaacctacacctctattaccaccgagcttgctgttcctcccgaaggcagcctatgcactgtaa

SEQ ID NO: 11252 - DNA, 2073 bp, unidentified
  misc_feature 1..2073: note = Synthetic
  source 1..2073: mol_type = other DNA
atgtatttttacataaatagtctacttctcatcgtgtcaataaatggatggaaacactggaatatactcaattcttcaatttgcgtaaatgaaaaaacaaatcaaactattattcaacctggtttaataacgtttaatttccatgattataacgaaactcgggtttatcagattcccaaatgcttattcggatatacttttgtctcgaatttatttgattctgtgaatttcgatgaatcatttgatcaatataaacatcggattacacgtttttttaacccatcaacagagaaagctgtgaaaatctatgcacaaaaatttcagacaaatatcaaacctgtttcgcatacaaaaacgattacagtgtctttattacctttattttatgaaaaggatgtctactttgcaaatgtttcggaaattcgcaaactctattacaaccaatacatttgcacactttcaaatggcttgactgattatctattcccaataacagaaagatgtgttatgagacattataattacttaaatactgtgttcatgctagctttgacaccatcgttttttataatttcagtggaaacaggaatggatgatgtcgtttttatctttggaaatgttagtcgtattttttttaaagcaccttttcgaaaaagttcattcatatatagacagactgtctcagacgatctcctgttaattacaaaaaaaacaacaattgaaagattttatccgtttctcaaaatagactttctggatgatatttggaaacaaaattatgacatctcgtttttaatagccaaattcaataagttagcaactgtttatatcatggagggattttgcggaaaaccagttaacaaagacacattccatttaatgtttttattcggcttaactcattttctatatagtactcgaggagatggactcctccctctgttggaaatccttaatactcaccaaagcatcattacgatgggtaggtttttagaaaagtgcttcaaaatgactaagagtcatttattatatcctgagatggaaaaacttcagaatttccagttagtagattattcttatattacatctgatctgacaattcctatctctgctaagctagcatttttatctttagcagatggaagaatcgttacagttccacaaaacaaatggaaagaaatagaaaacaatattgaaacattatatgaaaaacataaattgtttacaaatttaacccaaccggaacgtgcaaatttgtttttactctcagaaattggaaacagtctagtcttccaagaaaagatcaagcgaaagattcatgttttgctcgcaagtctgtgcaatcctttggaaatgtatttttggacacatatgcttgataatgtcatggacattgaaacgatgttttctccttgtgcaacagccacgcgcaaagatttaactcaaagagttgtcaacaacattttatcctataaaaacctagacgcatacacaaacaaggtgatgaacacactttctgtatatagaaaaaagagattagatatgtttaaaagcatttcctgtgtttcaaatgaacaagctgccttcctcacattaccaaatattacttacaccatctcttcaaaatatattttagccggtactagtttcagtgtcacgagtactgtcataagcactacaattattatcactgttgttcccttaaactctacctgcacacctactaattataaatattcggtgaaaaatataaaaccaatctataatatttcatcccacgattgtgtgttttgtgaaagcttggttgtggaatatgacgacatagacggaattatccaatttgtatacataatggatgacaagcaactattaaaattaatagatccggacacaaattttatcgatgtgaatccacgaacacattatttattgtttttaagaaatggctctgttttcgaaattaccgcattagatctaaaatcaagtcaagtttcaatcatgttagttcttctgtatttaattatcataattatagttttgtttggtatttatcatgtatttagattgttttga

SEQ ID NO: 11253 - DNA, 15 bp, unidentified
  source 1..15: mol_type = other DNA
  misc_feature 1..15: note = Synthetic
ataccactactttag

SEQ ID NO: 11254 - DNA, 30 bp, unidentified; identical to SEQ ID NO: 2097
  misc_feature 1..30: note = Synthetic
  source 1..30: mol_type = other DNA

SEQ ID NO: 11255 - DNA, 90 bp, unidentified
  source 1..90: mol_type = other DNA
  misc_feature 1..90: note = Synthetic
ttgttctttgacaagcgcttgtttacgtttgagttttcgcatagtgtttttcaacttggtgccgttaatatacttgggaacgcggaataa

SEQ ID NO: 11256 - DNA, 507 bp, unidentified
  source 1..507: mol_type = other DNA
  misc_feature 1..507: note = Synthetic
atgaaatcgcttaatagacaaactgtaagtaggtttaagaagttgtcggtgccggccgccataatgatgatactctcaaccattattagcggcataggaacatttctgcattacaaagaagaactgatgcctagtgcttgcgccaatggatggatacaatacgataaacattgttatctagataccaacattaaaatgtccacagataatgcagtttatcagtgtcgtaaattacgagctagattgcctagacctgatactagacatctgagagtattgtttagtattttttataaagattattgggtaagtttaaaaaagaccaatgataaatggttagatattaataatgataaagatatagatattagtaaattaacaaattttaaacaactaaacagtacgacggattctgaagcgtgttatatatacaagtctggaaaactggttaaaacagtatgtaaaagtactcaatctgtactatgtgttaaaagattctacaagtga

SEQ ID NO: 11257 - DNA, 18 bp, unidentified
  source 1..18: mol_type = other DNA
  misc_feature 1..18: note = Synthetic
atgggtgtgtgccagtag

SEQ ID NO: 11258 - DNA, 1563 bp, unidentified
  source 1..1563: mol_type = other DNA
  misc_feature 1..1563: note = Synthetic
gtgctggcggggctggcagaagactcggaggagatggaactgcagcagctggccggctcgctacgcgtagggccagcggatatgcgcctgtgcctgcaagaggcgctgtcgcgcaggctctggcaatcattcgatgacagcatcgggctgtcgcccggcagcgactacgcgctgctagagaacctgtgcgcggtggtgctgggcgtgggcagccgcctggccgaactgctctgcgtgtacgacgtgctgctgcagaactgcctggtcacagacacgctggtcagcttcatggaggccaactacctggggctgcttccgcacctggtcgagcacctgtcgcgcgagcgctacatgcacgtacgcatccgctcgctacactcggacctgtgcaccatcttctcgcgcgagtcggtgtaccttttcgagaacatgttgctgcggcaagcgcgcgcgctggcacaccagatgtttctgcgctcgcgcgacggcgatggccgcaaccaggactacgcggagttcatggagctgctgcgcgtggactcgctctgcggcattcacctctgggcggccatcaagctcgagatcgcgcgcgagttcatgcggctggacggtgcggccttccagaacaactgcccgctgctgttcgaggctggtccgggggccattgccttcctgcgctccgcaatggcgccacgtgcattcctggacgcgctggtccgcttccttaagcgcgcgcacgcaggcaagcgcatgcacacgctggtcagcacgtacgcgcagttccacgcgctgctcagcgacgcgccagaggccaaggcgctgcgctttgtacagagcccgcgcttcctcaatcgcctgctcgggacgcacatgctcgcgggcacgctccccgaggagatgctcagcggcgtgcgcgccgtactcgcatgcatggacgccgacgccagggcgggctttctgcggctctaccgcgcgcagatgatcaagcgcgtgctgacgggcgcggcctgtgcccgcgaagaaatgcgcgtggtcagccacttcgcgcacatggaccgctgtggatacctcaacgccatggacttcctgggccgcagcatgggcagcgggctgcgcacgcagcgagtcgagtgcctgctggtgtgccgctacacgctgcccgagcccatccccgcggccgcgctggagcccgtgcccgatctcttccccgcgttgcactgcgcgctggacagcatgcgcgagcaaaaccccgagatcgacttcgccgtgagcctgcacttcggctacgcggagttcgagctcgacatgcgctcggggccgctgctcgtgacgggccacacagtacactacgtgctggcgacagcgctggcgcgcgcgcgagctagctacgcggacctgctggcgctcgcggacggagaccagcgcctactggacgccgcgctctgccgcatgcgcgagcgcggcctggtgcgcgtgtgcgagcaccacatcgagctctgtgaggacgtcaagtgcgagggcgtgctcgcgctagcgacgcccgagcccgagccgcaaaagtga

SEQ ID NO: 11259 - DNA, 915 bp, unidentified
  misc_feature 1..915: note = Synthetic
  source 1..915: mol_type = other DNA
atggcttccaacctaccagtgaggtctttcagcgaagtctgctgtgctgaggcacgggcggctataatacagatggagaacaaccccgacgaaaccgtgtgtaataggatctggaagatccaccgggacctacagtcaagtgacctcaccaccactgtgcaagtaatgatggtgtatcgtttcatatcaaaacgggtgccagaaggctgcttcgccatcctttctggtgtgaacactggaatgtacaacccaagagagcttaaacgaagttatgtgcaatccctgtcttcaggaacctcctgtgagtttctgagatcattagacaagctagcaaagaacttgctggctgtacatgtctgctctgatgtgaagatgtccctcaacaaaaggcaggtgatagattttataagcggtgaagaagatcccaccctccacacagcagagcatctaacaagcttggccctggatgacagcccttctgcagtggtgtacagtggatggcagcaggaagcgatcaagcttcacaacaccatcaggaaaattgctacgatgaggcctgcagactgcaaagcagggaagttctactcggacatcttatccgcctgcgaccagacaaaagaacttctagacgccttcgaccagggaaaacttgcctatgaccgagacgtagtgctcatcgggtggatggatgagatcatcaaaatcttctcaaaacctgattatctggaggcgaagggagtctcatatcaggtcctcaagaacgtcagcaacaaagtcgcccttctccgggaaagcatttggtgggttacagaattagatggaagagaatatctcttcttcgatgagtcttggtacttacatggcatgtctgctttttcagatggtgtgcctggatacgaagacttcatttactaa

SEQ ID NO: 11260 - DNA, 801 bp, unidentified
  misc_feature 1..801: note = Synthetic
  source 1..801: mol_type = other DNA
atggcttccaacctaccagtgaggtctttcagcgaagtctgctgtgctgaggcacgggcggctataatacagatggagaacaaccccgacgaaaccgtgtgtaataggatctggaagatccaccgggacctacagtcaagtgacctcaccaccactgtgcaagtaatgatggtgtatcgtttcatatcaaaacgggtgccagaaggctgcttcgccatcctttctggtgtgaacactggaatgtacaacccaagagagcttaaacgaagttatgtgcaatccctgtcttcaggaacctcctgtgagtttctgagatcattagacaagctagcaaagaacttgctggctgtacatgtctgctctgatgtgaagatgtccctcaacaaaaggcaggtgatagattttataagcggtgaagaagatcccaccctccacacagcagagcatctaacaagcttggccctggatgacagcccttctgcagtggtgtacagtggatggcagcaggaagcgatcaagcttcacaacaccatcaggaaaattgctacgatgaggcctgcagactgcaaagcagggaagttctactcggacatcttatccgcctgcgaccagacaaaagaacttctagacgccttcgaccagggaaaacttgcctatgaccgagacgtagtgctcatcgggtggatggatgagatcatcaaaatcttctcaaaacctgattatctggaggcgaagggagtctcatatcaggtcctcaagaacgtcagcaacaaagtcgcccttctccgggaaagcatttga

SEQ ID NO: 11261 - DNA, 2241 bp, unidentified
  source 1..2241: mol_type = other DNA
  misc_feature 1..2241: note = Synthetic
agggtttacctgagagcctacaacatggataaacgggtgagaggttcatgggccctgggaggacaatctgaagttgatcttgactaccacaaaatattaacagccgggctttcggtccaacaagggattgtgcgacaaagagtcatcccggtatatgttgtgagtgatcttgagggtatttgtcaacatatcattcaggcctttgaagcaggcgtagatttccaagataatgctgacagcttccttttacttttatgtttacatcatgcttaccaaggagatcataggctcttcctcaaaagtgatgcagttcaatacttagagggccatggtttcaggtttgaggtccgagaaaaggagaatgtgcaccgtctggatgaattgttgcccaatgtcaccggtggaaaaaatcttaggagaacattggctgcaatgcctgaagaggagacaacagaagctaatgctggtcagtttttatcctttgccagtttgtttctacccaaacttgtcgttggggagaaagcgtgtctggaaaaagtacaaaggcagattcaggtccatgcagaacaagggctcattcaatatccaacttcctggcaatcagttggacacatgatggtgatcttccgtttgatgagaacaaactttttaatcaagttcctactaatacatcaggggatgcacatggtcgcaggccatgatgcgaatgacacagtaatatctaattctgttgcccaagcaaggttctctggtcttctgattgtaaagactgttctggaccacatcctacaaaaaacagatcttggagtacgacttcatccactggccaggacagcaaaagtcaagaatgaggtcagttcattcaaggcagctcttggctcacttgccaagcatggagaatatgctccatttgcacgtctcctcaatctttctggagtcaacaacttggaacatgggctttatccacaactctcagccattgctttgggtgttgcaactgcccacgggagcacgctggctggtgttaatgtaggggagcaatatcagcaactgcgtgaggctgctactgaagctgaaaagcaactccaacaatatgctgaaacacgtgagttggacaaccttgggcttgatgaacaggaaaagaagattctcatgagcttccaccagaagaagaatgagatcagcttccagcaaactaacgcaatggtaaccctgaggaaagagcggctggccaaactgaccgaagccatcacgactgcatcaaagatcaaggttggagatcgttatcctgatgacaatgatattccatttcccgggccgatctatgatgaaacccaccccaacccttctgatgataatcctgatgattcacgtgatacaactatcccaggtggtgttgttgacccgtatgatgatgagagtaataattatcctgactacgaggattcggctgaaggcaccacaggagatcttgatctcttcaatttggacgacgacgatgacgacagccaaccaggaccaccagacagggggcagagcaaggaaagagcggctcggacacatggcctccaagatccgaccttggacggagcgaaaaaggtgccggagttgaccccaggttcccaccaaccaggcaacctccacatcaccaagccgggttcaaacaccaaccaaccacaaggcaatatgtcatctactctccagagtatgacccctatacaggaagaatcagagcccgatgatcagaaagatgatgatgacgagagtctcacatcccttgactctgaaggtgacgaagatgttgagagcgtatcaggggagaacaacccaactgtagctccaccagcaccagtctacaaagatactggagtagacactaatcagcaaaatggaccaagcaatgctgtagatggtcaaggttctgaaagtgaagctctcccaatcaaccccgaaaagggatctgcactggaagaaacatattatcatctcctaaaaacacagggtccatttgaggcaatcaattattatcacctaatgagtgatgagcccattgcttttagcactgaaagtggcaaggaatatatcttcccagattctcttgaagaagcctacccgccttggttgagtgagaaggaggccttagagaaagaaaatcgttatctggtcattgatggccagcaattcctctggccagtaatgagcctacaggacaagttccttgctgttcttcaacatgactga

SEQ ID NO: 11262 - DNA, 468 bp, unidentified
  misc_feature 1..468: note = Synthetic
  source 1..468: mol_type = other DNA
aagttgtcggtgccggccgctataatgatgatactctcaaccattattagcggcataggaacatttctgcattacaaagaagaactgatgcctagtgcttgcgccaatggatggatacaatacgataaacattgttatttagatactaacattaaaatgtctacagataatacggtttatcagtgtcgtaaattacgagccagattgcctagaccggatactagacatctaagagtattgtttagtattttttataaagattattgggtaagtttaaaaaagaccaataataaatggttagatattaataatgataaagatatagatattagtaaattaacaaattttaaacaactaaacagtacaacggatgctgaagcgtgttatatatacaagtctggaaaactggttaaaacagtatgtaaaagtactcaatctgtactatgtgttaaaagattctacaagtaa

SEQ ID NO: 11263 - DNA, 468 bp, unidentified
  misc_feature 1..468: note = Synthetic
  source 1..468: mol_type = other DNA
aagttgtcggtgccggccgctataatgatgatactctcaaccattattagtggcataggaacatttctgcattacaaagaagaactgatgcctagtgcttgcgccaatggatggatacaatacgataaacattgttatttagatactaacattaaaatgtctacagataatgcggtttatcagtgtcgtaaattacgagccagattgcctagaccggatactagacatctgagagtattgtttagtattttttataaagattattgggtaagtttaaaaaagaccaatgataaatggttagatattaataatgataaagatatagatattagtaaattaacaaattttaaacaactaaacagtacgacggatgctgaagcgtgttatatatacaagtctggaaaactggttaaaacagtatgtaaaagtactcaatctgtactatgtgttaaaaaattctacaagtga

SEQ ID NO: 11264 - DNA, 651 bp, unidentified
  source 1..651: mol_type = other DNA
  misc_feature 1..651: note = Synthetic
acgcatctcgttttcgaacacaactttaaccaaccgcaaaacaaaacatcaactatggctgaaaagaaaagaataaacaacgcagtcggattaatgcaggaatacgcaattaaactcagtgaatcggcaccttcatatgaagacgtcggctttgagggcccgcctcacaaccgaagcttcacgatctcagctacatttagggacaagaagtatgaaggtatcggcccgtcgaagaaagtagcccgtagcgttgccgccaataagatacttgacgatgtggctgaggaaattgcgaatattgatctggacgatccgtctacgcgtaaaagtgttttcgcgcttgcgtgcgaattagcatcgcataaaatagccagaggtctgctgtctggagtgatttcccaggtcggtggatcggttgatctgattagactttgtcgcaacacaacgtatgatgatagcgctgacttattactggaactgtgggatatgagaaaatttgacaagaatggagttgatacgatggttaaacacatggaaagatggtttaccgctgctggactttatctcatcgttgaaaacgataccctaattgttgaagaaatggattatgatgataaagatcatccccgtcgcgatttgggagacatttag

SEQ ID NO: 11265 - DNA, 24 bp, unidentified
  misc_feature 1..24: note = Synthetic
  source 1..24: mol_type = other DNA
attcatctggagaatacttcttga

SEQ ID NO: 11266 - DNA, 10176 bp, unidentified
  source 1..10176: mol_type = other DNA
  misc_feature 1..10176: note = Synthetic
atgaataaccaacggaaaaaggcgaaaaacacgcctttcaatatgctgaaacgcgagagaaaccgcgtgtcgactgtgcaacagctgacaaagagattctcacttggaatgctgcagggacgaggaccattaaaactgttcatggccctggtggcgttccttcgtttcctaacaatcccaccaacagcagggatattgaagagatggggaacaattaaaaaatcaaaagctattaatgttttgagagggttcaggaaagagattggaaggatgctgaacatcttgaataggagacgcagatctgcaggcatgatcattatgctgattccaacagtgatggcgttccatttaaccacacgtaacggagaaccacacatgatcgtcagcagacaagagaaagggaaaagtcttctgtttaaaacagaggatggcgtgaacatgtgtaccctcatggccatggaccttggtgaattgtgtgaagacacaatcacgtacaagtgtccccttctcaggcagaatgagccagaagacatagactgttggtgcaactctacgtccacgtgggtaacttatgggacgtgtaccaccatgggagaacatagaagagaaaaaagatcagtggcactcgttccacatgtgggaatgggactggagacacgaactgaaacatggatgtcatcagaaggggcctggaaacatgtccagagaattgaaacttggatcttgagacatccaggcttcaccatgatggcagcaatcctggcatacaccataggaacgacacatttccaaagagccctgattttcatcttactgacagctgtcactccttcaatgacaatgcgttgcataggaatgtcaaatagagactttgtggaaggggtttcaggaggaagctgggttgacatagtcttagaacatggaagctgtgtgacgacgatggcaaaaaacaaaccaacattggattttgaactgataaaaacagaagccaaacagcctgccaccctaaggaagtactgtatagaggcaaagctaaccaacacaacaacagaatctcgctgcccaacacaaggggaacccagcctaaatgaagagcaggacaaaaggttcgtctgcaaacactccatggtagacagaggatggggaaatggatgtggactatttggaaagggaggcattgtgacctgtgctatgttcagatgcaaaaagaacatggaaggaaaagttgtgcaaccagaaaacttggaatacaccattgtgataacacctcactcaggggaagagcatgcagtcggaaatgacacaggaaaacatggcaaggaaatcaaaataacaccacagagttccatcacagaagcagaattgacaggttatggcactgtcacaatggagtgctctccaagaacgggcctcgacttcaatgagatggtgttgctgcagatggaaaataaagcttggctggtgcacaggcaatggttcctagacctgccgttaccatggttgcccggagcggacacacaagggtcaaattggatacagaaagagacattggtcactttcaaaaatccccatgcgaagaaacaggatgttgttgttttaggatcccaagaaggggccatgcacacagcacttacaggggccacagaaatccaaatgtcatcaggaaacttactcttcacaggacatctcaagtgcaggctgagaatggacaagctacagctcaaaggaatgtcatactctatgtgcacaggaaagtttaaagttgtgaaggaaatagcagaaacacaacatggaacaatagttatcagagtgcaatatgaaggggacggctctccatgcaagatcccttttgagataatggatttggaaaaaagacatgtcttaggtcgcctgattacagtcaacccaattgtgacagaaaaagatagcccagtcaacatagaagcagaacctccattcggagacagctacatcatcataggagtagagccgggacaactgaagctcaactggtttaagaaaggaagttctatcggccaaatgtttgagacaacaatgaggggggcgaagagaatggccattttaggtgacacagcctgggattttggatccttgggaggagtgtttacatctataggaaaggctctccaccaagtctttggagcaatctatggagctgccttcagtggggtttcatggactatgaaaatcctcataggagtcattatcacatggataggaatgaattcacgcagcacctcactgtctgtgacactagtattggtgggaattgtgacactgtatttgggagtcatggtgcaggccgatagtggttgcgttgtgagctggaaaaacaaagaactgaaatgtggcagtgggattttcatcacagacaacgtgcacacatggacagaacaatacaagttccaaccagaatccccttcaaaactagcttcagctatccagaaagcccatgaagagggcatttgtggaatccgctcagtaacaagactggagaatctgatgtggaaacaaataacaccagaattgaatcacattctatcagaaaatgaggtgaagttaactattatgacaggagacatcaaaggaatcatgcaggcaggaaaacgatctctgcggcctcagcccactgagctgaagtattcatggaaaacatggggcaaagcaaaaatgctctctacagagtctcataaccagacctttctcattgatggccccgaaacagcagaatgccccaacacaaatagagcttggaattcgttggaagttgaagactatggctttggagtattcaccaccaatatatggctaaaattgaaagaaaaacaggatgtattctgcgactcaaaactcatgtcagcggccataaaagacaacagagccgtccatgccgatatgggttattggatagaaagtgcactcaatgacacatggaagatagagaaagcctctttcattgaagttaaaaactgccactggccaaaatcacacaccctctggagcaatggagtgctagaaagtgagatgataattccaaagaatctcgctggaccagtgtctcaacacaactatagaccaggctaccatacacaaataacaggaccatggcatctaggtaagcttgagatggactttgatttctgtgatggaacaacagtggtagtgactgaggactgcggaaatagaggaccctctttgagaacaaccactgcctctggaaaactcataacagaatggtgctgccgatcttgcacattaccaccgctaagatacagaggtgaggatgggtgctggtacgggatggaaatcagaccattgaaggagaaagaagagaatttggtcaactccttggtcacagctggacatgggcaggtcgacaacttttcactaggagtcttgggaatggcattgttcctggaggaaatgcttaggacccgagtaggaacgaaacatgcaatactactagttgcagtttcttttgtgacattgatcacagggaacatgtcctttagagacctgggaagagtgatggttatggtaggcgccactatgacggatgacataggtatgggcgtgacttatcttgccctactagcagccttcaaagtcagaccaacttttgcagctggactactcttgagaaagctgacctccaaggaattgatgatgactactataggaattgtactcctctcccagagcaccataccagagaccattcttgagttgactgatgcgttagccttaggcatgatggtcctcaaaatggtgagaaatatggaaaagtatcaattggcagtgactatcatggctatcttgtgcgtcccaaacgcagtgatattacaaaacgcatggaaagtgagttgcacaatattggcagtggtgtccgtttccccactgctcttaacatcctcacagcaaaaaacagattggataccattagcattgacgatcaaaggtctcaatccaacagctatttttctaacaaccctctcaagaaccagcaagaaaaggagctggccattaaatgaggctatcatggcagtcgggatggtgagcattttagccagttctctcctaaaaaatgatattcccatgacaggaccattagtggctggagggctcctcactgtgtgctacgtgctcactggacgatcggccgatttggaactggagagagcagccgatgtcaaatgggaagaccaggcagagatatcaggaagcagtccaatcctgtcaataacaatatcagaagatggtagcatgtcgataaaaaatgaagaggaagaacaaacactgaccatactcattagaacaggattgctggtgatctcaggactttttcctgtatcaataccaatcacggcagcagcatggtacctgtgggaagtgaagaaacaacgggccggagtattgtgggatgttccttcacccccacccatgggaaaggctgaactggaagatggagcctatagaattaagcaaaaagggattcttggatattcccagatcggagccggagtttacaaagaaggaacattccatacaatgtggcatgtcacacgtggcgctgttctaatgcataaaggaaagaggattgaaccatcatgggcggacgtcaagaaagacctaatatcatatggaggaggctggaagttagaaggagaatggaaggaaggagaagaagtccaggtattggcactggagcctggaaaaaatccaagagccgtccaaacgaaacctggtcttttcaaaaccaacgccggaacaataggtgctgtatctctggacttttctcctggaacgtcaggatctccaattatcgacaaaaaaggaaaagttgtgggtctttatggtaatggtgttgttacaaggagtggagcatatgtgagtgctatagcccagactgaaaaaagcattgaagacaacccagagatcgaagatgacattttccgaaagagaagactgaccatcatggacctccacccaggagcgggaaagacgaagagataccttccggccatagtcagagaagctataaaacggggtttgagaacattaatcttggcccccactagagttgtggcagctgaaatggaggaagcccttagaggacttccaataagataccagaccccagccatcagagctgagcacaccgggcgggagattgtggacctaatgtgtcatgccacatttaccatgaggctgctatcaccagttagagtgccaaactacaacctgattatcatggacgaagcccatttcacagacccagcaagtatagcagctagaggatacatctcaactcgagtggagatgggtgaggcagctgggatttttatgacagccactcccccgggaagcagagacccatttcctcagagcaatgcaccaatcatagatgaagaaagagaaatccctgaacgttcgtggaattccggacatgaatgggtcacggattttaaagggaagactgtttggttcgttccaagtataaaagcaggaaatgatatagcagcttgcctgaggaaaaatggaaagaaagtgatacaactcagtaggaagacctttgattctgagtatgtcaagactagaaccaatgattgggacttcgtggttacaactgacatttcagaaatgggtgccaatttcaaggctgagagggttatagaccccagacgctgcatgaaaccagtcatactaacagatggtgaagagcgggtgattctggcaggacctatgccagtgacccactctagtgcagcacaaagaagagggagaataggaagaaatccaaaaaatgagaatgaccagtacatatacatgggggaacctctggaaaatgatgaagactgtgcacactggaaagaagctaaaatgctcctagataacatcaacacgccagaaggaatcattcctagcatgttcgaaccagagcgtgaaaaggtggatgccattgatggcgaataccgcttgagaggagaagcaaggaaaacctttgtagacttaatgagaagaggagacctaccagtctggttggcctacagagtggcagctgaaggcatcaactacgcagacagaaggtggtgttttgatggagtcaagaacaaccaaatcctagaagaaaacgtggaagttgaaatctggacaaaagaaggggaaaggaagaaattgaaacccagatggttggatgctaggatctattctgacccactggcgctaaaagaatttaaggaatttgcagccggaagaaagtctctgaccctgaacctaatcacagaaatgggtaggctcccaaccttcatgactcagaaggcaagagacgcactggacaacttagcagtgctgcacacggctgaggcaggtggaagggcgtacaaccatgctctcagtgaactgccggagaccctggagacattgcttttactgacacttctggctacagtcacgggagggatctttttattcttgatgagcggaaggggcatagggaagatgaccctgggaatgtgctgcataatcacggctagcatcctcctatggtacgcacaaatacagccacactggatagcagcttcaataatactggagttttttctcatagttttgcttattccagaacctgaaaaacagagaacaccccaagacaaccaactgacctacgttgtcatagccatcctcacagtggtggccgcaaccatggcaaacgagatgggtttcctagaaaaaacgaagaaagatctcggattgggaagcattgcaacccagcaacccgagagcaacatcctggacatagatctacgtcctgcatcagcatggacgctgtatgccgtggccacaacatttgttacaccaatgttgagacatagcattgaaaattcctcagtgaatgtgtccctaacagctatagccaaccaagccacagtgttaatgggtctcgggaaaggatggccattgtcaaagatggacatcggagttccccttctcgccattggatgctactcacaagtcaaccccataactctcacagcagctcttttcttattggtagcacattatgccatcatagggccaggactccaagcaaaagcaaccagagaagctcagaaaagagcagcggcgggcatcatgaaaaacccaactgtcgatggaataacagtgattgacctagatccaataccttatgatccaaagtttgaaaagcagttgggacaagtaatgctcctagtcctctgcgtgactcaagtattgatgatgaggactacatgggctctgtgtgaggctttaaccttagctaccgggcccatctccacattgtgggaaggaaatccagggaggttttggaacactaccattgcggtgtcaatggctaacatttttagagggagttacttggccggagctggacttctcttttctattatgaagaacacaaccaacacaagaaggggaactggcaacataggagagacgcttggagagaaatggaaaagccgattgaacgcattgggaaaaagtgaattccagatctacaagaaaagtggaatccaggaagtggatagaaccttagcaaaagaaggcattaaaagaggagaaacggaccatcacgctgtgtcgcgaggctcagcaaaactgagatggttcgttgagagaaacatggtcacaccagaagggaaagtagtggacctcggttgtggcagaggaggctggtcatactattgtggaggactaaagaatgtaagagaagtcaaaggcctaacaaaaggaggaccaggacacgaagaacccatccccatgtcaacatatgggtggaatctagtgcgtcttcaaagtggagttgacgttttcttcatcccgccagaaaagtgtgacacattattgtgtgacataggggagtcatcaccaaatcccacagtggaagcaggacgaacactcagagtccttaacttagtagaaaattggttgaacaacaacactcaattttgcataaaggttctcaacccatatatgccctcagtcatagaaaaaatggaagcactacaaaggaaatatggaggagccttagtgaggaatccactctcacgaaactccacacatgagatgtactgggtatccaatgcttccgggaacatagtgtcatcagtgaacatgatttcaaggatgttgatcaacagatttacaatgagatacaagaaagccacttacgagccggatgttgacctcggaagcggaacccgtaacatcgggattgaaagtgagataccaaacctagatataattgggaaaagaatagaaaaaataaagcaagagcatgaaacatcatggcactatgaccaagaccacccatacaaaacgtgggcataccatggtagctatgaaacaaaacagactggatcagcatcatccatggtcaacggagtggtcaggctgctgacaaaaccttgggacgtcgtccccatggtgacacagatggcaatgacagacacgactccatttggacaacagcgcgtttttaaagagaaagtggacacgagaacccaagaaccgaaagaaggcacgaagaaactaatgaaaataacagcagagtggctttggaaagaattagggaagaaaaagacacccaggatgtgcaccagagaagaattcacaagaaaggtgagaagcaatgcagccttgggggccatattcactgatgagaacaagtggaagtcggcacgtgaggctgttgaagatagtaggttttgggagctggttgacaaggaaaggaatctccatcttgaaggaaagtgtgaaacatgtgtgtacaacatgatgggaaaaagagagaagaagctaggggaattcggcaaggcaaaaggcagcagagccatatggtacatgtggcttggagcacgcttcttagagtttgaagccctaggattcttaaatgaagatcactggttctccagagagaactccctgagtggagtggaaggagaagggctgcacaagctaggttacattctaagagacgtgagcaagaaagagggaggagcaatgtatgccgatgacaccgcaggatgggatacaagaatcacactagaagacctaaaaaatgaagaaatggtaacaaaccacatggaaggagaacacaagaaactagccgaggccattttcaaactaacgtaccaaaacaaggtggtgcgtgtgcaaagaccaacaccaagaggcacagtaatggacatcatatcgagaagagaccaaagaggtagtggacaagttggcacctatggactcaatactttcaccaatatggaagcccaactaatcagacagatggagggagaaggagtctttaaaagcattcagcacctaacaatcacagaagaaatcgctgtgcaaaactggttagcaagagtggggcgcgaaaggttatcaagaatggccatcagtggagatgattgtgttgtgaaacctttagatgacaggttcgcaagcgctttaacagctctaaatgacatgggaaagattaggaaagacatacaacaatgggaaccttcaagaggatggaatgattggacacaagtgcccttctgttcacaccatttccatgagttaatcatgaaagacggtcgcgtactcgttgttccatgtagaaaccaagatgaactgattggcagagcccgaatctcccaaggagcagggtggtctttgcgggagacggcctgtttggggaagtcttacgcccaaatgtggagcttgatgtacttccacagacgcgacctcaggctggcggcaaatgctatttgctcggcagtaccatcacattgggttccaacaagtcgaacaacctggtccatacatgctaaacatgaatggatgacaacggaagacatgctgacagtctggaacagggtgtggattcaagaaaacccatggatggaagacaaaactccagtggaatcatgggaggaaatcccatacttggggaaaagagaagaccaatggtgcggctcattgattgggttaacaagcagggccacctgggcaaagaacatccaagcagcaataaatcaagttagatcccttataggcaatgaagaatacacagattacatgccatccatgaaaagattcagaagagaagaggaagaagcaggagttctgtggtag

SEQ ID NO: 11267 - DNA, 66 bp, unidentified; identical to SEQ ID NO: 2117
  source 1..66: mol_type = other DNA
  misc_feature 1..66: note = Synthetic

SEQ ID NO: 11268 - DNA, 10182 bp, unidentified
  source 1..10182: mol_type = other DNA
  misc_feature 1..10182: note = Synthetic
ctgatgaacaaccaacggaaaaagacgggtcgaccgtctttcaatatgctgaaacgcgcgagaaaccgcgtgtcaactgtttcacagttggcgaagagattctcaaaaggattgctttcaggccaaggacccatgaaattggtgatggcttttatagcattcctaagatttctagccatacctccaacagcaggaattttggctagatggggctcattcaagaagaatggagcgatcaaagtgttacggggtttcaagaaagaaatctcaaacatgttgaacataatgaacaggaggaaaagatctgtgaccatgctcctcatgctgctgcccacagccctggcgttccatctgaccacccgagggggagagccgcacatgatagttagcaagcaggaaagaggaaaatcacttttgtttaagacctctgcaggtgtcaacatgtgcacccttattgcaatggatttgggagagttatgtgaggacacaatgacctacaaatgcccccggatcactgagacggaaccagatgacgttgactgttggtgcaatgccacggagacatgggtgacctatggaacatgttctcaaactggtgaacaccgacgagacaaacgttccgtcgcactggcaccacacgtagggcttggtctagaaacaagaaccgaaacgtggatgtcctctgaaggcgcttggaaacaaatacaaaaagtggagacctgggctctgagacacccaggattcacggtgatagccctttttctagcacatgccataggaacatccatcacccagaaagggatcatttttattttgctgatgctggtaactccatccatggccatgcggtgcgtgggaataggcaacagagacttcgtggaaggactgtcaggagctacgtgggtggatgtggtactggagcatggaagttgcgtcactaccatggcaaaagacaaaccaacactggacattgaactcttgaagacggaggtcacaaaccctgccgtcctgcgcaaactgtgcattgaagctaaaatatcaaacaccaccaccgattcgagatgtccaacacaaggagaagccacgctggtggaagaacaggacacgaactttgtgtgtcgacgaacgttcgtggacagaggctggggcaatggttgtgggctattcggaaaaggtagcttaataacgtgtgctaagtttaagtgtgtgacaaaactggaaggaaagatagtccaatatgaaaacttaaaatattcagtgatagtcaccgtacacactggagaccagcaccaagttggaaatgagaccacagaacatggaacaactgcaaccataacacctcaagctcccacgtcggaaatacagctgacagactacggagctctaacattggattgttcacctagaacagggctagactttaatgagatggtgttgttgacaatgaaaaaaaaatcatggctcgtccacaaacaatggtttctagacttaccactgccttggacctcgggggcttcaacatcccaagagacttggaatagacaagacttgctggtcacatttaagacagctcatgcaaaaaagcaggaagtagtcgtactaggatcacaagaaggagcaatgcacactgcgttgactggagcgacagaaatccaaacgtctggaacgacaacaatttttgcaggacacctgaaatgcagattaaaaatggataaactgattttaaaagggatgtcatatgtaatgtgcacagggtcattcaagttagagaaggaagtggctgagacccagcatggaactgttctagtgcaggttaaatacgaaggaacagatgcaccatgcaagatccccttctcgtcccaagatgagaagggagtaacccagaatgggagattgataacagccaaccccatagtcactgacaaagaaaaaccagtcaacattgaagcggagccaccttttggtgagagctacattgtggtaggagcaggtgaaaaagctttgaaactaagctggttcaagaagggaagcagtatagggaaaatgtttgaagcaactgcccgtggagcacgaaggatggccatcctgggagacactgcatgggacttcggttctataggaggggtgttcacgtctgtgggaaaactgatacaccagatttttgggactgcgtatggagttttgttcagcggtgtttcttggaccatgaagataggaatagggattctgctgacatggctaggattaaactcaaggagcacgtccctttcaatgacgtgtatcgcagttggcatggtcacactgtacctaggagtcatggttcaggcggactcgggatgtgtaatcaactggaaaggcagagaactcaaatgtggaagcggcatttttgtcaccaatgaagtccacacctggacagagcaatataaattccaggccgactcccctaagagactatcagcggccattgggaaggcatgggaggagggtgtgtgtggaattcgatcagccactcgtctcgagaacatcatgtggaagcaaatatcaaatgaattaaaccacatcttacttgaaaatgacatgaaatttacagtggtcgtaggagacgttagtggaatcttggcccaaggaaagaaaatgattaggccacaacccatggaacacaaatactcgtggaaaagctggggaaaagccaaaatcataggagcagatgtacagaataccaccttcatcatcgacggcccaaacaccccagaatgccctgataaccaaagagcatggaacatttgggaagttgaagactatggatttggaattttcacgacaaacatatggttgaaattgcgtgactcctacactcaagtgtgtgaccaccggctaatgtcagctgccatcaaggatagcaaagcagtccatgctgacatggggtactggatagaaagtgaaaagaacgagacttggaagttggcaagagcctccttcatagaagttaagacatgcatctggccaaaatcccacactctatggagcaatggagtcctggaaagtgagatgataatcccaaagatatatggaggaccaatatctcagcacaactacagaccaggatatttcacacaaacagcagggccgtggcacttgggcaagttagaactagattttgatttatgtgaaggtaccactgttgttgtggatgaacattgtggaaatcgaggaccatctcttagaaccacaacagtcacaggaaagacaatccatgaatggtgctgtagatcttgcacgttaccccccctacgtttcaaaggagaagacgggtgctggtacggcatggaaatcagaccagtcaaggagaaggaagagaacctagttaagtcaatggtctctgcagggtcaggagaagtggacagtttttcactaggactgctatgcatatcaataatgatcgaagaggtaatgagatccagatggagcagaaaaatgctgatgactggaacattggctgtgttcctccttctcacaatgggacaattgacatggaatgatctgatcaggctatgtatcatggttggagccaacgcttcagacaagatggggatgggaacaacgtacctagctttgatggccactttcagaatgagaccaatgttcgcagtcgggctactgtttcgcagattaacatctagagaagttcttcttcttacagttggattgagtctggtggcatctgtagaactaccaaattccttagaggagctaggggatggacttgcaatgggcatcatgatgttgaaattactgactgattttcagtcacatcagctatgggctaccttgctgtctttaacatttgtcaaaacaactttttcattgcactatgcatggaagacaatggctatgatactgtcaattgtatctctcttccctttatgcctgtccacgacttctcaaaaaacaacatggcttccggtgttgctgggatctcttggatgcaaaccactaaccatgtttcttataacagaaaacaaaatctggggaaggaaaagctggcctctcaatgaaggaattatggctgttggaatagttagcattcttctaagttcacttctcaagaatgatgtgccactagctggcccactaatagctggaggcatgctaatagcatgttatgtcatatctggaagctcggccgatttatcactggagaaagcggctgaggtctcctgggaagaagaagcagaacactctggtgcctcacacaacatactagtggaggtccaagatgatggaaccatgaagataaaggatgaagagagagatgacacactcaccattctcctcaaagcaactctgctagcaatctcaggggtatacccaatgtcaataccggcgaccctctttgtgtggtatttttggcagaaaaagaaacagagatcaggagtgctatgggacacacccagccctccagaagtggaaagagcagtccttgatgatggcatttatagaattctccaaagaggattgttgggcaggtctcaagtaggagtaggagtttttcaagaaggcgtgttccacacaatgtggcacgtcaccaggggagctgtcctcatgtaccaagggaagagactggaaccaagttgggccagtgtcaaaaaagacttgatctcatatggaggaggttggaggtttcaaggatcctggaacgcgggagaagaagtgcaggtgattgctgttgaaccggggaagaaccccaaaaatgtacagacagcgccgggtaccttcaagacccctgaaggcgaagttggagccatagctctagactttaaacccggcacatctggatctcctatcgtgaacagagagggaaaaatagtaggtctttatggaaatggagtggtgacaacaagtggtacctacgtcagtgccatagctcaagctaaagcatcacaagaagggcctctaccagagattgaggacgaggtgtttaggaaaagaaacttaacaataatggacctacatccaggatcgggaaaaacaagaagataccttccagccatagtccgtgaggccataaaaagaaagctgcgcacgctagtcttagctcccacaagagttgtcgcttctgaaatggcagaggcgctcaagggaatgccaataaggtatcagacaacagcagtgaagagtgaacacacgggaaaggagatagttgaccttatgtgtcacgccactttcactatgcgtctcctgtctcctgtgagagttcccaattataatatgattatcatggatgaagcacattttaccgatccagccagcatagcagccagagggtatatctcaacccgagtgggtatgggtgaagcagctgcgattttcatgacagccactccccccggatcggtggaggcctttccacagagcaatgcagttatccaagatgaggaaagagacattcctgaaagatcatggaactcaggctatgactggatcactgatttcccaggtaaaacagtctggtttgttccaagcatcaaatcaggaaatgacattgccaactgtttaagaaagaatgggaaacgggtggtccaattgagcagaaaaacttttgacactgagtaccagaaaacaaaaaataacgactgggactatgttgtcacaacagacatatccgaaatgggagcaaacttccgagccgacagggtaatagacccgaggcggtgcctgaaaccggtaatactaaaagatggcccagagcgtgtcattctagccggaccgatgccagtgactgtggctagcgccgcccagaggagaggaagaattggaaggaaccaaaataaggaaggcgatcagtatatttacatgggacagcctctaaacaatgatgaggaccacgcccattggacagaagcaaaaatgctccttgacaacataaacacaccagaagggattatcccagccctctttgagccggagagagaaaagagtgcagcaatagacggggaatacagactacggggtgaagcgaggaaaacgttcgtggagctcatgagaagaggagatctacctgtctggctatcctacaaagttgcctcagaaggcttccagtactccgacagaaggtggtgctttgatggggaaaggaacaaccaggtgttggaggagaacatggacgtggagatctggacaaaagaaggagaaagaaagaaactacgaccccgctggctggatgccagaacatactctgacccactggctctgcgcgaattcaaagagttcgcagcaggaagaagaagcgtctcaggtgacctaatattagaaatagggaaacttccacaacatttaacgcaaagggcccagaacgccttggacaatctggttatgttgcacaactctgaacaaggaggaaaagcctatagacacgccatggaagaactaccagacaccatagaaacgttaatgctcctagctttgatagctgtgctgactggtggagtgacgttgttcttcctatcaggaaggggtctaggaaaaacatccattggcctactctgcgtgattgcctcaagtgcactgttatggatggccagtgtggaaccccattggatagcggcctctatcatactggagttctttctgatggtgttgcttattccagagccggacagacagcgcactccacaagacaaccagctagcatacgtggtgataggtctgttattcatgatattgacagtggcagccaatgagatgggattactggaaaccacaaagaaggacctggggattggtcatgcagctgctgaaaaccaccatcatgctgcaatgctggacgtagacctacatccagcttcagcctggactctctatgcagtggccacaacaattatcactcccatgatgagacacacaattgaaaacacaacggcaaatatttccctgacagctattgcaaaccaggcagctatattgatgggacttgacaagggatggccaatatcaaagatggacataggagttccacttctcgccttggggtgctattctcaggtgaacccgctgacgctgacagcggcggtattgatgctagtggctcattatgccataattggacccggactgcaagcaaaagctactagagaagctcaaaaaaggacagcagccggaataatgaaaaacccaactgtcgacgggatcgttgcaatagatttggaccctgtggtttacgatgcaaaatttgaaaaacagctaggccaaataatgttgttgatactttgcacatcacagatcctcctgatgcggaccacatgggccttgtgtgaatccatcacactagccactggacctctgactacgctttgggagggatctccaggaaaattctggaacaccacgatagcggtgtccatggcaaacatttttaggggaagttatctagcaggagcaggtctggccttttcattaatgaaatctctaggaggaggtaggagaggcacgggagcccaaggggaaacactgggagaaaaatggaaaagacagctaaaccaattgagcaagtcagaattcaacacttacaaaaggagtgggattatagaggtggatagatctgaagccaaagaggggttaaaaagaggagaaacgactaaacacgcagtgtcgagaggaacggccaaactgaggtggtttgtggagaggaaccttgtgaaaccagaagggaaagtcatagacctcggttgtggaagaggtggctggtcatattattgcgctgggctgaagaaagtcacagaagtgaaaggatacacgaaaggaggacctggacatgaggaaccaatcccaatggcaacctatggatggaacctagtaaagctatactccgggaaagatgtattctttacaccacctgagaaatgtgacaccctcttgtgtgatattggtgagtcctctccgaacccaactatagaagaaggaagaacgttacgtgttctaaagatggtggaaccatggctcagaggaaaccaattttgcataaaaattctaaatccctatatgccgagtgtggtagaaactttggagcaaatgcaaagaaaacatggaggaatgctagtgcgaaatccactctcaagaaactccactcatgaaatgtactgggtttcatgtggaacaggaaacattgtgtcagcagtaaacatgacatctagaatgctgctaaatcgattcacaatggctcacaggaagccaacatatgaaagagacgtggacttaggcgctggaacaagacatgtggcagtagaaccagaggtggccaacctagatatcattggccagaggatagagaatataaaaaatgaacacaaatcaacatggcattatgatgaggacaatccatacaaaacatgggcctatcatggatcatatgaggtcaagccatcaggatcagcctcatccatggtcaatggtgtggtgagactgctaaccaaaccatgggatgtcattcccatggtcacacaaatagccatgactgacaccacaccctttggacaacagagggtgtttaaagagaaagttgacacgcgtacaccaaaagcgaaacgaggcacagcacaaattatggaggtgacagccaggtggttatggggttttctctctagaaacaaaaaacccagaatctgcacaagagaggagttcacaagaaaagtcaggtcaaacgcagctattggagcagtgttcgttgatgaaaatcaatggaactcagcaaaagaggcagtggaagatgaacggttctgggaccttgtgcacagagagagggagcttcataaacaaggaaaatgtgccacgtgtgtctacaacatgatgggaaagagagagaaaaaattaggagagttcggaaaggcaaaaggaagtcgcgcaatatggtacatgtggttgggagcgcgctttttagagtttgaagcccttggtttcatgaatgaagatcactggttcagcagagagaattcactcagtggagtggaaggagaaggactccacaaacttggatacatactcagagacatatcaaagattccagggggaaatatgtatgcagatgacacagccggatgggacacaagaataacagaggatgatcttcagaatgaggccaaaatcactgacatcatggaacctgaacatgccctattggccacgtcaatctttaagctaacctaccaaaacaaggtagtaagggtgcagagaccagcgaaaaatggaaccgtgatggatgtcatatccagacgtgaccagagaggaagtggacaggttggaacctatggcttaaacaccttcaccaacatggaggcccaactaataagacaaatggagtctgagggaatcttttcacccagcgaattggaaaccccaaatctagccgaaagagtcctcgactggttgaaaaaacatggcaccgagaggctgaaaagaatggcaatcagtggagatgactgtgtggtgaaaccaatcgatgacagatttgcaacagccttaacagctttgaatgacatgggaaaggtaagaaaagacataccgcaatgggaaccttcaaaaggatggaatgattggcaacaagtgcctttctgttcacaccatttccaccagctgattatgaaggatgggagggagatagtggtgccatgccgcaaccaagatgaacttgtaggtagggccagagtatcacaaggcgccggatggagcttgagagaaactgcatgcctaggcaagtcatatgcacaaatgtggcagctgatgtacttccacaggagagacttgagattagcggctaatgctatctgttcagccgttccagttgattgggtcccaaccagccgcaccacctggtcgatccatgcccaccatcaatggatgacaacagaagacatgttgtcagtgtggaatagggtttggatagaggaaaacccatggatggaggacaagactcatgtgtccagttgggaagacgttccatacctaggaaaaagggaagatcaatggtgtggttccctaataggcttaacagcacgagccacctgggccaccaacatacaagtggccataaaccaagtgagaaggctcattgggaatgagaattatctagacttcatgacatcaatgaagagattcaaaaacgagagtgatcccgaaggggcactctggtaa

SEQ ID NO: 11269 - DNA, 33 bp, unidentified; identical to SEQ ID NO: 2119
  misc_feature 1..33: note = Synthetic
  source 1..33: mol_type = other DNA

SEQ ID NO: 11270 - DNA, 10176 bp, unidentified
  misc_feature 1..10176: note = Synthetic
  source 1..10176: mol_type = other DNA
ctgatgaacaaccaacggaagaagacgggaaaaccgtctatcaatatgctgaaacgcgtgagaaaccgtgtgtcaactggatcacagttggcgaagagattctcaaaaggactgctgaacggccagggaccaatgaaattggttatggcgttcatagctttcctcagatttctagccattccaccaacagcaggagtcttggctagatggggaaccttcaagaagtcgggggccattaaggtcctgaaaggcttcaagaaggagatctcaaacatgctgagcataatcaaccaacggaaaaagacatcgctctgtctcatgatgatattgccagcagcacttgctttccacttgacttcacgagatggagagccgcgcatgattgtggggaagaatgaaagaggtaaatccctactttttaagacagcctctggaatcaacatgtgcacactcatagccatggatttgggagagatgtgtgatgacacggtcacttacaaatgcccccacattaccgaagtggaacctgaagacattgactgctggtgcaaccttacatcaacatgggtgacttatggaacgtgcaatcaagctggagagcatagacgcgacaagagatcagtggcgttagctccccatgtcggcatgggactggacacacgcacccaaacctggatgtcggctgaaggagcttggagacaagtcgagaaggtagagacatgggcccttaggcacccagggttcaccatactagccctatttctcgcccattacataggcacttccctgacccagaaggtggttattttcatattattaatgctggtcaccccatccatgacaatgagatgtgtgggagtaggaaacagagattttgtggaagggctatcaggagctacgtgggttgacgtggtgctcgagcacggggggtgtgtgactaccatggctaagaacaagcccacgctggatatagagcttcagaagaccgaggccacccaactggcgaccctaaggaagctatgcattgaggggaaaattaccaacataacaactgactcaagatgtcctacccaaggggaagcggttttgcctgaggagcaggaccagaactacgtgtgtaagcatacatacgtagacagaggttgggggaacggttgtggtttgtttggcaaaggaagcttggtaacatgtgcgaaatttcaatgcctggaaccaatagagggaaaagtggtgcaatatgagaacctcaaatacaccgtcatcattacagtgcacacaggagaccaacaccaggtgggaaatgaaacgcaaggagtcacggctgagataacacctcaggcatcaaccactgaagccatcttgcctgaatatggaacccttgggctagaatgctcaccacggacaggtttggatttcaatgaaatgatcttactaacaatgaagaacaaagcatggatggtacatagacaatggttctttgacctacctctaccatgggcatcaggagctacaacagaaacaccaacctggaacaggaaggagcttcttgtgacattcaaaaacgcacatgcgaaaaaacaagaagtagttgtccttggatcgcaagagggagcaatgcataccgcactgacaggagctacagaaatccaaaactcaggaggcacaagcattttcgcggggcacttaaaatgtagacttaagatggacaaattggaactcaaggggatgagctatgcaatgtgcacgaatacctttgtgttgaagaaagaagtctcagaaacgcagcacgggacaatactcattaaggttgagtacaaaggggaagatgcaccttgcaagattcccttttccacagaggatggacaagggaaagctcataatggcagactgatcacagccaaccctgtggtgactaagaaggaggagcctgtcaatattgaggctgaacctccttttggggaaagcaatatagtaattggaattggagacaacgccttgaaaatcaactggtacaagaaggggagctcgattgggaagatgttcgaggccactgaaaggggtgcaaggcgcatggccatcttgggagacacagcttgggactttggatcagtgggtggtgttctgaactcattaggcaaaatggtgcaccaaatatttggaagtgcttatacagccctgttcagtggagtctcttgggtgatgaaaattggaataggtgtcctcttgacttggatagggttgaattcaaaaaacacatccatgtcattttcatgcattgcgataggaatcattacactctatctgggagctgtggtacaagctgacatggggtgtgtcataaactggaagggcaaagaactcaaatgtggaagcggaattttcgtcaccaatgaggtccatacctggacagagcaatacaaattccaagcagactccccaaaaagattggcaacagccattgcaggcgcctgggagaatggagtgtgtggaattaggtcaacaaccagaatggagaatctcttgtggaagcaaatagccaatgaactgaactacatattatgggaaaacaatatcaaattaacggtagttgtgggcgatacacttggggtcttagagcaagggaaaagaacactaacaccacaacccatggagctaaaatactcatggaaaacgtggggaaaggcaaaaatagtgacagctgaaacacaaaattcctctttcataatagacgggccaaacacaccggagtgtccaagtgcctcaagagcatggaatgtgtgggaggtggaagattacgggttcggagtcttcacaaccaacatatggctgaaactccgagaggtctacacccaactatgtgaccataggctaatgtcggcagctgtcaaggatgagagggccgtgcatgccgacatgggctactggatagaaagccaaaagaatggaagttggaagctagaaaaagcatccctcatagaggtaaaaacctgcacatggccaaaatcacacactctctggactaatggtgtgctagagagtgacatgatcatcccaaagagtctagctggtcctatctcacaacacaactacaggcccgggtaccacacccaaacggcaggaccctggcacttaggaaaattggagctggacttcaactactgtgaaggaacaacagttgtcatcacagaaagctgtgggacaagaggcccatcattgagaacaacaacagtgtcagggaagttgatacacgaatggtgttgccgctcgtgcacacttccccccctgcgatacatgggagaagacggctgctggtatggcatggaaatcagacccatcagtgagaaagaagagaacatggtaaagtctttagtctcagcgggaagtggaaaggtggacaacttcacaatgggtgtcttgtgtttggcaatcctctttgaagaggtgttgagaggaaaatttgggaagaaacacatgattgcaggggttttctttacgtttgtgctccttctctcagggcaaataacatggagagacatggcgcacacactaataatgatcgggtccaacgcctctgacaggatgggaatgggcgtcacctacctagctctaattgcaacatttaaaatccagccattcttggctttgggatttttcctaagaaagctgacatctagagaaaatttattgttaggagttgggttggccatggcaacaacgttacaactgccagaggacattgaacaaatggcaaatggagtcgctctggggctcatggctcttaaactgataacacaatttgaaacataccaattgtggacggcattagtctccttaacgtgttcaaacacaatttttacgttgactgttgcctggagaacagccactctgattttggccggagtttcgcttttaccagtgtgccagtcttcaagcatgaggaaaacagattggctcccaatgacagtggcagctatgggagttccaccccttccactttttatttttagcttgaaagacacactcaaaaggagaagctggccactgaatgaaggggtgatggctgttgggcttgtgagcattctggccagttctctccttagaaatgatgtgcccatggctggaccattagtggccgggggcttgctgatagcgtgctacgtcataactggcacgtcagcggacctcactgtagaaaaagccccagatgtaacatgggaggaagaggctgagcagacaggagtgtcccacaacttaatgatcacagttgatgatgatggaacaatgagaataaaagatgatgagactgagaacatcctaacagtgcttttaaaaacagcattactaatagtatcaggcatttttccatactccatacccgcaacattgttggtctggcacacttggcaaaaacaaacccaaagatccggcgttttatgggacgtacccagccccccagagacacagaaagcagaactggaagaaggggtttataggatcaaacagcaaggaatttttgggaaaacccaagtaggggttggagtacagaaagaaggagtcttccacaccatgtggcacgtcacaagaggggcagtgttgacacataatgggaaaagactggaaccaaactgggctagtgtgaaaaaagatctgatttcatatggaggaggatggagactgagcgcacaatggcaaaagggggaggaggtgcaggttattgccgtagagccagggaagaacccaaagaactttcaaaccacgccaggcactttccagactactacaggggaaataggagcaattgcactggatttcaagcctggaacttcaggatctcctatcataaatagagagggaaaggtagtgggactgtatggcaatggagtggttacaaagaatggtggctatgtcagcggaatagcgcaaacaaatgcagaaccagatggaccgacaccagagttggaagaagagatgttcaaaaagcgaaacctgaccataatggatcttcatcctgggtcaggaaagacacggaaataccttccagctattgtcagagaggcaatcaagagacgtttaagaaccttaattttggcaccgacaagggtggttgcagctgagatggaagaagcattgaaagggctcccaataaggtaccaaacaacagcaacaaaatctgaacacacaggaagagagattgttgatctaatgtgccacgcaacgttcacaatgcgtttgctgtcaccagttagggttccaaattacaacttgataataatggatgaggcccatttcacagacccagccagtatagcggctagagggtacatatcaactcgtgttggaatgggagaggcagccgcaatcttcatgacagcaacaccccctggaacagctgatgcctttcctcagagcaacgctccaattcaagatgaagaaagggacataccagaacgctcatggaattcaggcaatgaatggattaccgacttcgctgggaaaacggtgtggtttgtccctagcattaaagccggaaatgacatagcaaactgcttgcgaaaaaacgggaaaaaagtcattcaacttagtaggaagacttttgacacagaatatcagaagactaaactgaatgattgggactttgtggtgacaactgacatttcagaaatgggggccaatttcaaagcagatagagtgatcgacccaagaagatgtctcaaaccagtgatcttgacagatggaccagagcgggtgatcctggccggaccaatgccagtcaccgcggcgagtgctgcgcaaaggagagggagagttggcaggaacccacaaaaagagaatgaccagtacatattcacgggccagcctctcaacaatgatgaagaccatgctcactggacagaagcaaaaatgctgctggacaacatcaacacaccagaagggattataccagctctctttgaaccagaaagggagaagtcagccgccatagacggtgagtatcgcctgaagggtgagtccaggaagactttcgtggaactcatgaggaggggtgaccttccagtttggttagcccataaagtagcatcagaaggaatcaaatacacagatagaaaatggtgctttgatgggcaacgcaataatcaaattttagaggagaacatggatgtggaaatttggacaaaggaaggagaaaagaaaaaattgagacctaggtggcttgatgcccgcacttattcagatccattggcactcaaggaattcaaggactttgcggctggcagaaagtcaatcgcccttgatcttgtgacagaaataggaagagtgccttcacatctagcccacagaacaagaaacgctctggacaatctggtgatgctgcatacgtcagaagatggcggtagggcttacaggcatgcggtggaggaactaccagaaacaatggaaacactcctactcttgggactaatgatcttgttgacaggtggagcaatgcttttcttgatatcaggtaaagggattggaaagacttcaataggactcatttgtgtaatcgcttccagcggcatgttgtggatggccgaagttccactccaatggatcgcgtcggctatagtcctggagttttttatgatggtgttgctcataccagaaccagaaaagcagagaaccccccaagacaaccaactcgcatatgtcgtgataggcatacttacattggctgcaacaatagcagccaatgaaatgggactgctggaaaccacaaagagagacttaggaatgtctaaggagccaggtgttgtttctccaaccagctatttggatgtggacttgcacccagcatcagcctggacattgtacgccgtggccactacagtaataacaccaatgttaagacataccatagagaattctacagcaaatgtgtccctggcagctatagccaaccaggcagtggtcctgatgggtttggacaaaggatggccaatatcaaaaatggacttaggcgtgccactactggcactgggttgctattcacaagtgaacccactgactctaactgcggcagtacttttgctaatcacacattatgctatcataggtccaggattgcaagcaaaagccacccgtgaagctcagaaaaggacagctgctggaataatgaagaatccaacagtggatgggataatgacaatagacctagattctgtaatatttgattcaaaatttgaaaaacaactgggacaggttatgctcctggttttgtgcgcagtccaactcttgctaatgagaacatcatgggccttgtgtgaagctttaactctagctacaggaccaataacaacactctgggaaggatcacctggtaagttctggaacaccacgatagctgtttccatggcgaacatttttagagggagctatttagcaggagctgggcttgctttttctattatgaaatcagttggaacaggaaaaagaggaacaggctcacaaggtgaaactttaggagaaaaatggaaaaagaaattaaatcaattatcccggaaagagtttgacctttacaagaaatctggaatcactgaagtggatagaacagaagccaaagaagggttgaaaagaggagagacaacacatcatgccgtgtcccgaggtagcgcaaaacttcaatggtttgtggaaagaaacatggtcgttcccgaaggaagagtcatagacttgggctgtggaagaggaggctggtcatattactgtgcaggactgaaaaaagtcacagaagtgcgaggatacacaaaaggcggtccaggacacgaagaaccagtacctatgtctacatatggatggaacatagttaagttaatgagcggaaaggatgtgttctatctcccacctgaaaagtgtgataccctgttgtgtgacattggagaatcttcaccaagcccaacagtggaagagagcagaactataagagttttgaagatggttgaaccatggctaaaaaacaaccagttttgcattaaagttttgaacccttacatgccaactgtgattgagcacctagaaagactacaaaggaaacatggaggaatgcttgtgagaaatccactttcacgaaactccacgcacgaaatgtactggatatctaatggcacaggtaacattgtctcttcagtcaacatggtgtctagattgctactgaacaggttcacgatgacacacaggagacccaccatagagaaagatgtggatttaggagcaggaactcgacatgttaatgcggaaccagaaacacccaacatggatgtcattggggaaagaataaaaaggatcaaggaggagcataattcaacatggcactatgatgacgaaaacccctacaaaacgtgggcttaccatggatcctatgaagtcaaagccacaggctcagcctcctccatgataaatggagtcgtgaaactcctcaccaaaccatgggatgtggtgcccatggtgacacagatggcaatgacagacacaactccatttggccagcagagagtctttaaagagaaagtggacaccaggacgcccaggcccatgccagggacaagaaaggctatggagatcacagcggagtggctctggagaaccctgggaaggaacaaaagacccagattatgcacaagggaagagtttacaaaaaaggtcagaactaacgcagccatgggcgccgttttcacagaggagaaccaatgggacagtgcgaaagctgctgttgaggatgaagaattttggaaacttgtggacagagaacgtgaactccacaaattgggcaaatgtggaagctgcgtttataacatgatgggcaagagagagaaaaaacttggagagtttggcaaagcaaaaggcagtagagctatatggtacatgtggttgggagccaggtaccttgagttcgaagcccttggattcttaaatgaagaccactggttctcgcgtgaaaactcttacagtggagtagaaggagaaggactgcacaagctaggctacatattaagggacatttccaagatacccggaggagccatgtatgctgatgacacagctggttgggacacaagaataacagaagatgacctgcacaatgaggaaaagatcatacagcaaatggaccctgaacacaggcagttagcgaacgctatattcaagctcacataccaaaacaaagtggtcaaagttcaacgaccgactccaacgggcacggtaatggatattatatctaggaaagaccaaaggggcagtggacaactgggaacttatggcctgaatacattcaccaacatggaagcccagttagtcagacaaatggaaggagaaggtgtgctgacaaaggcagacctcgagaaccctcatctgctagagaagaaaatcacacaatggttggaaaccaaaggagtggagaggttaaaaagaatggccattagcggggatgattgcgtggtgaaaccaatcgatgacaggttcgctaatgccctgcttgctttgaacgatatgggaaaggttcggaaagacatacctcaatggcagccatcaaagggatggcatgattggcaacaggttcctttctgctcccaccactttcatgaattgatcatgaaagatggaagaaagttggtggttccctgcagaccccaggacgaactaataggaagagcaagaatctctcaaggagcgggatggagccttagagaaactgcatgtctggggaaagcctacgcccaaatgtggagtctcatgtattttcacagaagagatctcagattagcatccaacgccatatgttcagcagtaccagtccactgggttcccacaagtagaacgacatggtctattcatgctcaccatcagtggatgactacagaagacatgcttactgtttggaacagggtgtggatagaggaaaatccatggatggaagacaaaactccagttacaacttgggaaaatgttccatatctaggaaagagagaagaccaatggtgtggatcacttattggtctcacttccagagcaacctgggcccagaacatacccacagcaattcaacaggtgagaagccttataggcaatgaagagttcctggactacatgccttcaatgaagagattcaggaaggaagaggagtcggagggagccatttggtaa

SEQ ID NO: 11271 - DNA, 10164 bp, unidentified
  source 1..10164: mol_type = other DNA
  misc_feature 1..10164: note = Synthetic
atgaaccaacgaaaaaaggtggttagaccacctttcaatatgctgaaacgcgagagaaaccgcgtatcaacccctcaagggttggtgaagagattctcaaccggacttttttctgggaaaggacccttacggatggtgctagcattcatcacgtttttgcgagtcctttccatcccaccaacagcagggattctgaagagatggggacagttgaagaaaaataaggccatcaagatactgattggattcaggaaggagataggccgcatgctgaacatcttgaacgggagaaaaaggtcaacgataacattgctgtgcttgattcccaccgtaatggcgttttccctcagcacaagagatggcgaacccctcatgatagtggcaaaacatgaaagggggagacctctcttgtttaagacaacagaggggatcaacaaatgcactctcattgccatggacttgggtgaaatgtgtgaggacactgtcacgtataaatgccccctactggtcaataccgaacctgaagacattgattgctggtgcaacctcacgtctacctgggtcatgtatgggacatgcacccagagcggagaacggagacgagagaagcgctcagtagctttaacaccacattcaggaatgggattggaaacaagagctgagacatggatgtcatcggaaggggcttggaagcatgctcagagagtagagagctggatactcagaaacccaggattcgcgctcttggcaggatttatggcttatatgattgggcaaacaggaatccagcgaactgtcttctttgtcctaatgatgctggtcgccccatcctacggaatgcgatgcgtaggagtaggaaacagagactttgtggaaggagtctcaggtggagcatgggtcgacctggtgctagaacatggaggatgcgtcacaaccatggcccagggaaaaccaaccttggattttgaactgactaagacaacagccaaggaagtggctctgttaagaacctattgcattgaagcctcaatatcaaacataactacggcaacaagatgtccaacgcaaggagagccttatctgaaagaggaacaggaccaacagtacatttgccggagagatgtggtagacagagggtggggcaatggctgtggcttgtttggaaaaggaggagttgtgacatgtgcgaagttttcatgttcggggaagataacaggcaatttggtccaaattgagaaccttgaatacacagtggttgtaacagtccacaatggagacacccatgcagtaggaaatgacacatccaatcatggagttacagccatgataactcccaggtcaccatcggtggaagtcaaattgccggactatggagaactaacactcgattgtgaacccaggtctggaattgactttaatgagatgattctgatgaaaatgaaaaagaaaacatggctcgtgcataagcaatggtttttggatctgcctcttccatggacagcaggagcagacacatcagaggttcactggaattacaaagagagaatggtgacatttaaggttcctcatgccaagagacaggatgtgacagtgctgggatctcaggaaggagccatgcattctgccctcgctggagccacagaagtggactccggtgatggaaatcacatgtttgcaggacatcttaagtgcaaagtccgtatggagaaattgagaatcaagggaatgtcatacacgatgtgttcaggaaagttttcaattgacaaagagatggcagaaacacagcatgggacaacagtggtgaaagtcaagtatgaaggtgctggagctccgtgtaaagtccccatagagataagagatgtaaacaaggaaaaagtggttgggcgtatcatctcatccacccctttggctgagaataccaacagtgtaaccaacatagaattagaacccccctttggggacagctacatagtgataggtgttggaaacagcgcattaacactccattggttcaggaaagggagttccattggcaagatgtttgagtccacatacagaggtgcaaaacgaatggccattctaggtgaaacagcttgggattttggttccgttggtggactgttcacatcattgggaaaggctgtgcaccaggtttttggaagtgtgtatacaaccatgtttggaggagtctcatggatgattagaatcctaattgggttcttagtgttgtggattggcacgaactcgaggaacacttcaatggctatgacgtgcatagctgttggaggaatcactctgtttctgggcttcacagttcaagcagacatgggttgtgtggcgtcatggagtgggaaagaattgaagtgtggaagcggaatttttgtggttgacaacgtgcacacttggacagaacagtacaaatttcaaccagagtccccagcgagactagcgtctgcaatattaaatgcccacaaagatggggtctgtggaattagatcaaccacgaggctggaaaatgtcatgtggaagcaaataaccaacgagctaaactatgttctctgggaaggaggacatgacctcactgtagtggctggggatgtgaagggggtgttgaccaaaggcaagagagcactcacacccccagtgagtgatctgaaatattcatggaagacatggggaaaagcaaaaatcttcaccccagaagcaagaaatagcacatttttaatagacggaccagacacctctgaatgccccaatgaacgaagagcatggaactctcttgaggtggaagactatggatttggcatgttcacgaccaacatatggatgaaattccgagaaggaagttcagaagtgtgtgaccacaggttaatgtcagctgcaattaaagatcagaaagctgtgcatgctgacatgggttattggatagagagctcaaaaaaccagacctggcagatagagaaagcatctcttattgaagtgaaaacatgtctgtggcccaagacccacacactgtggagcaatggagtgctggaaagccagatgctcattccaaaatcatatgcgggccctttttcacagcacaattaccgccagggctatgccacgcaaaccgtgggcccatggcacttaggcaaattagagatagactttggagaatgccccggaacaacagtcacaattcaggaggattgtgaccatagaggcccatctttgaggaccaccactgcatctggaaaactagtcacgcaatggtgctgccgctcctgcacgatgcctcccttaaggttcttgggagaagatgggtgctggtatgggatggagattaggcccttgagtgaaaaagaagagaacatggtcaaatcacaggtgacggccggacagggcacatcagaaactttttctatgggtctgttgtgcctgaccttgtttgtggaagaatgcttgaggagaagagtcactaggaaacacatgatattagttgtggtgatcactctttgtgctatcatcctgggaggcctcacatggatggacttactacgagccctcatcatgttgggggacactatgtctggtagaataggaggacagatccacctagccatcatggcagtgttcaagatgtcaccaggatacgtgctgggtgtgtttttaaggaaactcacttcaagagagacagcactaatggtaataggaatggccatgacaacggtgctttcaattccacatgaccttatggaactcattgatggaatatcactgggactaattttgctaaaaatagtaacacagtttgacaacacccaagtgggaaccttagctctttccttgactttcataagatcaacaatgccattggtcatggcttggaggaccattatggctgtgttgtttgtggtcacactcattcctttgtgcaggacaagctgtcttcaaaaacagtctcattgggtagaaataacagcactcatcctaggagcccaagctctgccagtgtacctaatgactcttatgaaaggagcctcaagaagatcttggcctcttaacgagggcataatggctgtgggtttggttagtctcttaggaagcgctcttttaaagaatgatgtccctttagctggcccaatggtggcaggaggcttacttctggcggcttacgtgatgagtggtagctcagcagatctgtcactagagaaggccgccaacgtgcagtgggatgaaatggcagacataacaggctcaagcccaatcgtagaagtgaagcaggatgaagatggctctttctccatacgggacgtcgaggaaaccaatatgataacccttttggtgaaactggcactgataacagtgtcaggtctctaccccttggcaattccagtcacaatgaccttatggtacatgtggcaagtgaaaacacaaagatcaggagccctgtgggacgtcccctcacccgctgccactaaaaaagccgcactgtctgaaggagtgtacaggatcatgcaaagagggttattcgggaaaactcaggttggagtagggatacacatggaaggtgtatttcacacaatgtggcatgtaacaagaggatcagtgatctgccacgagactgggagattggagccatcttgggctgacgtcaggaatgacatgatatcatacggtgggggatggaggcttggagacaaatgggacaaagaagaagacgttcaggtcctcgccatagaaccaggaaaaaatcctaaacatgtccaaacgaaacctggccttttcaagaccctaactggagaaattggagcagtaacattagatttcaaacccggaacgtctggttctcccatcatcaacaggaaaggaaaagtcatcggactctatggaaatggagtagttaccaaatcaggtgattacgtcagtgccataacgcaagccgaaagaattggagagccagattatgaagtggatgaggacatttttcgaaagaaaagattaactataatggacttacaccccggagctggaaagacaaaaagaattcttccatcaatagtgagagaagccttaaaaaggaggctacgaactttgattttagctcccacgagagtggtggcggccgagatggaagaggccctacgtggactgccaatccgttatcagaccccagctgtgaaatcagaacacacaggaagagagattgtagacctcatgtgtcatgcaaccttcacaacaagacttttgtcatcaaccagggttccaaattacaaccttatagtgatggatgaagcacatttcaccgatccttctagtgtcgcggctagaggatacatctcgaccagggtggaaatgggagaggcagcagccatcttcatgaccgcaacccctcccggagcgacagatccctttccccagagcaacagcccaatagaagacatcgagagggaaattccggaaaggtcatggaacacagggttcgactggataacagactaccaagggaaaactgtgtggtttgttcccagcataaaagctggaaatgacattgcaaattgtttgagaaagtcgggaaagaaagttatccagttgagtaggaaaacctttgatacagagtatccaaaaacgaaactcacggactgggactttgtggtcactacagacatatctgaaatgggggccaattttagagccgggagagtgatagaccctagaagatgcctcaagccagttatcctaccagatgggccagagagagtcattttagcaggtcctattccagtgactccagcaagcgctgctcagagaagagggcgaataggaaggaacccagcacaagaagacgaccaatacgttttctccggagacccactaaaaaatgatgaagatcatgcccactggacagaagcaaagatgctgcttgacaatatctacaccccagaagggatcattccaacattgtttggtccggaaagggaaaaaacccaagccattgatggagagtttcgcctcagaggggaacaaaggaagacttttgtggaattaatgaggagaggagaccttccggtgtggctgagctataaggtagcttctgctggcatttcttacgaagatcgggaatggtgcttcacaggggaaagaaataaccaaattttagaagaaaacatggaggttgaaatttggactagagagggagaaaagaaaaagctaaggccaagatggttagatgcacgtgtatacgctgaccccatggctttgaaggatttcaaggagtttgccagtggaaggaagagtataactctcgacatcctaacagagattgccagtttgccaacttacctttcctctagggccaagctcgcccttgataacatagtcatgctccacacaacagaaagaggagggagggcctatcaacacgccctgaacgaacttccggagtcactggaaacactcatgcttgtagctttactaggtgctatgacagcaggcatcttcctgtttttcatgcaagggaaaggaatagggaaattgtcaatgggtttgataaccattgcggtggctagtggcttgctctgggtagcagaaattcaaccccagtggatagcggcctcaatcatactagagttttttctcatggtactgttgataccggaaccagaaaaacaaaggaccccacaagacaatcaattgatctacgtcatattgaccattctcaccatcattggtctaatagcagccaacgagatggggctgattgaaaaaacaaaaacggattttgggttttaccaggtaaaaacagaaaccaccatcctcgatgtggacttgagaccagcttcagcatggacgctctatgcagtagccaccacaattctgactcccatgctgagacacaccatagaaaacacgtcggccaacctatctctagcagccattgccaaccaggcagccgtcctaatggggcttggaaaaggatggccgctccacagaatggacctcggtgtgccgctgttagcaatgggatgctattctcaagtgaacccaacaaccttgacagcatccttagtcatgcttttagtccattatgcaataataggcccaggattgcaggcaaaagccacaagagaggcccagaaaaggacagctgctgggatcatgaaaaatcccacagtggacgggataacagtaatagatctagaaccaatatcctatgacccaaaatttgaaaagcaattagggcaggtcatgctactagtcttgtgtgctggacaactactcttgatgagaacaacatgggctttctgtgaagtcttgactttggccacaggaccaatcttgaccttgtgggagggcaacccgggaaggttttggaacacgaccatagccgtatccaccgccaacattttcaggggaagttacttggcgggagctggactggctttttcactcataaagaatgcacaaacccctaggaggggaactgggaccacaggagagacactgggagagaagtggaagagacagctaaactcattagacagaaaagagtttgaagagtataaaagaagtggaatactagaagtggacaggactgaagccaagtctgccctgaaagatgggtctaaaatcaagcatgcagtatcaagagggtccagtaagatcagatggattgttgagagagggatggtaaagccaaaagggaaagttgtagatcttggctgtgggagaggaggatggtcttattacatggcgacactcaagaacgtgactgaagtgaaagggtatacaaaaggaggtccaggacatgaagaaccgattcccatggctacttatggttggaatttggtcaaactccattcaggggttgacgtgttctacaaacccacagagcaagtggacaccctgctctgtgatattggggagtcatcttctaatccaacaatagaggaaggaagaacattaagagttttgaagatggtggagccatggctctcttcaaaacctgaattctgcatcaaagtccttaacccctacatgccaacagtcatagaagagctggagaaactgcagagaaaacatggtgggaaccttgtcagatgcccgctgtccaggaactccacccatgagatgtattgggtgtcaggagcgtcgggaaacattgtgagctctgtgaacacaacatcaaagatgttgttgaacaggttcacaacaaggcataggaaacccacttatgagaaggacgtagatcttggggcaggaacgagaagtgtctccactgaaacagaaaaaccagacatgacaatcattgggagaaggcttcagcgattgcaagaagagcacaaagaaacctggcattatgatcaggaaaacccatacagaacctgggcgtatcatggaagctatgaagctccttcgacaggctctgcatcctccatggtgaacggggtggtaaaactgctaacaaaaccctgggatgtgattccaatggtgactcagttagccatgacagatacaaccccttttgggcaacaaagagtgttcaaagagaaggtggataccagaacaccacaaccaaaacccggtacacgaatggttatgaccacgacagccaattggctgtgggccctccttggaaagaagaaaaatcccagactgtgcacaagggaagagttcatctcaaaagttagatcaaacgcagccataggcgcagtctttcaggaagaacagggatggacatcagccagtgaagctgtgaatgacagccggttttgggaactggttgacaaagaaagggccctacaccaggaagggaaatgtgaatcgtgtgtctataacatgatgggaaaacgtgagaaaaagttaggagagtttggcagagccaagggaagccgagcaatctggtacatgtggctgggagcgcggtttctggaatttgaagccctgggttttttgaatgaagatcactggtttggcagagaaaattcatggagtggagtggaaggggaaggtctgcacagattgggatatatcctggaggagatagacaagaaggatggagacctaatgtatgctgatgacacagcaggctgggacacaagaatcactgaggatgaccttcaaaatgaggaactgatcacggaacagatggctccccaccacaagatcctagccaaagccattttcaaactaacctatcaaaacaaagtggtgaaagtcctcagacccacaccgcggggagcggtgatggatatcatatccaggaaagaccaaagaggtagtggacaagttggaacatatggtttgaacacattcaccaacatggaagttcaactcatccgccaaatggaagctgaaggagtcatcacacaagatgacatgcagaacccaaaagggttgaaagaaagagttgagaaatggctgaaagagtgtggtgtcgacaggttaaagaggatggcaatcagtggagacgattgcgtggtgaagcccctagatgagaggtttggcacttccctcctcttcttgaacgacatgggaaaggtgaggaaagacattccgcagtgggaaccatctaagggatggaaaaactggcaagaggttcctttttgctcccaccactttcacaagatctttatgaaggatggccgctcactagttgttccatgtagaaaccaggatgaactgatagggagagccagaatctcgcagggagctggatggagcttaagagaaacagcctgcctgggcaaagcttacgcccagatgtggtcgcttatgtacttccacagaagggatctgcgtttagcctccatggccatatgctcagcagttccaacggaatggtttccaacaagcagaacaacatggtcaatccacgctcatcaccagtggatgaccactgaagatatgctcaaagtgtggaacagagtgtggatagaagacaaccctaatatgactgacaagactccagtccattcgtgggaagatataccttacctagggaaaagagaggatttgtggtgtggatccctgattggactttcttccagagccacctgggcgaagaacattcatacggccataacccaggtcaggaacctgatcggaaaagaggaatacgtggattacatgccagtaatgaaaagatacagtgctccttcagagagtgaaggagttctgtaa

SEQ ID NO: 11272 - DNA, 288 bp, unidentified
  misc_feature 1..288: note = Synthetic
  source 1..288: mol_type = other DNA
acgggaaggctctcaactgcaggcccctacacgcaactagggagcggcatggaaagcttctcgccagaagtcagagtccgacccgtgctgcttgttgtgggctcgcggctaggactagcattccttcacacagacgtgcacaaagccaaccccgagcccgatcttgaatgtcgcgacggagatggacacagcaaaagctttttcttcagaggacaccgcgtttgtggcgacacggagacgtctggggatggccacgggatgttggagcgcgccccgaacaaaaagtga

SEQ ID NO: 11273 - DNA, 36 bp, unidentified; identical to SEQ ID NO: 2129
  misc_feature 1..36: note = Synthetic
  source 1..36: mol_type = other DNA

SEQ ID NO: 11274 - DNA, 225 bp, unidentified
  source 1..225: mol_type = other DNA
  misc_feature 1..225: note = Synthetic
atcgacgcggagcacgtgcagtacaaggtcaacggctacaaccttctgcggcacgcgctgctgccgcggagcgagctcttcgtgtacttcggcagctctctgcacaggcacgagctggagctggccttctacatgtttctctgcaattacgtggacgtgcagcagtggatggacgaaaacaccagcctgattcgggatctgtacctgattaattttaacaattaa

SEQ ID NO: 11275 - DNA, 189 bp, unidentified
  misc_feature 1..189: note = Synthetic
  source 1..189: mol_type = other DNA
atggcagatcaccctactcattgtgatcggggtggtcatcctagcgatgctgctctacttcatcttctgccgccgcatccccaacgcgaaaccggtctacaagcccatcgttatcgggcagccggagccgcttcaggtggagggaggtctaaggaatcttctcttctcttttacagtatggtgatttga

SEQ ID NO: 11276 - DNA, 18 bp, unidentified
  misc_feature 1..18: note = Synthetic
  source 1..18: mol_type = other DNA
atgcctatggaaatttag

SEQ ID NO: 11277 - DNA, 18 bp, unidentified
  misc_feature 1..18: note = Synthetic
  source 1..18: mol_type = other DNA
atgcaaaatatctggtaa

SEQ ID NO: 11278 - DNA, 93 bp, unidentified
  source 1..93: mol_type = other DNA
  misc_feature 1..93: note = Synthetic
atgagtttccatttgacgaaaacggaaatccagtgtatgagcttaatgataagaactggaaatcctttttctcaaggacgtggtccagattaa

SEQ ID NO: 11279 - DNA, 10212 bp, unidentified; identical to SEQ ID NO: 10132
  source 1..10212: mol_type = other DNA
  misc_feature 1..10212: note = Synthetic

SEQ ID NO: 11280 - DNA, 4176 bp, unidentified; identical to SEQ ID NO: 10133
  misc_feature 1..4176: note = Synthetic
  source 1..4176: mol_type = other DNA

SEQ ID NO: 11281 - DNA, 10290 bp, unidentified
  source 1..10290: mol_type = other DNA
  misc_feature 1..10290: note = Synthetic
atggctagaaaaccaggaagacccggaggaaaccgggtcgtcaatatgctaaagcgtacggcggccaacgcagccagccccttggggctggcaaaaaggctgcttggagacgcgtttgctggtaggggacccttaagggttatcctagcagtggtcgcgttcttcagatttacagcaatcaaaatgtcccccgctttactcaaaaagtgggggacggttgaaaaaggggcggcaatagccataatgaaaagtttcaaaaaggagattggaagcatgctggatgttgttgcccgcagaaagacaaaaaataaaggaaaacgctccgttgagagcagtgcgttgctggtgctgttgaccgcttgtctggccttgggcttcaaagtggttacaggacctgaagggcccataatggacgtcacaaagaaagatgtggggaaggctctggagattccttttcagaacttcaacaacacatgctgggtcatggcaatggacgttggacatccgtgtgaagacacaattgagtatgaatgcccctctttggacattggagctgaacctaatgacattgactgttggtgtgacaccatgcccatgcgggtacgatatgggagatgcacaaaagggtcaatacccaagcgatcaagacggaatgctgtgtttccccagcacactgaaaatgtcctcgcaacccgacaagaaacatggatgaacacagatgtcataatgaaacacctcatcaaggtagagacttgggccttgagaaatccgggctttgccctggtggccatcacccttggttggatgctcgggagcaacagaagtcaaaaaatcatcttcacaatattactcctattggtggctccagcttataatatgaggtgcattggagttgaaaaccgtgattttgttgaaggcttgagcggcggaacctgggttgatgtggtgctggagcatggaggctgcgtcacagtacgggttgaagggaaacccacactagactttgaattggtacaaacaaaggccacgggactagcggctgtgagggcttattgttaccaggcaaaggtcagtgatatccaaatctcagcggcatgtccagcggtacagctgacggagaactcaaaggccaccgattcaaattatctgtgcagaagaggggtaaccaatagaggctggaacaatggctgtggtctgtttgggaaaggagacattcatacttgtgtgaaatttaagtgtgagaaaaaagctgctggattttccatcggaaaggagaacctagagtatgaggttagagctagtgttcacaattcaattggagctgacaagttcagcaatgagttagctgacggagaaccccacacgcaaaaaatgaagttctcccctctttccccatcggcagaaaaaagctttggagattacggcacactgggaatggattgtgaaccacagtcaggacttgattttggacaattgtaccttatgacaatcgagtccaagtcttggctagtgaatagggactggtatcatgacctacaccttccttacaccgtgggctcaggctcacaatggaacaacagagaggccctagttgaatttcaggaaccacatgccacaaaacaagaagtgctggctttgggatcgcaagaaggtgctcttcactcagctctggcgggcgctatcatggccaaccgagagacttcaagccctcatgctctgctgctgacagccggacacttaaagtgcaggatcaagatggacaaaatggtaataaaaggcatcacctatggacaatgcagtgggacatttaagatggaaaaacaccccgcagacacgggccacggaactgtggttttggacgtcagttatcaaggagatgatgcgccctgcaagatccccattgttataacatcaaatctggcagaagtggaaccagtggggaggttggtttcggcccacccagtcataacggcaaagaatgtgaggaccatgcttgaggtggaacccccttacggagacagctacatcgtcattggggtcggagacggaaggctcaagcagcattggttcaagaaagggagtgtaattggaggagctttcagcaccaccatgaaaggggcgaaacgcctagcagttttgggagacgcggcatgggacttcggttctgtgggaggagtatttaactccttgggaaaagccgtccatcagctgtttgggggaattttccggaccctctttggaggaatgtcatggttgtcgcgtcttatgattggggcattgtgcttgtggattgggataaatgccagagaccactcgatagccgtaactatgctttcagtaggaggcatcctaattttcctttcaatcaacgtcagcgcggatactggatgtgttgtggacattgaaagaaaggaactgaaatgtggctcaggaatttttatcatgaatgacattgaggcttggagagatgagtacgctttccaccccagtggtcctaaggccttggcagcgtctgtagtagaggcgttttcccaaggggtgtgcggtgtgagaagtgtgaacagactggagcacaagatgtgggagtccatagcggatgagctgaatgccatcttggaagagaatgagcgcgagataaccatcgttgtgaaggacatggaaaatcccgctcaaaagggcaaaatgcgtttaagaccagtggagaaagagctaaagtatggatggaagaagtggggagcttcgttttttaaacgagcatccaggaaaaatgctacattcttggttgacggacctagcggggaagagtgtcctaacagtaacagagcttggaactctttctttatagaagattttggctttggagtattcaaaacatctgtgtggttagggctaaatgagcaaatgacagaggtatgtgacacaaaaatgattggcacgggagtaaaaaatgacagagccgtgcacagtgacttaggctattggatcgagagtaggaaaaatctcacatgggagatctcaagggctaggttgattgagacaaaagcgtgcatttggccacggtcgcacactctctggagtgatggaattgaggaaacacagctgatcatccccaagtcattgggaggccccagatcgagacacaacatgcggagtggttacaagacgcagatcaatggtccctgggatcaaatccctttggacataaagtttgaagaatgccctggaacaagtgtcacggtcacaccaaattgtggaggaaggggaccatcggcccggagcacgacggctagtggaaaagtgatagccgattggtgctgcagggattgcatactaccaccactaaccttcagatcaggagagacatgctggtacgccatggaaatcaggcctgtgagtgagagagaagaaaccctgataaggtcaaaagtctccgctggagacgggaatgagatagacaccttctcactaggactactggttgcaatgttggtgacacaggaaggcctgaggaaacgctgggctactcgccatatcatggtggcttcactgacaatgctggcagcaatggtcacaggacacatcacatatcgtgatttactccggtacgtggtactgctgggagctacctttgcacaaatcaatgacggaggtgatgtgatgcacttggcattagtggcagtcttcaaagttcaacctggcttcctacttggtttcttgttgaggcggcgctggacgccacgagagtcaatgctactggccatatcggcttgtttcttacacctcgtgttttcagagctaagtactgacatcacaacgctggctcataatttttccctagccttgctgatactacgagccatcatccaaacagacgtcagctctgtgacacttccagtgttgtctatgatggctccttcattccagctctcagtcctaggaactttcagaatggcagtggcagtttatgttatcgtcaatctgatgatgtcaaaacggaatgatgccgtaaagaaagcggcccccagcgtggtggcagcagctctgggacaattcggaatggtgaatgcaacggcagccttagggacgctatatgtgctcgaaaaacatggaaaacgcagctggcctccaagtgagatattttcagcagtaggagtgttgtgcgcgttagtaggagccctagggaatgtgcaaagtaccccactagcaggccctatggcggcgtgtggcctcctgatagcagcctatgtggtgacaggaaagagtactgacatagaaattgaaagagctgggttgatctcatggagtgaagacgcggaagtcagcggaagtagccccagggttgacgttgccttggatgagaatggtgatttttcactcattgacggacagggcccctcgctggaatcagtgatcctgaagacagctctggtagctttcagcggactgtttcccgtgtccatacccttttgtgctgctgcttggtatctccacgggaagtcagggagaagagctggagcgctgtgggacattccagctccacgagaagtaaaaaaggggagtaccgaaaatggagtgtacagaatcttggccaacagactctttggaaaaactcaggtaggagtcggagtgatgcatgaaggggtgtttcacaccatgtggcacgtcactagaggggccgctttgaaaagcggagaaggaagattagacccttactggggagacgtgaagaaggacctgatttcatatggagggccatggaagttggaaggacgttgggatggcgtgtcagaagtgcaactgatagcggtaccgccaaaagaaaaagcaaaaaacgtccagaccacgcctggagttttcaaaactccgcatggggagataggggctattgttcttgacttccctgctggatcttctggctctccgatcatcaacaagctaggggaagtgattggcctttatggaaatgggctgatgatgggagacgcgtatgcaagttccattgcccaggctgaagtggaagatgagccagacaccccaaactgcctccctcccgacgtaacgcacaagaaaaagctgacggtactagacctccatccaggagctggcaaaaccaggaaagtcttgcccaagctcctgcaggaagccttggaaaaaagactgagaacggtagtgctagctcccactagagtcgtggcagcggaaatggctgaggctctgaaagggatgcccattaggtaccagacagctgccgttacttcttcccactcaggaaatgaaatcatcgatctgatgtgccatgcaaccttcacttcaaggctcatgcaacctcatagagttccaaattacaatctgtacataatggatgaggcgcatttcacagatccagccagcattgctgcacgagggtttattgcaacaaaggtcagcctgggagaggcagcggctgtcttcatgacagccacaccgcctggcagcgacaatccctttccagcttccaacgcccccataacagacacagaagctcagattcctgacaaggcctggagcacaggcttcgattggatcacagaatatggaggaaagacagtctggttcgttcctagtgtccgcatgggaaacgagattgccgcttgcttgacgaaagcaaagaagaaggtgatacagctcagcaggagaactttcaacacagagtatcccaaatgcaagcaaggggactgggatttcgtggtcacaaccgacatctcggaaatgggagcgaacttcaaggccacaagggtcattgacagcaggagggctatcaaaccaagcatcatgcaagaccaggaagagagagtagtcctgagtggaccaacgccaatctctccggccagcgcagcccaaagaaggggaagggttggcaggaaccccaaccaacttggagatgaatatgtgttctccgggttgacccaggcaaacgatgaggggaatgcgtgttggactgaagcccgcatgctccttgataacatccatatgcaaaatggtctcatagctcaattgtatggccctgaacaagacaaatgtttcgccactgatggagaatttaaattgagagagaaggaaagagccactttcctggagttcctgaaggcggacttgccagtgtggctgtcatttaaggcagctagttctggggttcagtaccatgacaggaaatggtgctttgatggaccagacaacaatttggtcttggaagacaatgttccagttgagatctggacgaagtcaggggaaaggaagaagctaaaacccagatggagtgacgccaggacgtattgtgaccatggtgctctcaccgctttcaaagagtttgctgggggaagaaggagtgtgacgacaggccttctagaaggagttgggagactgccagaacatcttggccaacgcctgaaagaatccattgacaccctgtacttagctttcacagctgaagttggctcgcgcccccatcgagaggctatgcaagaaatgccggctgctctggaaactgtccttgtgttttttctactaatgattatgacaggttgcacattctttctcttgatgcgacacaaaggcattaataaaatgggttatgggatggtggtcatgtcagccgttggaggtctgttatggtacggaaatgtgccagccccaaaaattgcaggcatcctacttttgacatttctgctgatggtggtcttgataccaaacccagaaaaacagcggtccatccaggacaaccagctagccctagtggtactaggttgcttaatgtttctgggggggatagcggccaatgaaatggggatgctggaaaggaccaagcaggacttagccggagtctttcacaagaccgagaggaaatccacagaattcacactcctgactcctccggatttaaggccagccacggcatggagcatatatgccattggaaccaccctcatcactccactgatccaccacatgattactactcactatgcaaacttctctttgatggccatggcaaatcaagcaggcagtctcttcggcatgcagacaggagctccattctcaaaaatggactgggcagtgccggccattgtggtcggatgctggcaacaactaactcctgccacactgatgacggctttggtcttgctagctgtccactatatctacatgattccgggatggcaggctggagctgccagggccgctcagcgtaggacggcagccgggatcatgaagaaccctgtggtagatggtcttgtggtgacagacataccaactctggaagaggttgacccactcgttgagaaaaaattgggacaatacattctgttggccgtggcgatagcagcggctgtgctgcgacaagaccttcaaagttggagtgagtgcgccaccctatcagccgctgcagccgccacgctttgggaaggatccccaggaaagatttggaatgcgtcaacggcttgttcactggtgaacatcttcagaggccacacgctagcagccgtacctttcatgttcaccatactgcggaacactggaaatacagggaaaagaggaggtgttgagggggaaactctaggggagaaatggaaacaccttctcaatgccatggacaagtatgagttctccaggtacaaggtaaatggcatctttgaggtggatcgtgaaccagcccgtatggccctggccaacggtcttgtgacgagtggccatgcagtttccagaggaagcgcaaaattgcgttggatggttgaaagagctgcagtccgccctactgggagagtcattgatctggggtgtggaagaggtggttggagttactactgtgccaccctaaaacaggttcaagaagtacgaggctacacaaaaggaggccccggtcatgaggagccacggatggtgcagagctatggctggaacattgtcaccttgaaaagcggagtggacgtgttccacagaccagccgaggtgggcgataccatcctttgtgatataggagagtcttcagcaacgccagaagtggaagaagccaggactttgaaggtcttggagatggtggagccgtggcttaagaacaaacctgaattctgcataaaagtgttgtgcccgtacagaccaaaagtcattgagcgcctaagcgccttgcagagaacctatggagggggactcgtaagggtcccgctttcaaggaacagcacacatgaaatgtactggacttctgggacggcaggaaacatcataaatgcggtcaatttgacaagcaaggtcctcctacatagaatggaaaagaaatggataggccctaggtatgagaaggacgtcaaccttggcagtggaactagggctgtgattgtgaaaagaaaagccccggatatggacaagatagggaacagagtgaagaggctaaaagaagagcacatagctacatggtgctatgatgacatgaatccctaccgcacatggaattaccatggaagctacgaggtaaaaccaactggaagcgcctcatcaatgataaaccatgtggtgaaaatgctctcgaagccatgggataccctgaacagtgtcacttccatttcaatgacagacacaacccctttcggacaacagagagtgttcaaggaaaaggtggacacaaaagctcccgaaccacccaccggggtggctgaggtcatggacataatctctgattggacgtggaggctattatcaaggcagaagaaaccaaggctttgcaccagggatgaattcaaggcaaaggtgaacaaccatgcagcaatgggttccatctttgaggaggagcatcaatggcagacggccaaggaagcagtggaagatccagggttctgggctctggttgacagagagagagaagctcatttggctggacggtgtgaaacctgtgtctacaacatgatgggaaaacgggaaaagaagcttggagaatttggaaaagcgaagggaagccgagctatctggtacatgtggctgggggccaggttccttgaattcgaagctttgggttttctgaatgaagatcactggctctccagggaaaacagctacgcaggagttgaggggctagggctgcagagattgggttacgtcttgagagacatatccagaaggcctggaggaaagatgtacgctgatgacacagccggctgggatacccgcataacagaaaaagacttggacaatgaggcaaaaattatagaccagatggaaggtgaacacaagcagttggccaaggccatcatggaactcacgtacaggcacaaagtggtgaaagtcatgcgcccaggccctgggggaaaaacatacatggacatcatttcccgggaggaccagagaggtagtgggcaagtggtcacatatgctttgaacaccttcacaaatatgattgtgcaactcactcgatgtgcagaggcagaaggtgtcctgatcccgtcaatgagagaaaggaaattgacgccagcggagcatagagctcttctcctatggttggatactgaaggagtgaaaagactgaaaaagatggccatcagtggagatgattgtgtggtgaagggagaggatgaaagattcgccactgcactgtacttcctcaatgccatggcaaaagtgagaaaagacattcaggaatggaaaccctccagtggttgggcagattggcaggaggtgcccttttgctcccaccacttcaaagaactccagctgaaagatggcaggacgatagtcgtcccctgccgacaccaagatgagctagtgggaagagctagggtatctcctggagccgcatggaccgtcagagaatcggctgggctggccaaagcttatgcgcaaatgtggaagttgatgtacttccacagacgcgacttacggctcatggccaatgcaatctgctcggccgtccccaaagactgggtccccacgggcagaaccacgtggtcaatacatggaaaaggagaatggatgaccaatgaagatatgcttgaagtctggaacagagtgtggatcagggagaatcctcatgttgaagacaagacagaagtggcagattggaaggacgtgccatatttgggaaaaagggaagaccaatggtgtggctccttgattggaagcagaaccagagctacttgggctgaaaacatctgggtggccgtaaaccaagtgagagccaaaattggaaaagaagaatattctgatcatttgagttctcagcaaagatttgaaaattggggagaagtgaggttctcaggagtcctgtaa

SEQ ID NO: 11282 - DNA, 10260 bp, unidentified
  source 1..10260: mol_type = other DNA
  misc_feature 1..10260: note = Synthetic
atgaaaaaccccaaagaagaaatccggaggatccggattgtcaatatgctaaaacgcggagtagcccgtgtaaaccccttgggaggtttgaagaggttgccagccggacttctgctgggtcatggacccatcagaatggttttggcgatactagcctttttgagatttacagcaatcaagccatcactgggccttatcaacagatggggttccgtggggaaaaaagaggctatggaaataataaagaagttcaagaaagatcttgctgccatgttgagaataatcaatgctaggaaagagaggaagagacgtggcgcagacaccagcatcggaatcattggcctcctgctgactacagccatggcagcagagatcactagacgcgggagtgcatactacatgtacttggataggagcgatgccgggaaggccatttcgtttgctaccacattgggagtgaacaagtgccacgtacagatcatggacctcgggcacatgtgtgacgccaccatgagttatgagtgccctatgctggatgagggagtggaaccagatgatgtcgattgctggtgcaacacgacatcaacttgggttgtgtacggaacctgtcatcacaaaaaaggtgaggcacggcgatctagaagagccgtgacgctcccttctcactctacaaggaagttgcaaacgcggtcgcagacctggttagaatcaagagaatacacgaagcacttgatcaaggttgaaaactggatattcaggaaccccgggtttgcgctagtggccgttgccattgcctggcttttgggaagctcgacgagccaaaaagtcatatacttggtcatgatactgctgattgccccggcatacagtatcaggtgcattggagtcagcaatagagacttcgtggagggcatgtcaggtgggacctgggttgatgttgtcttggaacatggaggctgcgttaccgtgatggcacaggacaagccaacagtcgacatagagttggtcacgacgacggttagtaacatggccgaggtaagatcctattgctacgaggcatcgatatcggacatggcttcggacagtcgttgcccaacacaaggtgaagcctaccttgacaagcaatcagacactcaatatgtctgcaaaagaacattagtggacagaggttggggaaacggttgtggactttttggcaaagggagcttggtgacatgtgccaagtttacgtgttctaagaagatgaccgggaagagcattcaaccggaaaatctggagtatcggataatgctatcagtgcatggctcccagcatagcgggatgattggatatgaaactgacgaagatagagcgaaagtcgaggttacgcctaattcaccaagagcggaagcaaccttgggaggctttggaagcttaggacttgactgtgaaccaaggacaggccttgacttttcagatctgtattacctgaccatgaacaataagcattggttggtgcacaaagagtggtttcatgacatcccattgccttggcatgctggggcagacaccggaactccacactggaacaacaaagaggcattggtagaattcaaggatgcccacgccaagaggcaaaccgtcgtcgttctggggagccaggaaggagccgttcacacggctctcgctggagctctagaggctgagatggatggtgcaaagggaaggctgttctctggccatttgaaatgccgcctaaaaatggacaagcttagattgaagggcgtgtcatattccttgtgcactgcggcattcacattcaccaaggtcccagctgaaacactgcatggaacagtcacagtggaggtgcagtatgcagggacagatggaccctgcaagatcccagtccagatggcggtggacatgcagaccctgaccccagttggaaggctgataaccgccaaccccgtgattactgaaagcactgagaactcaaagatgatgttggagcttgacccaccatttggggattcttacattgtcataggagttggggacaagaaaatcacccaccactggcataggagtggtagcaccatcggaaaggcatttgaggccactgtgagaggcgccaagagaatggcagtcctgggggatacagcctgggacttcggatcagtcgggggtgtgttcaactcactgggtaagggcattcaccagatttttggagcagccttcaaatcactgtttggaggaatgtcctggttctcacagatcctcataggcacgctgctagtgtggttaggtttgaacacaaagaatggatctatctccctcacatgcttggccctggggggagtgatgatcttcctctccacggctgtttctgctgacgtggggtgctcagtggacttctcaaaaaaggaaacgagatgtggcacgggggtattcatctataatgatgttgaagcctggagggaccggtacaagtaccatcctgactccccccgcagattggcagcagcagtcaagcaggcctgggaagaggggatctgtgggatctcatccgtttcaagaatggaaaacatcatgtggaaatcagtagaaggggagctcaatgctatcctagaggagaatggagttcaactgacagttgttgtgggatctgtaaaaaaccccatgtggagaggtccacaaagattgccagtgcctgtgaatgagctgccccatggctggaaagcctgggggaaatcgtattttgttagggcggcaaagaccaacaacagttttgttgtcgacggtgacacactgaaggaatgtccgcttgagcacagagcatggaatagttttcttgtggaggatcacgggtttggagtcttccacaccagtgtctggcttaaggtcagagaagattactcattagaatgtgacccagccgtcataggaacagctgttaagggaagggaggccgcgcacagtgatctgggctattggattgaaagtgaaaagaatgacacatggaggctgaagagggcccacctgattgagatgaaaacatgtgaatggccaaagtctcacacattgtggacagatggagtagaagaaagtgatcttatcatacccaagtctttagctggtccactcagccaccacaacaccagagagggttacagaacccaagtgaaagggccatggcacagtgaagagcttgaaatccggtttgaggaatgtccaggcaccaaggtttacgtggaggagacatgcggaactagaggaccatctctgagatcaactactgcaagtggaagggtcattgaggaatggtgctgtagggaatgcacaatgcccccactatcgtttcgagcaaaagacggctgctggtatggaatggagataaggcccaggaaagaaccagagagcaacttagtgaggtcaatggtgacagcggggtcaaccgatcatatggaccacttctctcttggagtgcttgtgattctactcatggtgcaggaggggttgaagaagagaatgaccacaaagatcatcatgagcacatcaatggcagtgctggtagtcatgatcttgggaggattttcaatgagtgacctggccaagcttgtgatcctgatgggtgctactttcgcagaaatgaacactggaggagatgtagctcacttggcattggtagcggcatttaaagtcagaccagccttgctggtctccttcattttcagagccaattggacaccccgtgagagcatgctgctagccctggcttcgtgtcttctgcaaactgcgatctctgctcttgaaggtgacttgatggtcctcattaatggatttgctttggcctggttggcaattcgagcaatggccgtgccacgcactgacaacatcgctctaccaatcttggctgctctaacaccactagctcgaggcacactgctcgtggcatggagagcgggcctggctacttgtggagggatcatgctcctctccctgaaagggaaaggtagtgtgaagaagaacctgccatttgtcatggccctgggattgacagctgtgagggtagtagaccctattaatgtggtaggactactgttactcacaaggagtgggaagcggagctggccccctagtgaagttctcacagccgttggcctgatatgtgcactggccggagggtttgccaaggcagacattgagatggctggacccatggctgcagtaggcttgctaattgtcagctatgtggtctcgggaaagagtgtggacatgtacattgaaagagcaggtgacatcacatgggaaaaggacgcggaagtcactggaaacagtcctcggcttgacgtggcactggatgagagtggtgacttctccttggtagaggaagatggtccacccatgagagagatcatactcaaggtggtcctgatggccatctgtggcatgaacccaatagctataccttttgctgcaggagcgtggtatgtgtatgtgaagactgggaaaaggagtggcgccctctgggacgtgcctgctcccaaagaagtgaagaaaggagagaccacagatggagtgtacagagtgatgactcgcagactgctaggttcaacacaggttggagtgggagtcatgcaagagggagtcttccacaccatgtggcacgttacaaaaggagccgcactgaggagcggtgagggaagacttgatccatactggggggatgtcaagcaggacttggtgtcatactgtgggccttggaagttggatgcagcttgggatggactcagcgaggtacagcttttggccgtacctcccggagagagggccagaaacattcagaccctgcctggaatattcaagacaaaggacggggacatcggagcagttgctctggactaccctgcagggacctcaggatctccgatcctagacaaatgtggaagagtgataggactctatggcaatggggttgtgatcaagaatggaagctatgttagtgctataacccagggaaagagggaggaggagactccggttgaatgtttcgaaccctcgatgctgaagaagaagcagctaactgtcttggatctgcatccaggagccggaaaaaccaggagagttcttcctgaaatagtccgtgaagccataaaaaagagactccggacagtgatcttggcaccaactagggttgtcgctgctgagatggaggaggccttgagaggacttccggtgcgttacatgacaacagcagtcaacgtcacccattctgggacagaaatcgttgatttgatgtgccatgccactttcacttcacgcttactacaacccatcagagtccctaattacaatctcaacatcatggatgaagcccacttcacagacccctcaagtatagctgcaagaggatacatatcaacaagggttgaaatgggcgaggcggctgccatttttatgactgccacaccaccaggaacccgtgatgcgtttcctgactctaactcaccaatcatggacacagaagtggaagtcccagagagagcctggagctcaggctttgattgggtgacagaccattctgggaaaacagtttggttcgttccaagcgtgagaaacggaaatgaaatcgcagcctgtctgacaaaggctggaaagcgggtcatacagctcagcaggaagacttttgagacagaatttcagaaaacaaaaaatcaagagtgggactttgtcataacaactgacatctcagagatgggcgccaacttcaaggctgaccgggtcatagactctaggagatgcctaaaaccagtcatacttgatggtgagagagtcatcttggctgggcccatgcctgtcacgcatgctagtgctgctcagaggagaggacgtataggcaggaaccctaacaaacctggagatgagtacatgtatggaggtgggtgtgcagagactgatgaaggccatgcacactggcttgaagcaagaatgcttcttgacaacatctacctccaggatggcctcatagcctcgctctatcggcctgaggccgataaggtagccgccattgagggagagtttaagctgaggacagagcaaaggaagaccttcgtggaactcatgaagagaggagaccttcccgtctggctagcctatcaggttgcatctgccggaataacttacacagacagaagatggtgctttgatggcacaaccaacaacaccataatggaagacagtgtaccagcagaggtttggacaaagtatggagagaagagagtgctcaaaccgagatggatggatgctagggtctgttcagaccatgcggccctgaagtcgttcaaagaattcgccgctggaaaaagaggagcggctttgggagtaatggaggccctgggaacactgccaggacacatgacagagaggtttcaggaagccattgacaacctcgccgtgctcatgcgagcagagactggaagcaggccttataaggcagcggcagcccaactgccggagaccctagagaccattatgctcttaggtttgctgggaacagtttcactggggatcttcttcgtcttgatgcggaataagggcatcgggaagatgggctttggaatggtaacccttggggccagtgcatggctcatgtggctttcggaaattgaaccagccagaattgcatgtgtcctcattgttgtgtttttattactggtggtgctcatacccgagccagagaagcaaagatctccccaagataaccagatggcaattatcatcatggtggcagtgggccttctaggtttgataactgcaaacgaacttggatggctggaaagaacaaaaaatgacatagctcatctaatgggaaggagagaagaaggagcaaccatgggattctcaatggacattgatctgcggccagcctccgcctgggctatctatgccgcattgacaactctcatcaccccagctgtccaacatgcggtaaccacttcatacaacaactactccttaatggcgatggccacacaagctggagtgctgtttggcatgggcaaagggatgccatttatgcatggggaccttggagtcccgctgctaatgatgggttgctattcacaattaacacccctgactctgatagtagctatcattctgcttgtggcgcactacatgtacttgatcccaggcctacaagcggcagcagcgcgtgctgcccagaaaaggacagcagctggcatcatgaagaatcccgttgtggatggaatagtggtaactgacattgacacaatgacaatagacccccaggtggagaagaagatgggacaagtgttactcatagcagtagccatctccagtgctgtgctgctgcggaccgcctggggatggggggaggctggagctctgatcacagcagcgacctccaccttgtgggaaggctctccaaacaaatactggaactcctctacagccacctcactgtgcaacatcttcagaggaagctatctggcaggagcttcccttatctatacagtgacgagaaacgctggcctggttaagagacgtggaggtgggacgggagagactctgggagagaagtggaaagctcgtctgaatcagatgtcggccctggagttctactcttataaaaagtcaggtatcactgaagtgtgtagagaggaggctcgccgtgccctcaaggatggagtggccacaggaggacatgccgtatcccggggaagtgcaaagatcagatggttggaggagagaggatatctgcagccctatgggaaggttgttgacctcggatgtggcagagggggctggagctattatgccgccaccatccgcaaagtgcaggaggtgagaggatacacaaagggaggtcccggtcatgaagaacccatgctggtgcaaagctatgggtggaacatagttcgtctcaagagtggagtggacgtcttccacatggcggctgagccgtgtgacactctgctgtgtgacataggtgagtcatcatctagtcctgaagtggaagagacacgaacactcagagtgctctctatggtgggggactggcttgaaaaaagaccaggggccttctgtataaaggtgctgtgcccatacaccagcactatgatggaaaccatggagcgactgcaacgtaggcatgggggaggattagtcagagtgccattgtgtcgcaactccacacatgagatgtactgggtctctggggcaaagagcaacatcataaaaagtgtgtccaccacaagtcagctcctcctgggacgcatggatggccccaggaggccagtgaaatatgaggaggatgtgaacctcggctcgggtacacgagctgtggcaagctgtgctgaggctcctaacatgaaaatcatcggcaggcgcattgagagaatccgcaatgaacatgcagaaacatggtttcttgatgaaaaccacccatacaggacatgggcctaccatgggagctacgaagcccccacgcaaggatcagcgtcttccctcgtgaacggggttgttagactcctgtcaaagccttgggacgtggtgactggagttacaggaatagccatgactgacaccacaccatacggccaacaaagagtcttcaaagaaaaagtggacaccagggtgccagatccccaagaaggcactcgccaggtaatgaacatagtctcttcctggctgtggaaggagctggggaaacgcaagcggccacgcgtctgcaccaaagaagagtttatcaacaaggtgcgcagcaatgcagcactgggagcaatatttgaagaggaaaaagaatggaagacggctgtggaagctgtgaatgatccaaggttttgggccctagtggatagggagagagaacaccacctgagaggagagtgtcacagctgtgtgtacaacatgatgggaaaaagagaaaagaagcaaggagagttcgggaaagcaaaaggtagccgcgccatctggtacatgtggttgggagccagattcttggagtttgaagcccttggattcttgaacgaggaccattggatgggaagagaaaactcaggaggtggagtcgaagggttaggattgcaaagacttggatacattctagaagaaatgaatcgggcaccaggaggaaagatgtacgcagatgacactgctggctgggacacccgcattagtaagtttgatctggagaatgaagctctgattaccaaccaaatggaggaagggcacagaactctggcgttggccgtgattaaatacacataccaaaacaaagtggtgaaggttctcagaccagctgaaggaggaaaaacagttatggacatcatttcaagacaagaccagagagggagtggacaagttgtcacttatgctctcaacacattcaccaacttggtggtgcagcttatccggaacatggaagctgaggaagtgttagagatgcaagacttatggttgttgaggaagccagagaaagtgaccagatggttgcagagcaatggatgggatagactcaaacgaatggcggtcagtggagatgactgcgttgtgaagccaatcgatgataggtttgcacatgccctcaggttcttgaatgacatgggaaaagttaggaaagacacacaggagtggaaaccctcgactggatggagcaattgggaagaagtcccgttctgctcccaccacttcaacaagctgtacctcaaggatgggagatccattgtggtcccttgccgccaccaagatgaactgattggccgagctcgcgtctcaccaggggcaggatggagcatccgggagactgcctgtcttgcaaaatcatatgcgcagatgtggcagctcctttatttccacagaagagaccttcgactgatggctaatgccatttgctcggctgtgccagttgactgggtaccaactgggagaaccacctggtcaatccatggaaagggagaatggatgaccactgaggacatgctcatggtgtggaatagagtgtggattgaggagaacgaccatatggaggacaagactcctgtaacaaaatggacagacattccctatctaggaaaaagggaggacttatggtgtggatcccttatagggcacagaccccgcaccacttgggctgaaaacatcaaagacacagtcaacatggtgcgcaggatcataggtgatgaagaaaagtacatggactatctatccacccaagtccgctacttgggtgaggaagggtccacacccggagtgttgtaa

SEQ ID NO: 11283 - DNA, 225 bp, unidentified
  misc_feature 1..225: note = Synthetic
  source 1..225: mol_type = other DNA
atgggatcctgctgtggtagattctgtgacgctaagaataagaaggaagatgtagaagatggaagagaaggatgttgcgattataagaaccttaatgatctggatgaatccgaagcacgtgtagaatttggaccattatatatgataaatgaagaaaaatcagacataaatacattggatataaaaagaagatatagacacacgatagagtctgtatatttctaa

SEQ ID NO: 11284 - DNA, 69 bp, unidentified; identical to SEQ ID NO: 2142
  source 1..69: mol_type = other DNA
  misc_feature 1..69: note = Synthetic

SEQ ID NO: 11285 - DNA, 243 bp, unidentified
  misc_feature 1..243: note = Synthetic
  source 1..243: mol_type = other DNA
ctgacccacgtgttcaatcgctttcccgagaaccagattttggcgcgcccgccagcccccaccatcaccaccgtcagtgaaaacgttcctgctctcacagatcacgggacgctaccgctgcgcaacagcatcggaggagtccagcgagtgaccattactgacgccagacgccgcacctgcccctacgtttacaaggccctgggcatagtctcgccgcgcgtcctatcgagccgcactttttga

SEQ ID NO: 11286 - DNA, 33 bp, unidentified; identical to SEQ ID NO: 2144
  misc_feature 1..33: note = Synthetic
  source 1..33: mol_type = other DNA

SEQ ID NO: 11287 - DNA, 39 bp, unidentified; identical to SEQ ID NO: 2145
  misc_feature 1..39: note = Synthetic
  source 1..39: mol_type = other DNA

SEQ ID NO: 11288 - DNA, 1671 bp, unidentified
  misc_feature 1..1671: note = Synthetic
  source 1..1671: mol_type = other DNA
aagcgccacatgagcctcctaagccccgggctcagcggctcggtctcacacacgtattttccgagcatggcacagggcctgtacgtcggagggtttgtagatgttgtgtcctgccccaagctggagcaagagctctatctcgatccggatcaggtgacggattatctcccagtcacagaaccccttccaataacaatcgaacacctaccagagacagaagtgggctggacactgggtctatttcaagtgtcccacggtattttctgcaccggagccatcacgtcgccagccttcctagagctggcatccaggctggcggacacctcccacgtggccagagcccccgtgaaaaatctccctaaggaaccactgttggagatactccacacgtggctcccggggctgtctttatcgtctatacatccccgcgagttatcccagactcccagcggtcccgtgtttcaacacgtatcactatgcgccctggggcgccgacgcggcacagtggccgtgtacggacacgacgccgagtgggtggtttccagattctcatcagtatctaagtcggagcgcgcccacatcctccagcacgtaagtagctgcaggctggaggacctttccacaccaaatttcgtcagtcccctggagaccttaatggcaaaagctatagatgccagcttcatacgggaccgcctcgacctattgaaaactgacagaggtgtggccagcatattgagcccggcgtatttaaaggccagccaattcccggtcggcatccaagccgtcacaccacccagaccagccatgaacagctctggtcaagaggatatcatatccatccccaaatccgccttcctgagcatgctacaaagcagcatcgatggaatgaagaccacagcggcaaaaatgtcacatacactttcagggccaggcctaatggggtgtgggggccagatgttccccaccgaccatcacctaccttcgtatgtttcaaacccagcgccaccatacggctacgcttacaagaacccatacgatccatggtattactcgccacagctgcctggatataggacggggaagcgcaagcgcggcgcagaggacgacgaaggacacctctttccaggagaggagccggcgtatcacaaggatatcttgtccatgtcaaagaacatagcggaaatacagtctgaactcaaagagatgaaactgaacggttggcacgcagggccaccgccgtcctcctctgcagcagcagccgcagtagatccacactacaggccccacgccaattcagcggccccgtgtcaattcccgacaatgaaggagcacggaggaacctacgtacacccacccatttacgtgcaggcgccacacggtcagttccagcaagcggcgcccatcctttttgctcagccacatgtgagccacccgccagtctctacaggactcgcggtagttggcgcaccacccgctgaacccacccccgcctccagcacgcagagtatccaacaacaggcaccggagaccacgcatacaccatgcgcggcggtggagaaagacgctcctacgccgaaccctacatcgaaccgcgttgaagccagcagtcgctctagtccaaaatctaaaattcgcaagatgttctgcgaggagctcctgaacaagcagtag

SEQ ID NO: 11289 - DNA, 84 bp, unidentified; identical to SEQ ID NO: 2149
  source 1..84: mol_type = other DNA
  misc_feature 1..84: note = Synthetic

SEQ ID NO: 11290 - DNA, 10131 bp, unidentified
  misc_feature 1..10131: note = Synthetic
  source 1..10131: mol_type = other DNA
aggcttgagttgtttataatagtcgtttttctcgcagaaatgggaaaggacgacggtaagaagaagaaggggccgggctcctccggatggttgttaccaccggggcgcgctggcttaggaaggaaggaggagaaaaagaagaaggagaagaggggtgtgcggagcacatctcagccggtctccggcggtgcgcagcaccgccgcggaggcggaacaggtcctagggccggaggtctactaggacgtttgggagctggctggggatcgattctccaggaggacattgtgcacgcactcatgcacttagtgctggtgctacactctgttttcatcgcaattgatcgacgcttgcgctcactgacacggcgcgtgactgctcttgaggctaaacgctctgcgaagaacgctgtacggatcgcattcatgctcaccggcgtgatgatggtgctgggcgccgtcgtcattgatatgcaggtctccacggtgaaagggacacagatcttcgaggggaagaccaaccgcactgatcatgtgcacttgtttaagctccccacggatggctgctggagtggcacattggttatgaaaaagtgccccaaggtcgctgatcttgcgaaggatctggaaggagtggattgtggttcatcatggacggaattcactttgcgctaccatcgatgcgtgccaaagaagcgtgaacgacgagttgccagcaccaaccagaagctagattttctggcggaagtggaactggtgacgttcaaagctataagggagaacaaaaccatcgctatcatcgtcttgttgtgcgtggctattgcgaagagatggccgatgtgggtggtgatactactcgcaattggaacgcggactacggtgaagggagaatttgttgaaccattgtacacactaaaagcggaaaagatgaccatgttgcagacaataatgcgaccggacgaaagctacgtgatttccacgccgaacggacttcttgagtttcgcaccggagcagccgagatatatggcggccaatggatgcgtgaattgctcgctgattgtcacgtgaacgcgtcattctcgactgacgtgtgtcctggaggatctcagctgaacatgggtgagatcaatggtaaagaacgtgtttgctcaacccagccctacaatcgtggatggggaactggatgcttcaagtggggaatcgggtttgttgccacgtgtgttgagctgcattgcggagaggggtataacgtgtcgtcaatcgctaggtcatccatcgtgatgaacatcacagcgaaattccactcagtggatgacgtccagcaactcattagtgatgttcctgtgacttttcgatttgcaaagctgggcaatgccgctgttacttgtcggctagaatcagagcgattgcttcttgactactatcacgtgacaggcaaacaccacgaaggactgtttgtgcggtctcaaatcgatgagtggcccggagcgcacgccactgctagtggaagggccggtttggaacggattgtggtctggggagacgccagggctaatgaagttttggtgaaaaacattttggaaccccagctcgtctgggataatgccattgccacgcaggacggttttcgtgatgttggctattcttgtcagatcatgcttgacaaactggttagcggtagttttaaggactgcccggggatcaagtcttcagtcttcgtccaaagcggtttcggatacgacggagtggtgatgacaagcttgtccaaagcaactaatgagagctgctctgtggggctgacgtgccacggatgctacctccttgcgacgaagatggtgttcggacctggaacttcgaccgcaagggcatttgttgggtgtgggaatcacaccggaacccttgtggttggaggaacgacaatccacgttgagtgtgtgttgaacccgatttcgcaaggttggagaatggccaagcatgtggttgacaagtaccggaggtttggaactgctggagtgggaggcgtgtggcatgactttgttggaaagttttcattgttcagcctgttgtctagctcgacgattctcgtcggactcgccgctctggtgtttcttgacaaacgaattgtgttcttgctacttttgtgcggatactttgtctacaccaaggcagatgtgggttgcggatttgaccctgagagaaaggttgtgtcctgcggatcaggagggttcgtctggaaaagcttgtcacaatggccgacccgggaacattcagttgaactcgatgaccaacacttgatcacggctcttgttacggaacagttgaagaagacgaacaaggtgtgtatcatttgtgaggacgtcttgcaatgcgccgccgctcgtagtgctgttggggagattacccacgttgacaatgagattgtttacgttaacacttcgttgtcttttgacaggacttttcctcgaattccgaagaaggttcatggcgtgaaaattggtgacttaaccatgcagctagccctagcttcagttgggggagcggttgacgccagccaatatggtgagttgagcagcgggttcttgagccgcaccaagatcgcggaaaccagtgaacacaaggtcatccgtgtgataacaagtgcctctccatacgagaaaatatgtgagcaggcgttcgcgctgcagtacggtttcgtccggttcacccgcagggtgttcggttcaaatgttgtggtcaagcccgtggcaaaaccaacagattactgccccacgtacctggccggatcgtttgtgaaaaatgacataggcgcgtacaccgatgggatgatgtggatgaaaagcaggaaggtgaacggaacgtggacattggtcgacctggaactgacgcagagccatcaatgcatttggccccaagcttatacgtttgatttgacggcctttaatgactcatcgctgttcatgccggcacaatacggcgctccgatgtctaaagcaaaccacattcctgggtacaagacgcaaacagagttcccttggtacaaagctgatatcgtgttgcgcgagggggtggtccccggaactcaggttgaagaaagcccatcttgtgacaaccgcgggtccgctgtgaaagttgaccctgccattgccaagaagtggtgttgcaagacgtgcttctcagctgacaagcgggtatttcacttcaaggtcgacaacgattacttctaccccatggagattcgaccagcggctgttcagccagaggtgaccattgacgctgacggcgaagacatggacgagatgacatcaatgttcgggacaatgaaggcagtcgtaccgccagtggaagggtcctatccggatttccggctcagcccatctgtggagggagtttctcccctactggtgggcgcgcttttgcacctgctgaccattcgaaccaaacatcggtgggctcaacgcacgtgtggaacttggattttgttcctcctgtttggagtgccatccaacacctatgtcgggtggtcttggattggattatcgtactcgcttgctgctgttccgaatggtacggctctgttggtgcatttctggctggcagttcagttctcatcatcgcacttgttctttttgggatgggcgctacggcaacgtgtacgatcatcagctggatacgcattgaccgtgttcttcgccgagtggcttctcttgaagttacggcagctgtgggaatcgacatacctcctcgaccacgtgctgttcccgatgtacgtgatgttggcgttcaatctgaaatcacagttcgtacctgtggactcgatggtactgctgaactatgttgtgacgcatcctgcagttgcgacggccatggtaacaggaggtgccctggtgatctattccattcgcgtgtacaagagctggggatgctctccgaacttgtggaggagtggacttcgcgcttcgaggcgctcattagtggctggaatgtgcttggcggggttgtacgtgctctcaacgtgtctcgagttgtatcagatgccgacgacggcatcggtggtgttcctaggaggactactgatcgggatagtgaccaggatggctcctccagcgcacttggagttggttccggtggctggaatgggagtgccgttggattgcgaggaagagcccacaacacttccgtctggattagaaggaacttacggaccggatggagtggaattcacgaacttgacggacaacagtagagtgtcaacggggttgctggtttacgtcggctgcatgggaatcatggccatcaatacctacgtcggggtcatcctgatgtgtgcttgttggtggacaaacgcgcccgagtggctacctctctacgtggctggagtatcggtctttcgatccaatgaggtgaatgatgtcctcatcacccctccagagtatgagcaggaagcacagctaagcaacgacttcgggcacctgcccaacggaacataccgggtggttgctcgctcgctgttcatgaccagccacgtgggagcaggctacgccaaagacggtgtgttcaacacgctttggcatgtgacatctggtggaagcctcacatggcaagggagaaacgtgcgcctacactctggtgatgtttaccgggacatggcttcgtatggtggatcgtggaacattgctgattccctcgaggactcagtggttgttcgtgtcgtgcagaacgatggtagcgtactgtgtgctagaagctccacggcaagtattagcatcgatggaaagcgtgtccaggtcattggccatgactatggaaaaggatcgtcaggatctcctgtgcacgcgttggatggtcgtgtcgttggactgtacggttatggatttttcattggatggaagtaccactccttgatcacaagcggagaagtcaccgcagaggaaaactttgaggaagacacagtgtctcgccggttcgttgattggcatccaggaaaggggaagaccagacgcgtgttggttgaagaggctaaatctcacatcgcaaaagagaaacgtctgctgatactgacgcccactcgagttgttaaggatgaggttgtgcgagcgattgctgaggcgtgccctggagttgtggtaggatcaaacctagcgatgtaccgaaggaatgccatcacggtggcttgccacgcgacactaacgcagtatctgatggagaaaggcattgacagcattcgattctccaccatcataatggacgaatgtcacttcctggaccccctgtccatcgcctgtcgtggggtcatggattactacaatggaaaaggggttgccgtggtgtacatgagtgcgactccccccggatgtgctggaaacaacggatcaaatcatcccatcgatgacgtggcgacacaatttccgcgcgaattaacagcatcgtgggtccgtgggcaagcgaatggcaagacgataatattcgttcccacacagcaccaagccaacactttggctagtgaacttggaggagtttcactgacccgcgaatcgtttgacgttgcgatcggaaaggcccgcaagcaggagacacagttcatcgtgtcgacagacatcagcgaaatgggagcaaatctcggtgtgcagacggtcattgacacgcgtgtggcagtgaagcctgtcattagcgaaggttccgtcatgctggagaaagttggcatcacacaggcgtcagccatccagcgccgtggaagaacaggacgcagagaagcaggaaagtatgtctaccccattgggtctgagctggaaaacgaggccactgagtgggcttgttggactgaagctcaaatgattctagaccagatggcgtgcggaccgatgcgtgaggaaatcgagaacttccagccacagggcagatacctcttggcgcctgaaagtcgaccccggttcatcaacttcatcaagaaggatgttccagtctggcttgcgtggcactgggcgaatgcgtttgaacacaagcactcagtgctgtttcaaggacagaatgcgacgagcttgaagatcaggacggaagccggtgaccacaagtacgctccccgattccatgacgatcgtttcgaaaagaacaacgagttggacaaacgctccaagatcatgctgtacctcaagcagcggagcaatttcaactttgacgtggggggcgttctgtatggactatttgtggctttccgtgacacgaacctagagcggcttggtacatcctaccgctcggcgattgagattctccatgaaatctctaacgttgatgatccaatggtttcaaacgtggtgatgggaaagtcgctacaagcttgggcggctgtcatcattgggatggtcactgggattgtgctactcgtcatgtttgtagtggtttgtcggatcgtgaagtggctgttcggtggaaagacaactgcacaacaaagccccccgtactcaagcttcccaacgttacaaacagcaggattttgtcaattcggctcaatggtgatggctatcggaccactatgtgcggtggttgctggcattcctcccgctttcgtttttgttgcggtgttgggattgttcgtgataatgtgctgtagcgctaataacgtgcaccgggcttacactactgacaccgtcacgctcgttgtcatcggtgtttgcgtgtgtgtcatgggagttgttgcgtgggaaatggatctacttcccaacatccgacgggatctaggttacatcctggaaaggatcgccgcgaggcaagagccggacatcccacaagcatctttcgcgcggccagaggttctagagttgcacatcacatctcttcctggagcgttggttgtgagctttgccattgctatcgttgggggggttattgttaactgtctgtccgacagcggatttctgcgcaagttgttttcgaacgaagaacagtccgcaacggtaatcggaggcatccagctcgctttgatttcctgggagacgatggtgccaatcgcttttgctgggttcttcgcaactacgttcgtgacgaagatctatgggtgcatggtaggaggaatctacctggttttagctcactatgaccggaagtatgcctttacagtgaaggcgaccaaggtcctcatcgcgcgcaccagcaagaaagatctcgacgatgagataacaggacgagacggggtgacgcgaggccggccaaccttttacgcgttacaaatatgttgttccctgctgtggacagtcacgtcgcctagcctgaagcatgctgtcgtgagtgtggtggtgattgtgtttgcattcctcacatttcgtcgtcccaataacaggctgctcgtcacgtttgactattctagcgtgctgttggtcttgatgatcttcgctgaacctggtcaggtttttctggtaggtgctagtttactgttttggttcgtggcgcatcagtctcgcatggcgctacggtcgctggtgaagacagacgcttgcggactgggatacagatggaaggaaatgcttaacgcgcttgacaaaaatgcgtttgacaagtaccgatcccgaggagtgaacgagacagacaagggtgatttcgtctcgcggggcggtttgaagatggatgagctcatcaggaagttccaatgggaaccgaagggggctgcacttgacttaggatgtggccgcggaggatggactcaacgtctggtgatggacactagggtcaactccgtgacggggttgacgctgggtggagcaaaccgggaaaatcccctaccgtttaagacgaaaggacacaacctagccgtgctaaaagccggtgttgacgtgtacgcgactgagccgcgagactgcaacacgattgtgtgtgacataggcgagagtgacccccggcctgaggtggagaagacaagaacgctgaaagtgctgacgatgctcgagaaatggttagtccacaatccaggtgctgcgttctgttgtaaggtgctgtctccgtaccacctcgaagtgttgcgcaagctagagatgcttcagcacaagcacaatggaaaattggtcaggttgtccttgagccggaactccactgcagaaatgtactacgtctcaggtccgcgagcgaacatcgtcggctcagtttatcacgtcttaggggctctaattgggcgcctcaagcgtaatgacccggtgcagcaggatgctcctccaaagctcgagatgggcactcgaagtgacccccgggcaaaagtgaagctgcaggaccagacaatcgttgcaggtcgcgtgaagaggttgcgagaggaaaacgccagcacatggttcgtggaccgtgaacacccttaccaatcgttcaactaccacgggtcatttgtcactgacgacatctctcccggagggcagactgtcaacccgatgatgcgccgaataatgtggccgtgggatttcctctcccgtgtgacgacgttcatgatgacagatgtgtcaacgtacgcgcagcagaaaattctccgtgagaaggtggacacactgacgcttgaaccagatcagcggacccgagctatcaataggttgatcatgcggcatttctctgctatgttcaaacggcgaggattggctccgagaatcctcaccccagtggagtacatgaacaacgtgaaaagcggtgccgccattggagggtggagcaaggagatgccatggaacaaggtgcaagaagctttggctgaccctgtcttttggcgtatggtggctgatgaacgcgctcggcacctgcgtggagattgtgagttgtgcgtgttcaacacaatgggcaagaaggagaagaagccgtcctctttcggcgaggcacgaggatcaaggattatctggtacatgtggctcggaagtcggtttttggagtacgaagcacttggattcctaaacgaggaccattgggtagcgaggaagaactttccgtgcggagttggcggggtcggagtgaattactttggatactatctccaggaaatcatgcaaaaaggtaagtggatgattgctgatgacaccgccggtggggacacgcgcataactgaagctgacctggaggacgagttgtggttcctgctggaccaagtgactgacccctaccacgcacagttgatacgtgttgtgttcaagttctgctacatgaacatggtcgccttgtttccaaggaaccatccgcagttccggagcgggacagtttttgacgttgtttcacgcacagaccaacgcggctctgggcaagtgaccacctacgctctcaacaccgtgacgaatgggaagaaccaggttgggagaatgctggaggctgaagggctactggacgcgccgttggggatgatcgatgggtggttaggttcccatctggaagagattttgagtggaatggtcgtggccggggatgatgtggttgtggcaaccaacaatgaaaacttccacaccagtctaaggtacatcaccgccgcgtcaaaaacgcgcaagaacttgcaaccaaccgagccttccccgaggtacacaaactgggaacatgttgaattctgttcccatcactaccatcctctcgtgctgcaagacggtcgtgagatcattgctccgtgtcgtgaccaacacgagatcattggccgagcacggatccagaaaggggggatcgtggacatgtcagctgccgggtgcttagcaaaggcacatgcccaaatgtgggcattgtactacttccaccggagggacttgcggctcggatttgccgctatcacgtcggccgtcccggtgaactggatccccacggggcggatatcgtggtcagtccaccaacacgctgaatggatgacgacacaggacatgctagaagtgtggaacaccgtgtggattgtcaacaacccatggatggcagtgaaagacccagtgaagacatggtcagagataccatacctcccgaagacgaaggacataaattgtggaagtttgattggtgagcgggacagggcagcgtggtcgaagaatatcgtggccacagttagcacaactcgacgaatcatcgagcaagaagctggaagtcagaagttcacggaagggttgcggatacttgggcgataccgagctccaaccgacgacgtgttctggtga

SEQ ID NO: 11291 - DNA, 10086 bp, unidentified
  source 1..10086: mol_type = other DNA
  misc_feature 1..10086: note = Synthetic
ttggattacgccgcttttgaaaaatctagaagttgtttggaaaagagatatctggttcgtatgaataggatgctcttgaagaaagggccttcgggccaaacatctggtcggccatcgaccagaccgccggacccagcggaaaagagggtaaaaagggccgcaggaaacaagaccagcaaaaaccagcggccatcaacacgaggagcaactccatcatcgctcctcaccagcttattcggacgcagaaaaggaggggaatggcttagaatcctccaacttgacataggagcctcggtgttgtggctggctctcgctgtcggatccctcggacaacaactgtggcgccagatcacaatgctgaagagacgtgtcaaccgcttggaggcacagcgtagccatagtcctgttttctttgtctgcctggctgtcttatttggattagctctctcggaaactctacggtatggaactgatggaaatgggaaactgaccctggaaacggaagacggtactgctattgattctatcaattataaacttccggctgacgcttgcctcgtaggacttccgattgagaaacactgcccgctcgtgagcaagctcgccgacctggacaacattgactgtggctcaacgactgaagagtttaggctgaaatacaatagatgtcaagtcacgcccagaaagcgtaggagctctcaaccacggccggcttcgcacactggcctaatcgaagaagttgagctcttgaccttcaaatttatgcgtgagcacatgcctattttcgtcgtttgccttctcgttgtctccgttgctcggaaatggcccatgtggagtgtagtggccataagtgtgctgacgtggaacgtggtccgagccacttccattgaacccctgtacacgataacggccactggaacatcaatgagtcacactcgtattctatcgaatgaaatgtactccatctctacgactcgagggctcatccatctggacatccacaacataacagtgcaaggagaaagaccatttaaaacgttgctaacatcatgtgagatcgtcgagagtgtgtccgaagacacatgccctggtggatcccatctcgaaatggccaagttgcgacgtgctaaccggacctgcaaagtagatgcattcaataggggctggggaaccggctgttttgaatggggactaggacaagttgccacgtgcgttgaagtccaatgcctgaccatggtaaatgtatctgtgctcgttgactcagttattcaggccactgccagtatggaactccatgggcaccaagactcaagagccgtgttgcgtgatgttcccacggtatttcatttcggggacataggaaccatcaccttgacttgcggtgctaccactgacagattggctagccaacattaccatgtgcgtgattcgtcaaagtccggtctcgttttgaaagaagctgttgatgcctggcccggggttattcgcctcggtgaatacacatccgggatggagaaaataatcaactggggcgtcacaacagccaatgagattaaggtcgattctgtgaacaacccgcaaattgattggaagggttctgttatccaggacatccgctccgtttcgttcacgtgcgaaatgatttttgagaacgtgacgtttactagtttaccgctgtgtgttggcaatttgagtggggtatttgtccaaaacgggtatggccgtgatggcgttgtctcgatcatcctcgaagagagcactccgcaggcttgtagcattcctatatcgagccgaggatgtactgtcgttgggtctactgtcatcgtcgcagcaaaaagtcaaagcggccgcgcgtacgtcatgtgtgggaacgggactggccacgtagaactcgcggacagtgtcgtccctgttgactgtctcgtcacaccggtagcccaggcttggaggcttatgactcatgtggccggtcgatactcaaaacatggcatggctggtatcggaagcgtctgggaggacctggtgcggaactttcacttttcgtggagttggattccaggaggctggctcgttccagttgtgttgattgtcttgtccatagtgttcctaggcaggggagttacgctcgttattgtcgtggtgataacctctatgtacattcgtcgtgtggcgggggacattggttgtggaatcgacacaaccaggagaaccatctcgtgtggacaaggagccttcgtgtggaagcagcttggcagtggcccaatgaaagatcactccgttgagctcgacgactatgctttcaccaacttgtacattcgcgacatgttcgatggtacaaacaaaccttgtttgatatgcgaggacacattgcagtgcgccgccctgagacgagccgcagtcgccgcaagaattgctatgcatccaggggtgatgtatgtgaacaccactctatcgtacaacagaacttttgttgaaacgcgaaaacgggttttgacagtgacgctggaatctttggagtataaagtaggatcctacgtcacacatggtcgtcttgagggggacatgggatatctgcccacatccttcggcagccaccctgagcgtgaaactgataaagttctacgaattgtcgcagcgcgccccgacatacgacgcatgtgcggcaaggctattgcattccagtttacgttcacgggatttcgaaggagtttgtacgggtcgaatgtacaagttgccgtgtcaaagcatgtgactcgccactgtccaacatacttggccggggtagccgtaaaaaatgacaggaccataatcaccgacgggatgttttggatggagagcgagattgtaaacggaacccaacgtatagttgttcttgaaatgttgcaatcgcatagatgcctttggccttcgtcatacactcccgatgcattattagacccaacggacatgaacatcttcgtccctcctgcttggggaggtcccatctcaaaagccaaccatgtccccgggtataaaatgcaaacagacttcccgtggagtagcccggagatctcgcttcatcaaggaccagttccaggcacccaagtcacaattgacccaaaatgtgacggtagaatgcaagctaagcccgtggatccagaaagcaatgtgacttggtgttgcaaaacatgtgacgccattattcacttccgcgtcggagaagagtttttctatccaatggagattcagcctggcaccatggcgagccgtgaaaatccgcggccaaagatagtggagaccccgctagatggtgaagaagagccgctaatggatgacatacttggaaggtatggcaaagctgacgcaaccgcggattttcaccggcggaacccacgctcaggaggggggttcgacagatccgttttaaacctcctgtgtctcgcaatcgccttgcagcttattggggcccgcacacgagcgacgacgtggtcacggttgattcttacaactgtcgcgatgcttacttttggcctacccaacattttttcctcggtgggcttgtcggcatgggtgttgttagttgcgtcatcggcatatcaacctatcgacgtcgtcatgaacctctggataatcctccagacagggagctcggctgtaattctactagggttcatggttcgacgcaaactgtcaatagttttgggccatcaccaccttatggcctcaatttgtctccagtttctgttttgggttgtggaacgtcagcaacgagccttctccgtattcctagaagccgtagctgcgatagtgctgattggggcctatcgtgggatgactcaggaccttccaccagagatcctcacgttttgcttgataatgggatggaaaacggcattggcgctaggtaccgttgccttactgacgcaaggtacgagcgctttttacaagtggacgcagaaatcactagagtccaaaagctcctacaggacctctggcaggagcgcttggttttggaccatttcctgtgcgagcgcgggcgccatttgggccgcggaacgggcagaccacccgtcggcagcggccgttctcgccctagtaacaatcatagcctttctatacatggaccaagccaatgtgaccatggagcttgagtttctctcgacgggggacgtgcctgacgggatcgcccttgaagaagatgaagggggaaacttccgtgaccttcgaggaacatatagcgatgaggggatcactattggccaagacatggggtctgcccagatcccagagaccatggtcatcatattgattggttgtgccctcacgtctgcttctttgtttgtcggagctctgtacaccatccttgctatcagcacaaacatacctcgcaatttattccgcctgtgcagattgaaaataaatgagcattgccgctcggatgacttgcttggtttcgggggtgagtcgacacaaaagattgaaacaagctttggagacttgccaaatggaatctatcgaattaatgtacgtagcttcatggaaaaccgacagcgtggagtaggtgtggcaaaaaacggagttttccacacgttaatgcatgtcactcgtggagagcccctcaaatggcgagaaaagctagtgtccttacattcgggaagtgctttacgagatgtagtgtcgtatggagggccttggcagttggaaaatccaactgttgcggaggagatatccctcatggcgtgcaaaccggataagactgtcgagtatcataaatacaagcctggtgttgtcaaactggacaacgagaacgtaatgttcataagcgttgattttggcaaagggtcctctggatctccgtttttcgttaatggagaagtggtgggtttttacggattcggattttacgtgaatggcgtctatcgttccattgttgcgggggggcgtcccggggacatagcgccgaatgaggttgctgactccacgagaaaattcatcacgtggcatccgggaaaaggaaagactcgtagggttatcgtttcggaagtcaaagcaaattttgacgcggggttgaggaccataatcctgacacccactcgggttgtcatggctgaagttatggaagccctcgggcaagccggaataacgtgtgaccggaaccttatgtattgtcgcagaaatttggtgacagttgcctgtcacgccacgttcacaaaatttgtgttgtcgcatggcgtaaagaaaattggggtggcgctcattgtcatggatgagtgtcacttcatggatcccatgtcaatagctgcccggggagtaatggagcatctacatgagaagggaacgaaactcatgtatttgagtgccaccccccctggacactcccctgacggtggttcaaacttcccaattcatgaccaagctatcgcgttcccaagttggatgacccccgcctggattaacagtgtcagaaaatcgcgtaattcaaagaaggccatcatgtttgtcccttcacatacacaagcgaattctctggctgcgaccatccctggggcggttccccttcatcgcgcaaacttcacagctaattacgctcgggctagtagcgacgaaacctctctggttgtttccactgacatttcggaaatgggggccaatttgggtgttgatatggttatcgacacccgcaaggttctccggcccctcgtagcatccgagaatagaatcaagttgactgaaaccaacgtgacaacatcttcaatgattcaacgacggggacgaaccggaaggcgtggcccgggaagttatgtgtttcctgttgacagccagactgaagaaaatccagttggatgggcctgttggccagaggcccagatgttgcttgatcaaataggaatgacatttatgcccgaagaggccatgtacagccaaccccctgggcgctataccttagttggggaagacctgctccgctttatgaagttcctggacaaagacgatattcctacctggctcgcttggcattgggcagaggcggccgaccgcagacattctgccctcttccagggtaatagcactggccaaatgctagaaacgcgttatggaaggatggagtaccgaccaatgtatgtggatgaccggttcgagaacatagagtgggaccagcgccgtttatctatagaaatgtacattaacacacgcagttcagctagtctgtacgacatcctgtttagttttgactggcatggaatttggaaaaagacgacttcatcactatgggacctgcgcgacattgttagcggggacttgcacgaccagattctggctgagcagtctctcacctcaggaatggccttcatgcttggatgtgccatagccgtagccctgctgatgttcctttgggtttttacttgcctggtgtcatattcccggtcgggaaaaaactcttttgagccaatgcccgtctctgatccactaggaggtggctttttcctaacgtcccctggagttctgcattactttggagtgcccctgggattttgtgtcattattttcctggcaatgtttatcgtgtatccggtgctctacaaagcagcaggaaaccggagttatctcgatagtgacctggttaagtgggttattttgggttcatgcgttatgtgtagcgtcctcgcctgggagatgagattgtttccaaacatccgtgaggatattaaaaacatcatggccacttccaaccgcatggaaaaccaggcacccccaactccaactgcgtggttcaccccaacgccatggaacggtggggcaaaccaacttgacactttgcaagtgtttttctgcgccaccatttttctcaataaattcgcgttctggatccaggaaaactggacgtcccagatgtatgtaatgaagcatccggaaatggtaggcacagttggagggttccgtctagaccacatcccatttcgggctgttattccatcctgctttgttattaccatgacagttggccttcccagcgttgtaattggagccggggcagcagcactgttcatgttcattacatatcatcaaaacaaatggaatgccacgccaaaaattatctctgcccttgacgcccgtgaccaaaaacatgataggccaacggacatagctgaccgcgtgtcagttgacaacactcgagccgttatgtactcgtattgtatggtacttagtttattatgggtcttttgcactagatcacctcccgacattccacgcactatccttgttgtgtgcgcttgtctgtggcaactcctcaatccccggtcgcacatccacgacgtaatggatttcggatcaatgctgtcggccattggattgattgacatgaacttcctgttttataagtttttgcatattgccatgcgagccctcggagctatggcccctttcagtaaatttcgcgccctagaaaagtccaccacgataggtctaggaatcaaatggaaatttatgctgaacgctttggacaaagacgcgtttgaaagatataaagttcgaggagtgaatgagacaggtaaaggtgactacgtatccagaggaggacttaaactggatgaaataattcgcaaatatcaatggacccccatggggcacgtcgttgaccttggctgtggacgtggcggctggagccaaagagtggttatggaggagacagtgacgtccgttcatgggttcacaattggtggcaatgacaaggaaaacccccagcgatttgtcacacgtggatataatttgaccagcctcaagcccggggtggacgtctacaaactggagccaaagcgatgtgacacaatcatgtgtgacatcggtgaaagtgacccaaatctcaccaaagagcggacaagaacactaaaagtcttacagctattggagacttggttatctatcaaccctgaggcccaatttgtatgcaaggtcctatccccctactcccttgaggtgttgcggaaggttgaatccctccagcaaaagtacaaaggtaagctcgtgcgcttggcacacagtaggaatagcacggctgaaatgtattacatatcaggaaataggtccaacgccgtaagggacgcttatatgaccctggctgctttaataggaagattttcgcgacacattgacagtgtattcctcccggagccaacactaccgcgaggaaccagagctgatccagcagctagcgtgtctgccatgaatgttgatgacatggttgatcgtgtcagaaaggtccaacaggaaaacagcgcgacatggttcattgacccggaacacccgtataaaagctttagatattttgggtcttttgtaacggatgacgtaaaagtcggaggacaggctgtgaacccacttgtacggaaaatcatgtggccctgggagaccgtcacgagtgtggtcagttttctcatgaccgatgtgtcaacctattcgcaacaaaaaatcttgcgggaaaaagttgataccgtgatacctcctcaccccccgcaaatacgtatggtcaacagccttattactaagcatttcatacgtattttcaaacgccgtggtttgacgccccgaattatgactaaagaagaattcatcgccaatgttagaaacgatgcagccattggttcgtggagtcgggacgtcccctggagggacgttcaagcagccgtgcaagaccaaggtttctggaatctcgttggacacgaacgcgctctacatctccaaggcaaatgctccatgtgtttatataacacgatgggtaagaaagaaaagaagccaagcgtagccggcgaggcaaaaggatcgagaactatctggtacatgtggctcggaagtcgttttctggaatttgaggccttggggttcctaaatgctgatcactgggtcagtcgtgaaaactttcctgggggtgtgggtggagtgggtgtcaattactttggcaactacctaaaggaaatttcgctcaaaggcaagtatctctttgctgacgatatagcagggtgggatacgaaggtgagttctgaagaccttgaggatgaagagactctcttaaccgaactgactgcaaaccccttccaccgcgccctaatcgccgccacaatgaagttggcttaccggaacatagtggcgatgtttccccgcacccacacgcgatacggtagcggcaccgttatggatgtcgtcgggcgcaccgaccagcgaggctcagggcaggtggtaacgtatgccttgaatactataacgaacggtaaagtccaagtggcccgaactctcgagagtgaaggtttactttacgctgacacacaagtgattgaccgttggctgagcaaaaacctggacgacgtgctaagctgcatgaccattgcgggagatgatgttgtagtgtcgacaatgaatcggtcatttgcctcttccttagactacttggagctgacgggaaagacccgtaaaaacgttccacgaggtgccccttcaaaaatggaaagcgactggcaaaaagtcgaattttgctcacatcactaccacgaactttccctccgagatggacgcattctcatagtaccttgccgtcaggaatctgaggttgttggacgcagtcgcctacaaaaaggaggaatcgtgacaatggctgaaagcgcgtgcatggcgaaggcgtatgcccaaatgtgggcattgtatttcttccatagacgcgatttaaggctcgggtttgccgctatcacctccgccgtcccttccaactggtttccagtcgggcgaacatcctggtcagtacatcaatttcacgaatggatgacgacatccgacatgctccgcgtttggaacgatgtgtggatatacaataacccgtggatcagagtgaaggacccaattggctcatgggatgagattccgtatctacacaagaggcaagacatcgcctgcggaagcttaatcggatccaaagagcgagccgtttgggctcgggagatcgaaaatggagttttaagtatccgcaaaattctgaacgccgagtcgaaatgtgataacgtgtacaatgatgggctggtcatcatgtcgcgtttccgaaagagtaatgacgtgatataa

SEQ ID NO: 11292 - DNA, 4131 bp, unidentified
  source 1..4131: mol_type = other DNA
  misc_feature 1..4131: note = Synthetic
ttggattacgccgcttttgaaaaatctagaagttgtttggaaaagagatatctggttcgtatgaataggatgctcttgaagaaagggccttcgggccaaacatctggtcggccatcgaccagaccgccggacccagcggaaaagagggtaaaaagggccgcaggaaacaagaccagcaaaaaccagcggccatcaacacgaggagcaactccatcatcgctcctcaccagcttattcggacgcagaaaaggaggggaatggcttagaatcctccaacttgacataggagcctcggtgttgtggctggctctcgctgtcggatccctcggacaacaactgtggcgccagatcacaatgctgaagagacgtgtcaaccgcttggaggcacagcgtagccatagtcctgttttctttgtctgcctggctgtcttatttggattagctctctcggaaactctacggtatggaactgatggaaatgggaaactgaccctggaaacggaagacggtactgctattgattctatcaattataaacttccggctgacgcttgcctcgtaggacttccgattgagaaacactgcccgctcgtgagcaagctcgccgacctggacaacattgactgtggctcaacgactgaagagtttaggctgaaatacaatagatgtcaagtcacgcccagaaagcgtaggagctctcaaccacggccggcttcgcacactggcctaatcgaagaagttgagctcttgaccttcaaatttatgcgtgagcacatgcctattttcgtcgtttgccttctcgttgtctccgttgctcggaaatggcccatgtggagtgtagtggccataagtgtgctgacgtggaacgtggtccgagccacttccattgaacccctgtacacgataacggccactggaacatcaatgagtcacactcgtattctatcgaatgaaatgtactccatctctacgactcgagggctcatccatctggacatccacaacataacagtgcaaggagaaagaccatttaaaacgttgctaacatcatgtgagatcgtcgagagtgtgtccgaagacacatgccctggtggatcccatctcgaaatggccaagttgcgacgtgctaaccggacctgcaaagtagatgcattcaataggggctggggaaccggctgttttgaatggggactaggacaagttgccacgtgcgttgaagtccaatgcctgaccatggtaaatgtatctgtgctcgttgactcagttattcaggccactgccagtatggaactccatgggcaccaagactcaagagccgtgttgcgtgatgttcccacggtatttcatttcggggacataggaaccatcaccttgacttgcggtgctaccactgacagattggctagccaacattaccatgtgcgtgattcgtcaaagtccggtctcgttttgaaagaagctgttgatgcctggcccggggttattcgcctcggtgaatacacatccgggatggagaaaataatcaactggggcgtcacaacagccaatgagattaaggtcgattctgtgaacaacccgcaaattgattggaagggttctgttatccaggacatccgctccgtttcgttcacgtgcgaaatgatttttgagaacgtgacgtttactagtttaccgctgtgtgttggcaatttgagtggggtatttgtccaaaacgggtatggccgtgatggcgttgtctcgatcatcctcgaagagagcactccgcaggcttgtagcattcctatatcgagccgaggatgtactgtcgttgggtctactgtcatcgtcgcagcaaaaagtcaaagcggccgcgcgtacgtcatgtgtgggaacgggactggccacgtagaactcgcggacagtgtcgtccctgttgactgtctcgtcacaccggtagcccaggcttggaggcttatgactcatgtggccggtcgatactcaaaacatggcatggctggtatcggaagcgtctgggaggacctggtgcggaactttcacttttcgtggagttggattccaggaggctggctcgttccagttgtgttgattgtcttgtccatagtgttcctaggcaggggagttacgctcgttattgtcgtggtgataacctctatgtacattcgtcgtgtggcgggggacattggttgtggaatcgacacaaccaggagaaccatctcgtgtggacaaggagccttcgtgtggaagcagcttggcagtggcccaatgaaagatcactccgttgagctcgacgactatgctttcaccaacttgtacattcgcgacatgttcgatggtacaaacaaaccttgtttgatatgcgaggacacattgcagtgcgccgccctgagacgagccgcagtcgccgcaagaattgctatgcatccaggggtgatgtatgtgaacaccactctatcgtacaacagaacttttgttgaaacgcgaaaacgggttttgacagtgacgctggaatctttggagtataaagtaggatcctacgtcacacatggtcgtcttgagggggacatgggatatctgcccacatccttcggcagccaccctgagcgtgaaactgataaagttctacgaattgtcgcagcgcgccccgacatacgacgcatgtgcggcaaggctattgcattccagtttacgttcacgggatttcgaaggagtttgtacgggtcgaatgtacaagttgccgtgtcaaagcatgtgactcgccactgtccaacatacttggccggggtagccgtaaaaaatgacaggaccataatcaccgacgggatgttttggatggagagcgagattgtaaacggaacccaacgtatagttgttcttgaaatgttgcaatcgcatagatgcctttggccttcgtcatacactcccgatgcattattagacccaacggacatgaacatcttcgtccctcctgcttggggaggtcccatctcaaaagccaaccatgtccccgggtataaaatgcaaacagacttcccgtggagtagcccggagatctcgcttcatcaaggaccagttccaggcacccaagtcacaattgacccaaaatgtgacggtagaatgcaagctaagcccgtggatccagaaagcaatgtgacttggtgttgcaaaacatgtgacgccattattcacttccgcgtcggagaagagtttttctatccaatggagattcagcctggcaccatggcgagccgtgaaaatccgcggccaaagatagtggagaccccgctagatggtgaagaagagccgctaatggatgacatacttggaaggtatggcaaagctgacgcaaccgcggatttttcaccggcggaacccacgctcaggaggggggttcgacagatccgttttaaacctcctgtgtctcgcaatcgccttgcagcttattggggcccgcacacgagcgacgacgtggtcacggttgattcttacaactgtcgcgatgcttacttttggcctacccaacattttttcctcggtgggcttgtcggcatgggtgttgttagttgcgtcatcggcatatcaacctatcgacgtcgtcatgaacctctggataatcctccagacagggagctcggctgtaattctactagggttcatggttcgacgcaaactgtcaatagttttgggccatcaccaccttatggcctcaatttgtctccagtttctgttttgggttgtggaacgtcagcaacgagccttctccgtattcctagaagccgtagctgcgatagtgctgattggggcctatcgtgggatgactcaggaccttccaccagagatcctcacgttttgcttgataatgggatggaaaacggcattggcgctaggtaccgttgccttactgacgcaaggtacgagcgctttttacaagtggacgcagaaatcactagagtccaaaagctcctacaggacctctggcaggagcgcttggttttggaccatttcctgtgcgagcgcgggcgccatttgggccgcggaacgggcagaccacccgtcggcagcggccgttctcgccctagtaacaatcatagcctttctatacatggaccaagccaatgtgaccatggagcttga

SEQ ID NO: 11293 - DNA, 81 bp, unidentified; identical to SEQ ID NO: 2153
  source 1..81: mol_type = other DNA
  misc_feature 1..81: note = Synthetic

SEQ ID NO: 11294 - DNA, 1602 bp, unidentified
  misc_feature 1..1602: note = Synthetic
  source 1..1602: mol_type = other DNA
atcaccttccttgatgccgaagagggcgacatgtgtcttcacaccctggagcgagtggaccccctagtggacaacgaccgctacccctcccacttagcctccttcgtgctggcctggacgcgagccttcgtctcagagtggtccgagtttctatacgaggaggaccgcggaacaccgctcgaggacaggcctctcaagtctgtatacggggacacggacagccttttcgtcaccgagcgtggacaccggctcatggaaaccagagggcgaagaccggcagcgcttcagcaccagcaggaccagcctcaagcgcaccctggccagcgcgcagcccggagcgcaccccttcaccgtgacccagactacgctgacgaggaccctgcgcccgtggaaagacatgaccctggcccgtctggacgagcaccgactactgccgtacagcgaaagccgccccaacccgcgaaacgaggagatatgctggatcgagatgccgtagagcacgtgaccgagctgtgggaccgcctggaactgcttggtcaaacgctcaaaagcatgcctacggcggacggcctcaaaccgttgaaaaactttgcttccttgcaagaactgctatcgctgggcggcgagcgccttctggcgcatttggtcagggaaaacatgcaagtcagggacatgcttaacgaagtggcccccctgctcagggatgacggcagctgcagctctcttaactaccagttgcagccggtaataggtgtgatttacgggcccaccggctgcggtaagtcgcagctgctcaggaacctgctttcttcccagctgatctcccctaccccggaaacggttttcttcatcgccccgcaggtagacatgatccccccatctgaactcaaagcgtgggaaatgcaaatctgtgagggtaactacgcccctgggccggatggaaccattataccgcagtctggcaccctccgcccgcgctttgtaaaaatggcctatgacgatctcatcctggaacacaactatgacgttagtgatcccagaaatatcttcgcccaggccgccgcccgtgggcccattgccatcattatggacgaatgcatggaaaatctcggaggtcacaagggcgtctccaagttcttccacgcatttccttctaagctacatgacaaatttcccaagtgcaccggatacactgtgctggtggttctgcacaacatgaatccccggagggatatggctgggaacatagccaacctaaaaatacagtccaagatgcatctcatatccccacgtatgcacccatcccagcttaaccgctttgtaaacacttacaccaagggcctgcccctggcaatcagcttgctactgaaagacatttttaggcaccacgcccagcgctcctgctacgactggatcatctacaacaccaccccgcagcatgaagctctgcagtggtgctacctccaccccagagacgggcttatgcccatgtatctgaacatccagagtcacctttaccacgtcctggaaaaaatacacaggaccctcaacgaccgagaccgctggtcccgggcctaccgcgcgcgcaaaacccctaaataa

SEQ ID NO: 11295 - DNA, 54 bp, unidentified; identical to SEQ ID NO: 2156
  misc_feature 1..54: note = Synthetic
  source 1..54: mol_type = other DNA

SEQ ID NO: 11296 - DNA, 2007 bp, unidentified
  source 1..2007: mol_type = other DNA
  misc_feature 1..2007: note = Synthetic
ttggagttttcgggcaacatgcatctccgggggtgtgcgtgtcatcttagcctttattgtgtgtacaatgactgggagaataagatctacagagtaccgatttttcagtgtctgtttttagaagcggagactcgttcgttaaaaacgtttttgattaggggacagagcctagaccaagaatcgttaaatgagatagaagttacaagaaaagaaacaatgctttgggaccttcaggaacaaagtaatatgatggacaaaaaaatagcagcaatcagcaacctcattatgaataacggagagcttgttaggacactttcaaaatttttcgtgcctctaaccgttgttcttggagatgacgggttagagattttggaagcatacgtttgtggcgaggaactcatgttgcctctggacacggtacctgttatcttacggtgtatcggagactacgcggccttggacacgaagcatcttttgagtaacgaatgtacacaggcttccaaaaaaattcgctttggatacagtgtgatggactttcacttttcgctgactgtgtctgacgtgaaaatttgtttttcacacacggacaccggtgaggccgtatgtgaaaaaatgaaacaaattttttctttttctgtgtgtgctttcggcggtgagcaagttctcttagtgacgccaaaaaatgcttatgccttattgttcgacgatgatttgtgtttgcttttactgcagagcgtgtttgctttcctgcacgagaagatattcggagtttataaacaggtattagttcagctttgtgaatacatcggtcccgacttatggccctttgggaatgaaagatcagtttcttttataggatatccaaatctgtggcttttgtctgtatcggacttagaaaggcgagttccggatacaacttatatctgccgcgaaattctttcattttgcggtttggcgcctatcctgggacctcgtggtagacacgcggtccccgtagtcagggagctaagtattgaaatgcctggaagtgaaacttctttgcagcgtttcaggttcaatagtcagtatgtttcaagtgagtccctgtgttttcagacaggtcccgaggacacacatctattctttagtgacagtgatatgtatgtagtgactttgccagattgtctgaggctattattgaagtccacggttcctaaggcctttttaccatgttttgatgaaaacgccacggaaatcgatctgcttttaaaatttatgtcaaggctgcaacacagatcgtacgctttattcgatgcggtgatctttatgttagatgcttttgtttccgcttttcagcgagcatgtaccctaatgggaatgcgatggctgttagtgcgggacttacacatgttttatttaacctgtgatggtaaagatacacatgttgtcatgcctttactgcaaacggccgtagaaaactgttgggaaaaaactacggaaatcaaacaaagacctacatttcagtgtgcggaaatttcgcgctgtggatttatcgtctacgccagattttttttgagcagtgggttgtcacaatctaaagaagcgcactggacagtaacggcgagtaaatatttatctgcatgtattcggaccaataagacaggtctttgctttgccagtataactgtttattttcaggatatgatgtgtgtttttatagctaataggtataatgtttcttattggatcgaagagttcgatcctaatgattattgtctggaatatcatgaaggacttctggactgcagtagatatacggccgtgatgtctgaagatggacagcttgtgagacaagcacgtggaattgcgttgactgacaaaataaacttttcttattacattctcgttacactgagagtgttgaggagatgggtggagagtaaatttgaagacgttgaacagacacagtttattaggtgggaaaacaggatgctctgtgaacacattcatttactgcatttgaattaa

SEQ ID NO: 11297 - DNA, 54 bp, unidentified; identical to SEQ ID NO: 2158
  source 1..54: mol_type = other DNA
  misc_feature 1..54: note = Synthetic

SEQ ID NO: 11298 - DNA, 2010 bp, unidentified
  source 1..2010: mol_type = other DNA
  misc_feature 1..2010: note = Synthetic
aagttggagtttttgggcaacatgcatctccgggggtgtgcgtgtcatcttagcctttattgtgtgtacaacgactgggagaataagatctacagagtaccgatttttcagtgtttgtttttagaagcggagactcgttcgttaaaaacgtttttgattaggggacagagcctagaccaagaatcgttaaatgagatagaagttacaagaaaagaaacaatgctttgggaccttcaggaacaaagtaatatgatggacaaaaaaatagcagcaatcagcagcctcattatgaataacggagagcttcttaggaaactttcaaaatttttcgtgcctctaactgttgttcttggagacgacgggttagagattttggaagcatacgtctgtggcgaggaacccatgctgcctttggacacggtacctgttatattacgatgtgtcggagactacgcagccttggacaccaagcatctcttgagtaacgaatgtacacaggcgtctaaaaaacttcgctttggatacagtgtaatggactttcacttttcgctaactgtgtctgatgtaaaaatttgcttttcacacacggacaccggtgaggctgtatgtgaaaaaatgaaacaaattttttatttttctgtgtgtgcttttggtggtgagcaagttctcttagtgacgccaaaaaatgcttatgccttattgttcgacgatgatttgtgtttgcttttactgcagagcgtgtttgctttcctgcacgagaagatattcgcagtttataaacaggtgttagttcagctttgcgaatacatcggtcccgacttatggccctttgggaatgaaagatcggtttcttttataggatatccgaatctgtggcttttgtctgtatcggacttagaaaggcgggttccggatacaacttatatctgccgtgaaattctctcattttgcggtttggcgcctatcctgggacctcgtggtagacacgcgatccccgtaattagggagctaagtgttgaaatgcctggaagtgaaacctctttgcaacgtttcaggttcaatagtcagtatgtttcaagtgagtctctgtgttttcagacaggtcccgaggacacacatctattctttagtgacagtgatatgtatgtagtgactttgccagattgtctgaggctattattgaagtccacggttcctagggcctttctgccatgttttgatgaaaacgccacggaaatcgaactgcttttaaaatttatgtcgaggctgcaacacagatcgtacgctttattcgatgcggtgatctttatgttagatgcttttgtttccgcttttcagcgagcatgtactctaatggaaatgcgatggctgttagtgagggacttacacgtgttttatttaacctgtgacggtaaagattcacatgttgtcatgcctttactgcaaacggccgttgaaaactgttgggaaaaaattacggaaatcaagcaaagacctgcatttcagtgtatggaaatttcgcgctgtggatttgtcttctacgctagattttttttaagcagtggattgtcacaatctaaagaagcgcactggacagtaacggcaagtaaatatttatctgcatgtattcgggccaataagacaggtctttgctttgccagtataactgtttattttcaggatatgatgtgtgtttttatagctaataggtataatgtttcttattggatcgaagagttcgatcctaatgattattgcctggaatatcatgaaggacttctggactgcagtagatatacggccgtgatgtctgaagatggacagcttgtcagacaagcacgtggaattgcattgactgacaaaataaacttttcttattacattctcgttacattgagagtgttgaggagatgggtggagagtaaatttgaagacgttgaacaggcagagtttattaggtgggaaaacaggatgctctatgaacacattcatttgctacatttgaattaa

SEQ ID NO: 11299 - DNA, 75 bp, unidentified; identical to SEQ ID NO: 2162
  source 1..75: mol_type = other DNA
  misc_feature 1..75: note = Synthetic

SEQ ID NO: 11300 - DNA, 2766 bp, unidentified
  source 1..2766: mol_type = other DNA
  misc_feature 1..2766: note = Synthetic
acgaacgccgatcggtttctgtgtcggaccatgcctaaagccggtggctcagaatgggccacgttatggattattgatgcccttgaaaacaataagtttccctatttttcctggtttgataggaacaaccttctttttgcagcccccgcgcccctgcctgccggcagcgatatcccgcctggctggtattcggtgtaccatgcatttgatgaggagtgtgatagagtctacggaccatcgcctgtcgtgggacagacggtgtatggacgttttgggagactgttgcgtggaaccaggagggccgtcgtgcggaacgatttacggtacagcgacacatttggtggtagctacgtagtatggcagttggtgcgaacgccgtttaaaaactgtacgtattgctatggggccgcgtatggtcctgaaaaactgcagcgatttattcagtgtctgttgtcccccccaatgcaaaccacggctacgcgacgcagtgacactagagaacaaagctacgaggaggcaggggctgcagcacctgctccccctaaggcgccatcggggctgaggggtcgccctcggaaatcgaaccgctattacaatgttggcgatataacgactgaacagaaggctgcctgctccgtgtggataccagtgaatgagggcgcatctacctcaggtatggggtcctctgggacgcgacaagttacgcaggcctcgtcctttacgtggcgggttcccggagatccgcctgctccatcaacgctgaccggcccttcagaccctcactcatctggtgcaggcctaccgggcacggcgccgcccaagccgcagcacgaaacacggcttgccggtactgtgtcaggggtctccggcgtcgcacagacgccgggggatacggggcaactagcccctcccatgcgcgatgggtctaggctgccatctacgtccccgtggatacctgcgtgttttccatggggagatcttcctgtcacgggatggtggcctcagggcgcgtctggtctcccggagaaagtgcatccgccaaccacgggccaatttgatcccctttccccccgttggacatatacggggattcctagcagccagctgaatcctgctgcccccagttggattccgccgcacgcccaagcgggaacatttgtcggtgagttcagccagggtgcacctctggcgccacagggattgctcccccaaagcggccaatgtgctagcgcgtggcttccccgccgggaaaccggtgccgaaggcgcttgcggggcatctacagaaggccgggctcctcagggtgctgcgagtgagcgggtgtatcccttcgaacctcaaccgcccagcgcccccgcgcccgggtatgcgaaaccatcatgttacaattggagtccattggcagaaccgccagctacgcgacccatacgcgcgcctgtttggcacccaccagttggtcacgccgtggtgccggaagttcgcacaccgctttggattccgtggtctagtggaggcgctccaaaccagggtctttcccacacgcagggtggcgcgtcggccacgccctccgccggcgcaccacccaccccagaggtggcagagcgacaggagccatcctcgtctggaataccgtacgtctgccagggggacaacatggcgactggatacagacgcgtgacaactagttctggtgccctcgaagtggagattattgacctcactggggattccgataccccatctaccactgtagcatccacgcccctacctgtcagtgggccgcgcgttttccaacctacggtgctttattctgcaccggagcccgctgtgaaccccgaggtttcgcatttaccgacagagctggagcggcgggagtgtgtgtgcccgggtagtggcgaaaggcccagagttccacttgttagtacatatgctggagatagatatgcagtggggggttatggaccagaacaatctttagtgccgccgcctttgggtctccctcttacgctctcgaaccttcaaggagaggatatatgtacgtgggaagaagggttgggtaacattttgtctgagctgcaggaggaaccgagctcctcaaccagacaggccacggataggcggcgcccgaggtccaggtccccgcacgggcggcgtacgcccgttagccactccggtcccgaaaagccaccttcaaagatgttttttgatccccctgatagtcagcgggtgtcttttgttgtggaaatctttgtgtatgggaaccttcgtggaactctgagacgcgaaggtgacgcgggcgaggcaatgttatgtagctggcctgttggggatacgttggggcacctatgtcagagtttcgtaccagaactgcttcgcataccgcgtcttacagtcccctcacccgagcaaatggagattttgaaccgagtttttgaaggccttggccacggattcccaatattttgctcgatgtctggaatatactccagaaacgccactcaagtggaaggctggtggtttggtaatccaaattcccgctatgaacgcatcctccgaagctttagccccagagttccgcagcagctgttcaacaccgcgcgatacctggcaaccacagccgcaatcccacagacaccgctgagcgtcaacccagtgacgtgcgggacggtatttttcggcgcatccccggcatctacagaaaatttccaaaatgtacccttgactgttaaaatttttataggctccatttgggatagtctacattga

SEQ ID NO: 11301 - DNA, 2766 bp, unidentified; identical to SEQ ID NO: 11300
  source 1..2766: mol_type = other DNA
  misc_feature 1..2766: note = Synthetic

SEQ ID NO: 11302 - DNA, 30 bp, unidentified; identical to SEQ ID NO: 2167
  misc_feature 1..30: note = Synthetic
  source 1..30: mol_type = other DNA

SEQ ID NO: 11303 - DNA, 45 bp, unidentified; identical to SEQ ID NO: 608
  misc_feature 1..45: note = Synthetic
  source 1..45: mol_type = other DNA

SEQ ID NO: 11304 - DNA, 33 bp, unidentified; identical to SEQ ID NO: 2169
  source 1..33: mol_type = other DNA
  misc_feature 1..33: note = Synthetic

SEQ ID NO: 11305 - DNA, 201 bp, unidentified
  source 1..201: mol_type = other DNA
  misc_feature 1..201: note = Synthetic
atgagtggaaaatcttataaggataggaaaaagagatctatagaggtatttctaaattggatgactgtttttgggttaaaaaaaaatattccaaaaaaaaaactagacgatgtggccgatagttttaatttagctatgaggtatatattaaacaagtggaaaatatcatataaaccatatattaaaaataaaaaaaattaa

SEQ ID NO: 11306 - DNA, 36 bp, unidentified; identical to SEQ ID NO: 2172
  misc_feature 1..36: note = Synthetic
  source 1..36: mol_type = other DNA

SEQ ID NO: 11307 - DNA, 93 bp, unidentified; identical to SEQ ID NO: 2173
  source 1..93: mol_type = other DNA
  misc_feature 1..93: note = Synthetic

SEQ ID NO: 11308 - DNA, 441 bp, unidentified
  misc_feature 1..441: note = Synthetic
  source 1..441: mol_type = other DNA
atgtccatcaatatcgatataaaaaaaataactgatttactcaacagtagtattttattcccagatgatgtgcaagaacttcttcgagagaaatatatagtattagaaagaaaatcaaatggtacacctacagtagctcacatctataagacaatggctagatttgataataagagtatatatagaatcgccaagtttttatttatgaacaggccagatgttatcaaacttttatttttaaaagacgtagaacctctgttacccgacaaaagtattaatatatctattaacaatacagagtatccacagttggaaggtcctataggaacaaaaatcgctctattggaattatttaatgcatttagaactgggagatcagaacccataccatattattatttaccgcttagaaaagacataaacaacatagtaactaagtaa

SEQ ID NO: 11309 - DNA, 441 bp, unidentified
  source 1..441: mol_type = other DNA
  misc_feature 1..441: note = Synthetic
atgtccatcaatatcgatataaaaaaaataactgatttactcaacagtagtattttattcccagatgatgtgcaagaacttcttcgagagaaatatatagtattagaaagaaaatcaaatggtacacctacagtagctcacatctataagacaatggctagatttgataataagagtatatatagaatcgccaagtttttatttatgaacaggccagatgttatcaaacttttatttttagaagacgtagaacctttgttacccgacaaaagtattaatatatctattaacaatacagagtatccacagttggaaggtcctataggaacaaaaatcgctctattggaattatttaatgcatttaaaacggggatatcagaacccataccatattattatttaccgcttagaaaagacataaacaacatagtaactaagtaa

SEQ ID NO: 11310 - DNA, 36 bp, unidentified; identical to SEQ ID NO: 2175
  misc_feature 1..36: note = Synthetic
  source 1..36: mol_type = other DNA

SEQ ID NO: 11311 - DNA, 36 bp, unidentified; identical to SEQ ID NO: 2175
  misc_feature 1..36: note = Synthetic
  source 1..36: mol_type = other DNA

SEQ ID NO: 11312 - DNA, 36 bp, unidentified; identical to SEQ ID NO: 2176
  source 1..36: mol_type = other DNA
  misc_feature 1..36: note = Synthetic

SEQ ID NO: 11313 - DNA, 30 bp, unidentified; identical to SEQ ID NO: 2178
  misc_feature 1..30: note = Synthetic
  source 1..30: mol_type = other DNA

SEQ ID NO: 11314 - DNA, 384 bp, unidentified
  misc_feature 1..384: note = Synthetic
  source 1..384: mol_type = other DNA
atgtctgtactcaaaaacccagatgaccaaccaacctataccatccccaataacctcctacaaacaacttcgttgcagagtccaacaacaccatttgaatacctcctctggaactttgacgaacgcagaggagagcttacaaaaagagctgcaaaaagaattactcaaaacatccaaactgaaacaaatgttttgccaattacagaatcagcagcctggtgtccaacaacatacagaaaaacacaagacccatcggagacatcgacctcggaagaagacgaaacactcacgacggaggagaaactactccagcagcgaagagagcaaaaactcctccacaaactcatcagacgacagttactcagactaaccacattagaataa

SEQ ID NO: 11315 - DNA, 36 bp, unidentified; identical to SEQ ID NO: 2172
  misc_feature 1..36: note = Synthetic
  source 1..36: mol_type = other DNA

SEQ ID NO: 11316 - DNA, 1149 bp, unidentified
  source 1..1149: mol_type = other DNA
  misc_feature 1..1149: note = Synthetic
atggataatctatttacctttctacatgaaatagaagatagatataccagaactatttttaactttcatctaataagttgcgatgaaataggagatatatatggtcttatgaaagaacgcatttcctcagaggatatgtttgataatatagtatataataaagatatacatcctgccattaagaaactagtttattgtgacattcaacttactaaacacattattaatcagaatacgtatccggtatttaacgattcttcacaagtgaaatgttgtcattatttcgatataaactcagataatagcaatattagctctcgtacagtagagatatttgagagggaaaagtcatctcttgtatcatatattaaaactaccaataagaagagaaaagtcaattatggggaaataaagaaaactgtacatggaggcactaatgcaaattacttttccggtaaaaaatctgatgagtatctgagcactacagtcaggtccaatattaatcaaccttggatcaaaaccatctctaagaggatgagagtcaatatcattaatcactctatagtaacgcgtggaaaaagctccatattacaaactatagaaattatttttactaatagaacatgtgtgaaaatattcaaggattctactatgcacattattctatccaaggacaaggatgaaaaggggtgtatacacatgattgacaaattattctatgtctattataatttatttctgttgttcgaggatatcatccaaaacgagtactttaaagaagtagctaatgttgtgaaccatgtactcacggctacggcattagatgagaaattattcctaattaagaaaatggctaaacacgatgtttatggagttagcaatttcaaaatagggatgtttaacttgacatttattaagtcattggatcataccgttttcccctctctgttagatgaggatagtaaaataaagttttttaaggggaaaaagctcaatattgtagcattacgctctctggaggattgtataaattacgtgactaaatccgagaatatgatagaaatgatgaaggaaagatcgactattttaaatagcatagatatagaaacggaatcggtagatcgtctaaaagatttgcttctaaaatga

SEQ ID NO: 11317 - DNA, 36 bp, unidentified; identical to SEQ ID NO: 2172
  misc_feature 1..36: note = Synthetic
  source 1..36: mol_type = other DNA

SEQ ID NO: 11318 - DNA, 1407 bp, unidentified
  misc_feature 1..1407: note = Synthetic
  source 1..1407: mol_type = other DNA
ataaagtcggtctacggggacacggacagcctctttgtcacccagcggggacacgaactcatggaaaccaaagggcgccaatcggcagcggttctcgaccagcaggatgagtctgaagcgcaccctcgcaagcgcccaaccaggcgcgcaccccttcaccgtgacggaaacaaccctgactcggacgctgcgaccatggaaggatcggaccctggcagcgctggacgcccatcgtctgattccctactccaggagccgtcccaacccgcgaaacgaggaggtctgctggatcgagatgccatagagcacatcaccgagctctgggaccggctcgagctcttgcaacagactctttccaaaatgcccatggctgacgggctgaagccgctgaaaaacttctcctcgctccaggagcttctatcccttgggggagagcgcctcctaacggacttggtgcgggaaaatatccatgtaagggaaatgatgaacgaagtggcccccctgctccgggaggacggcagctgtcgttccctaaactaccatctgcaacccgtaattggggtcatttacggtcccactgggtgcggcaagtctcagctgcttaggaatttgctctcgtcccagttaatcaccccggctccagaaacggtattttttatagccccgcaggtggacatgatccccccctctgaactgaaagcctgggaaatgcaaatatgtgagggaaactatgctcccgggccagagggaactttcatcccccaatctggcaccctccgcccaaagtttattaaaatggcttatgatgacctgactcaggagcataactatgatgtttcagacccccggaacgtgttcgcccgtgccgctgcccacggccccatcgctatcattatggatgagtgcatggagaatctggggggtcacaaaggcgtctccaaattttttcatgcttttccctctaagctgcatgataaatttcccaagtgcaccggatacactgtcttggtggtcctgcacaatatgaacccgagacgggatctaggcggcaacattgccaacctcaagatccagtccaaaatgcatataatttcaccccggatgcacccgtcccagctcaacagatttgtaaacacctacactaagggcctccccgttgcaattagtctgctcctaaaagatattgtgcaacaccatgcactccgaccttgctatgactgggtgatttataacactaccccggagcaagaggctcttcaatggagctatctccacccccgagacggactaatgcccatgtatctaaacattcaatcccacctttacagggtactggaaaagatccaccgcgttctcaatgatcgagaccgatggtccagggcataccgcgcgcgaaaaatcaaataa

SEQ ID NO: 11319 - DNA, 198 bp, unidentified
  source 1..198: mol_type = other DNA
  misc_feature 1..198: note = Synthetic
atgagtctgaagcgcaccctcgcaagcgcccaaccaggcgcgcaccccttcaccgtgacggaaacaaccctgactcggacgctgcgaccatggaaggatcggaccctggcagcgctggacgcccatcgtctgattccctactccaggagccgtcccaacccgcgaaacgaggaggtctgctggatcgagatgccatag

SEQ ID NO: 11320 - DNA, 1347 bp, unidentified
  source 1..1347: mol_type = other DNA
  misc_feature 1..1347: note = Synthetic
atggagaccaaagggcgccgatcgggagcggttttcgaccagccggatgagcctgaagcgcaccctcgcaagcgcccagcccggcgcgcaccccttcaccgtgacggagaccaccctgacgcggacgctgcggccctggaaggaccggaccctggctgcgctggacgcccatcgtctggtgccctactcccgcagtcgtcccaacccgcgaaacgaggaggtctgctggatcgagatgccgtagagcacatcaccgagctctgggaccgcttggaactcttgcaacagaccctctccaaaatgcccatggccgacggactcaagccgctgaaaaacttcgcctcgctccaggagctcctatctctggggggagagcgcctcctggcggaactggtgcgcgagaacatgcacgtgcgcgagatgatgaacgaggtggcccccctcctccgggaggacggcagctgtctctccctcaactaccacctgcagccggtcatcggggtcatttacggccccaccggctgcggcaagtcccagctgctccggaacttgctttcggcccagctcatctcccccgccccggaaaccgtgttctttatcgccccgcaggtggacatgatccccccctctgagctcaaagcctgggagatgcagatctgtgaggggaactacgcccccgggatcgagggtacctttgtcccccagtccggcaccctccgccccaaattcattaaaatggcctatgatgacctcacccaggaccacaactatgatgtgtccgacccccgaaacgtctttgcccaggccgccgcccacgggcccattgccatcatcatggatgagtgcatggaaaacctgggcggacacaagggcgtcgccaaattctttcacgccttcccttccaagttgcatgataaattccccaagtgcaccggatacaccgtgctggtggtcctgcacaacatgaaccccaggcgggatctgggcggtaacatcgccaatctcaagatccaggccaagatgcacctcatctccccccgcatgcatccctcccagctcaacagatttgtaaacacctacaccaaagggctgcccgtggccatcagtctcctcctcaaagatattgtgcaacaccacgccctgcgcccctgctatgactgggtgatttacaacaccacccccgagcacgaggccctgcaatggagctacctccacccccgggacgggctcatgcccatgtacctcaacatccaagcccacctctaccgggtcctggaaaagatccaccgggtgctcaatgatcgagaccggtggtccagggcctaccgcgcgcgaaaaatcaaataa

SEQ ID NO: 11321 - DNA, 234 bp, unidentified
  misc_feature 1..234: note = Synthetic
  source 1..234: mol_type = other DNA
aagggcgccgatcgggagcggttttcgaccagccggatgagcctgaagcgcaccctcgcaagcgcccagcccggcgcgcaccccttcaccgtgacggagaccaccctgacgcggacgctgcggccctggaaggaccggaccctggctgcgctggacgcccatcgtctggtgccctactcccgcagtcgtcccaacccgcgaaacgaggaggtctgctggatcgagatgccgtag

SEQ ID NO: 11322 - DNA, 1407 bp, unidentified
  misc_feature 1..1407: note = Synthetic
  source 1..1407: mol_type = other DNA
ataaagtcggtttacggggacacggacagcctctttgtcacccagcggggacacgagctcatggagaccagagggcgccgatcgggagcggttctcgaccagccggatgagcctgaagcgcaccctcgcaagcgcccagcccggcgcgcacccctttaccgtgacggagaccaccctgacgcggacgctgcgaccctggaaggaccggaccctggccgcgctggacgcccatcgtctggcgccctactcccgcagtcgccccaacccgcgaaacgaggaggtctgctggatcgagatgccgtagagcacatcaccgagctctgggaccgcttggaactcctgcaacagaccctttccaaaatgcccatggccgacgggctcaagccgctgaaaaacttcgcctcgctccaggagctcctctcgctgggcggagagcgactcctggcggaactggtgcgcgagaacatgcacgtgcgccaaatgatgaacgaggtggccccccttcttagggaggacggcagctgtgtctccctcaactaccacctgcagccggtcattggggttatctacggccccaccggctgcggtaagtcccagctactccgcaacctgctttccgcccagctcatctcccccgccccggaaaccgttttctttatcgccccgcaggtggacatgatccccccctcggagcttaaggcctgggagatgcagatctgtgagggaaactacgcccccgggattgagggtaccttcgtcccccaatcgggcaccctccgccccaaattcattaaaatggcctatgaagatctcacccaggaccacaactacgatgtgtccgacccccgaaacgtctttgcccaagccgccgcccacgggcccatagccattatcatggatgagtgcatggaaaacctgggcggccacaagggcgtctccaaattctttcatgccttcccttccaagttgcatgacaaattccccaagtgcaccggatacaccgtgctggtggtcctgcacaacatgaatcccaggcgggatctgggcggtaacatcgccaatctgaagatccaggctaagatgcacctcatctccccccgcatgcatccctcccagctcaacaggtttgtaaacacctacaccaaagggctgcccgtggccatcagtctcctcctcaaagatattgtgcaacaccacgccctgcgtccctgctatgactgggtgatttacaacaccacccccgagcacgaggccctgcaatggagctaccttcacccccgggacgggctcatgcccatgtacctcaatatccaatcccacctctaccgggtcttggaaaagatccaccgggtgctcaatgatcgaggccggtggtccagggcctaccgtgcgcgaaaaatcaaataa

SEQ ID NO: 11323 - DNA, 270 bp, unidentified
  misc_feature 1..270: note = Synthetic
  source 1..270: mol_type = other DNA
ttgtcacccagcggggacacgagctcatggagaccagagggcgccgatcgggagcggttctcgaccagccggatgagcctgaagcgcaccctcgcaagcgcccagcccggcgcgcacccctttaccgtgacggagaccaccctgacgcggacgctgcgaccctggaaggaccggaccctggccgcgctggacgcccatcgtctggcgccctactcccgcagtcgccccaacccgcgaaacgaggaggtctgctggatcgagatgccgtag

SEQ ID NO: 11324 - DNA, 42 bp, unidentified; identical to SEQ ID NO: 2191
  source 1..42: mol_type = other DNA
  misc_feature 1..42: note = Synthetic

SEQ ID NO: 11325 - DNA, 729 bp, unidentified
  misc_feature 1..729: note = Synthetic
  source 1..729: mol_type = other DNA
ctggctccgcgacacggcacgaggccgtacatgggcacctggagcgacatcggcacgagccaactgaacgggggcgccttcaattggagcagtatctggagcgggcttaaaaattttggctcgaccgtaaaaacctatgggaacaaagcttggaacagcagcacagggcaggctctgagaaataagcttaaggaacaaaacttccaacagaaggtggtcgatgggatcgcctctggtattaacggcgtagtggatctggccaaccaggctgtacaaaaacagataaacagccgcctggacccgccgcccgcaacccctggtgaaatggaagtggaggaagaacttcctccgctggaaaagcggggcgacaagcgtccgcgacccgagctagagcagacgctggtgacgcgcgcagacgagcccccttcatatgaggaggcagtaaagctcggaatgcccactaccaggcctgtagctcacatggctaccggggtgatgaaaccttctcagtcacatcgacccgccaccttggacttgcctcctccccctgcttctgcggcgcctgttcccaaacctgtcgctaccagaaagcccaccgccgtacagcccgtcgccgtagccagaccgcgtcctgggggcacaccgcgcccgaaagcaaactggcaaagtactctgaacagcatcgtgggtctgggcgtgcagagtgtaaagcgccgtcgctgctattaa

SEQ ID NO: 11326 - DNA, 441 bp, unidentified
  source 1..441: mol_type = other DNA
  misc_feature 1..441: note = Synthetic
atgtccatcaatatcgatataaaaaaaataactgatttactcaacagtagtattttattcccagatgatgtgcaagaacttcttcgagagaaatatatagtattagaaagaaaatcaaatggtacacctacagtagctcacatctataagacaatggctagatttgataataagagtatatatagaatcgccaagtttttatttatgaacaggccagatgttataaaacttttatttttagaagacgtagaacctctgttacctgacaaaagtattaatatatctattaacaatacagagtatccacagttggaaggtcctataggaacaaaaatcgctctattggaattatttaatgcatttagaacggggagatcagaacccataccatattattatttaccgcttagaaaagacataaacaacatagtaactaagtaa

SEQ ID NO: 11327 - DNA, 36 bp, unidentified; identical to SEQ ID NO: 2175
  source 1..36: mol_type = other DNA
  misc_feature 1..36: note = Synthetic

SEQ ID NO: 11328 - DNA, 21 bp, unidentified
  misc_feature 1..21: note = Synthetic
  source 1..21: mol_type = other DNA
ataatcgcaattcaattttaa

SEQ ID NO: 11329 - DNA, 21 bp, unidentified
  misc_feature 1..21: note = Synthetic
  source 1..21: mol_type = other DNA
ataatcgcaattcaattttaa

SEQ ID NO: 11330 - DNA, 888 bp, unidentified
  misc_feature 1..888: note = Synthetic
  source 1..888: mol_type = other DNA
atggacttctttaacaagttctcacaggggctggcagaatcctctacaccaaagtcgtcaatctattattctgaagaaaaggatccggatacgaaaaaggatgaagcgattgaaataggactaaagtctcaagagtcgtattatcaaagacagttgcgagaacaactagctagagataatatgatggcagccagcagacagcctatccaaccgctacaaccaactattcatataactccacagccggttccgacacctacaccggctcctattcttacacctacaccggctccgattccgacaccggctcctattcttacacctagtagtactgctcctacaccaaaaccacgacaacaaactaatacatcatcggatacgcctaatctttttgattggctgtcggcagatgataatacacaaccgagtacactccttaaaccgttgacaccgagcaattctattcaggatatggtctctaaatttaataaagatcaaaagacgacaacaccaccgtctactcaaccttctcagacgttgccgacgactacgtgtacacaacaatcggatggaagtatttcttgtactactccaacagttacacctcctcaacctcctattgtggccactgtatgtactcctacacctactggtggtacagtatgtacaacagcacaacaaaatccaaatccaggagcagcatctcaacaaaatctagacgatatgtcccttaaggatctcatgtcgagtgttgaaaaagatatgcaccaacttcaggcagaaacaaacgatctggtgacgaatgtaaatgatgcaagggaatatacacgtagggcaatagatcaaattttacaactagtcaaaggttttgaacgattccaaaagtaa

SEQ ID NO: 11331 - DNA, 846 bp, unidentified
  source 1..846: mol_type = other DNA
  misc_feature 1..846: note = Synthetic
atggacttctttaacaagttctcacaggggctggcagaatcctctacaccaaagtcgtcaatctattattctgaagaaaaggatccggatacgaaaaaggatgaagcgattgaaataggactaaagtctcaagagtcgtattatcaaagacagttgcgagaacaactagctagagataatatgatggtcgccagcagacagcctacccaaccgctacaaccaactattcatataactccacagccggttccgacacctacaccggctcctattcttctacctagtagtactgctcctgtactaaaaccacgacaacaaactaatacatcatctgatatgtctaatctttttgattggctgtctgcagatactgatgcgccggcgagtacactccttccagcgttgacgccgagcaatactgttcaggatattatctctaaatttaataaagatcaaaagatgacgacaccgccatctacccaaccttctcagacgttaccaacaaccacatgtacacaacaatcggatggaagtatttcttgtactactccaacggttacacctcttcaacctcctattgtggccactgtatgtactcccacacctactggtggtacagtatgtacaacagcacaacaaaatccaaatccaggagcagcatctcaacaaaatctagacgatatgacccttaaggatctcatgtcgagtgttgaaaaagatatgcgtcaacttcaggccgaaacaaacgatctggtgacgaacgtatatgatgcaagggagtatacgcgtagggcaatagatcaaattatacaactagtcaaaggttttgaacgattccaaaagtaa

SEQ ID NO: 11332 - DNA, 54 bp, unidentified; identical to SEQ ID NO: 2198
  source 1..54: mol_type = other DNA
  misc_feature 1..54: note = Synthetic

SEQ ID NO: 11333 - DNA, 54 bp, unidentified; identical to SEQ ID NO: 2198
  source 1..54: mol_type = other DNA
  misc_feature 1..54: note = Synthetic

SEQ ID NO: 11334 - DNA, 21 bp, unidentified
  misc_feature 1..21: note = Synthetic
  source 1..21: mol_type = other DNA
ataatcgcaattcaattttaa

SEQ ID NO: 11335 - DNA, 846 bp, unidentified
  misc_feature 1..846: note = Synthetic
  source 1..846: mol_type = other DNA
atggacttctttaacaagttctcacaggggctggcagaatcctctacaccaaagtcgtcaatctattattctgaagaaaaggatccggatacgaaaaaggatgaagcgattgaaataggactaaagtctcaagagtcgtattatcaaagacagttgcgagaacaactagctagagataatatgacggtcgccagcagacagcctatccaaccgctacaaccaactattcatataactccacagccggttccaacagctacaccggctcctattcttctacctagtagtactgttcctacaccaaaaccacgacaacaaactaatacatcatctgatatgtctaatctttttgattggctgtctgaagatactgatgcgccggcgagttcactccttccagcgttgacgccgagcaatgctgttcaggatattatctctaaatttaataaagatcaaaagacgacgacaccgccatctacccaaccttctcagacgttaccaacaactacatgtacacaacaatcggatggaaatatttcttgtactactccaacggttacacctcctcaacctcctattgtggccactgtatgtactcctacacctactggtggtacagtatgtacaacagcacaacaaaatccaaatccaggagcagcatctcaacaaaatctagacgatatggcccttaaggatctcatgtcgaatgttgaaagagatatgcaccaacttcaggccgaaacaaacgatctggtgacgaacgtatatgatgcaagggagtatacgcgtagggcaatagatcaaattctacaactagtcaaaggttttgaacgattccaaaagtaa

SEQ ID NO: 11336 - DNA, 54 bp, unidentified; identical to SEQ ID NO: 2198
  source 1..54: mol_type = other DNA
  misc_feature 1..54: note = Synthetic

SEQ ID NO: 11337 - DNA, 21 bp, unidentified
  misc_feature 1..21: note = Synthetic
  source 1..21: mol_type = other DNA
ataatcgcaattcaattttaa

SEQ ID NO: 11338 - DNA, 816 bp, unidentified
  source 1..816: mol_type = other DNA
  misc_feature 1..816: note = Synthetic
atggacttctttaacaagttctcacaggggttggcagaatcctctacaccaaagtcgtcaatctattattctgaagaaaaggatctggatataaaaaaggatgaagcgattgaaataggactaaagtctcaagagtcgtattatcaaagacagttgcgagaacaactagctagagataatatgatggccgccagcagacagcctatccaaccgctacaaccaactattcatataactccactgcaggtacctacaccggctcctacaccaaaaccacgacaacaacaaactaatacatcatcggatatgtctaatctttttgattggttgtcggcagatgataatacacaaccgagttcactccttccagcgttgacgccgatcaatgctgttcaggatattatctctaaatttaataaagatcaaaagacgacgacgacgccatctacccaaccttctcagacgttaccaacaactacatgtacacaacaatcggatggaagtatttcttgtactactccgacagttacacctcctcaacctcctattgtggccactgtatgtactcctacacctactggtggtacagtatgtacaacagcacaacaaaatccaaatccaggagcaacatctcaacaaaatctagacaatatggcccttaaggatctcatgtcgagtgttgaaaaagatatgcgccaacttcaggccgaaacaaacgatctggtgacgaacgtatatgatgcaagggagtatacgcgtagggcaatagatcaaattctacaactagtcaaaggttttgaacgattccaaaagtaa

SEQ ID NO: 11339 - DNA, 18 bp, unidentified
  source 1..18: mol_type = other DNA
  misc_feature 1..18: note = Synthetic
atgaagcgattgaaatag

SEQ ID NO: 11340 - DNA, 30 bp, unidentified; identical to SEQ ID NO: 2201
  source 1..30: mol_type = other DNA
  misc_feature 1..30: note = Synthetic

SEQ ID NO: 11341 - DNA, 162 bp, unidentified
  misc_feature 1..162: note = Synthetic
  source 1..162: mol_type = other DNA
atattatttaacttaggagatatatctgtcgatattgaaaaactggattgtgacgcattaaaagaatacaaaaaaatggaagcgtggactaaaaaggcaacaaccacaatatgtaatagaattgtttttaaagcaaataaaatacttaataataaagaatga

SEQ ID NO: 11342 - DNA, 21 bp, unidentified
  source 1..21: mol_type = other DNA
  misc_feature 1..21: note = Synthetic
atgaaattatcgattgtatag

SEQ ID NO: 11343 - DNA, 720 bp, unidentified
  misc_feature 1..720: note = Synthetic
  source 1..720: mol_type = other DNA
atgctgagaaagagaaacagccataacaccatttttttcacacacctttttcagaccatggcctctgttacagccattatttattttttgggtcttctgggatttatcaacagttttgaccataaaaacgtaactgcttatgttggttctaactgtgtactaactgggtaccagtcacaccaacgggtttcatggtactggtttgataaaaaaaacacagcttatacactttgcaaaggtaatcagcggcccacacagcgcagtggtctttattacagctgcactaataataatatcacactacttcaagtgactaaacaatattctgggacatactatggaaccaattttaacacggaacaggacacttactatagtgtcaaagtattggatccaactactcccagaactactaccaaacataccacaactaaaaagcccactatacctaaaaccactaaattaacaaccacaaccagcaccacacttgctgtgacctcacaggcaactactgaaaacgaattggttgccctgttgcagaatggggagaataatagcagcagtcctctgcctaccacccccagtgagcaaattcccagatccatgattggcattatcgctgctgtggtggtgtgtatggtcattatcatcttgtgcatgatgtactatgcctgctactacagaaaacacagactgaacaacaagctggacccctactga

SEQ ID NO: 11344 - DNA, 33 bp, unidentified; identical to SEQ ID NO: 2205
  source 1..33: mol_type = other DNA
  misc_feature 1..33: note = Synthetic

SEQ ID NO: 11345 - DNA, 138 bp, unidentified; identical to SEQ ID NO: 10279
  misc_feature 1..138: note = Synthetic
  source 1..138: mol_type = other DNA

SEQ ID NO: 11346 - DNA, 42 bp, unidentified; identical to SEQ ID NO: 2207
  misc_feature 1..42: note = Synthetic
  source 1..42: mol_type = other DNA

SEQ ID NO: 11347 - DNA, 21 bp, unidentified
  misc_feature 1..21: note = Synthetic
  source 1..21: mol_type = other DNA
atgatctataagtttaagtga

SEQ ID NO: 11348 - DNA, 150 bp, unidentified
  misc_feature 1..150: note = Synthetic
  source 1..150: mol_type = other DNA
atggtcatcggtttagtcatattcgtatctgtggcagccgccatcgtcggcatgttgtcaaacgtattggacatgcttatgtacgtagaagaaaataatgaagaggatactagaatcaaggaggagcaagaactgctgttgctatattga

SEQ ID NO: 11349 - DNA, 15 bp, unidentified
  misc_feature 1..15: note = Synthetic
  source 1..15: mol_type = other DNA
atacagtttaagtga

SEQ ID NO: 11350 - DNA, 144 bp, unidentified
  misc_feature 1..144: note = Synthetic
  source 1..144: mol_type = other DNA
atcggtctagtcatattcgtgtctgtggcggccgccatcgtcggtgtgttgtctaacgtattggacatgcttatgtacgtagaagaaaataatgaagaggatgctagaatcaaggaggagcaagaactactgttgctatattga

SEQ ID NO: 11351 - DNA, 60 bp, unidentified
  source 1..60: mol_type = other DNA
  misc_feature 1..60: note = Synthetic
atgaagaggatgctagaatcaaggaggagcaagaactactgttgctatattgatacataa

SEQ ID NO: 11352 - DNA, 39 bp, unidentified; identical to SEQ ID NO: 2215
  misc_feature 1..39: note = Synthetic
  source 1..39: mol_type = other DNA

SEQ ID NO: 11353 - DNA, 507 bp, unidentified
  misc_feature 1..507: note = Synthetic
  source 1..507: mol_type = other DNA
attcggttgtatataaacagaagcaggatgcacacaagggcagggatgtctgaggagaatccatgccctaggaacatctttttgctttgcaaagagtatggtttggagctagaggatttgcgattgctctgtgtatggtgcaaacggccgttatcagaggctgacatatgggcatttgcaataaaagaactgtttgtagtgtggagaaagggcttcccatttggagcctgcggaaaatgcctgattgcagcaggaaaacttagacaatacagacattggcattactcatgctacggagacacagtggagactgagacaggaatacccatacctcagctgtttatgagatgctatatttgccataagcccctgagctgggaggagaaggaggcattactagttggaaacaagcgtttccacaacatatcaggccggtggacgggacattgcatgaactgcgggtcatcatgcacggcaaccgacccagcctcaaggacattacactaa

SEQ ID NO: 11354 - DNA, 501 bp, unidentified
  misc_feature 1..501: note = Synthetic
  source 1..501: mol_type = other DNA
atgggaactgctgcaacaattcagactcccaccaaattaatgaataaagaaaatgcagaaatgattttggaaaaaattgttgatcatatagttatgtatattagtgacgaatcaagtgattcagaaaataatcctgaatatattgattttcgtaacagatacgaagactatagatctctcattataaaaagtgatcacgagtttgtaaagctatgtaaaaatcatgcagagaaaagttctccagaaacgcaacaaatgattatcaaacacatatacgaacaatatcttattccagtatctgaagtactattaaaacctataatgtccatgggtgacataattacatataacggatgtaaagacaatgaatggatgctagaacaactctctaccctaaactttaacaatctccgcacatggaactcatgtagcataggcaatgtaacgcgtctgttttatacattttttagttatctgatgaaagataaactaaatatataa

SEQ ID NO: 11355 - DNA, 999 bp, unidentified
  misc_feature 1..999: note = Synthetic
  source 1..999: mol_type = other DNA
aggtatatagtaaaacttttaattagcgcagatgatgttcaagaaataagagtcatagatattgtagaagatccacaaccaataacctcgaaagttaaggttataaactatatacaatgtgatataaacgactttgataaggtgagagaagcgctagatggggtaaatctgattattcatacggctgctctagtggatgtatttggaaaatacactgataatgaaatcatgaaagtaaactattatggaacacagactatattggcagcttgtgtggacctaggaatcaagtatttgatctatactagtagcatggaagcaataggaccaaataaacacggtaatccattcatcggtcatgagcataccctttatgatatatcaccaggacatgtatacgcaaaaagtaaacgtatggccgagcaactggttatgaaagccaataattccgtaatcatgaatggcgcaaaattgtatacttgttgcctaagacccactggaatttacggagaaggagacaaattgacgaaagtcttttacgagcaatgtaagcaacacggtaacattatgtatcgtacagtcgatgatgacgctgtgcatagccgggtatatgtaggaaatgttgcatggatgcacgtgttggctgcaaaatatatccagtatccgggatctgcgattaaaggaaatgcttacttttgctacgattactctccatcgtgttcttacgatatgtttaatcttctattgatgaaaccattgggaatagaacaaggatctaggattccaagatggatgctaaaaatgtacgcgtgcaagaatgatatgaagagaattctatttagaaaaccatcaatactcaacaactatacgttgaagatatccaacactacatttgaggtgcgtaccaacaatgcagaactagatttcaactactcccctatctttgacgtcgatgtggcattcgaacgaacacggaaatggctagaagaatcagaataa

SEQ ID NO: 11356 - DNA, 18 bp, unidentified
  source 1..18: mol_type = other DNA
  misc_feature 1..18: note = Synthetic
gtggtgccggatttctag

SEQ ID NO: 11357 - DNA, 75 bp, unidentified
  misc_feature 1..75: note = Synthetic
  source 1..75: mol_type = other DNA
atgatgttcaggaaatcagagttatcgatgttgcagaagatccacaaccactcacatcaaaggttaaggttataa

SEQ ID NO: 11358 - DNA, 6612 bp, unidentified
  source 1..6612: mol_type = other DNA
  misc_feature 1..6612: note = Synthetic
atacaaacggctaccaacattaccattataaaaaacgtagggtccaagctgtatttcaccatggactccctctctgttaaccaaattttgtacccggaggtgcaccttgatagcccgatagtgactaacaagctggttgccatattagagtatgcccggatcccacataagtacgtcctcgaggatccaactctctgcaaaaatataaagcatcgcctagatagcggtttttcaaatcagatgatcatcaacaatgttgagatagggaatgttgtccaatccaaactcaaaggttatccgaaccatgagcacatcccatatccagaatgcaaccaagagttgttcaatgctcgggataagaaggctacggagaaaattcgatccctgtttaaaaaggggaccaccctgtacaccaaaatcagtgataaagtgtgtacatgcttagagactgctaactcaagactaggattgggtgccgacttaggaattgggatcaaggagaagatcttgagtctaagcttgtacatgcagagttcccagtggtatgagccattcttgttctggttcacgatcaagacagaaatgagatcaacaatcaagtcatcagtccataccagtcaccgacgaaggtacgtaccctctttcttctccggtgactcatttgagattctgatttcccgcgatctagtggcgatagtacacaggagactccatcatgtgtattacctgacattcgagttggtgttgatgtactgtgatatcatagagggtaggttgatgactgagactgctatggtcatagatcccaggtacacagagctgctggagagagtccggtatatgtggaaactcattgatgggtttttcccaactcttggaaattctacttaccaagttgtggctctgttagagccgctttcacttgcctacctccaactgagagatgtaacaacagaattaagaggtgcattcctaaatcattgcttcactgagatccgtgaaattcttaatcagaacggagtcacagatgacaacacataccacgagatcgtcgaggccctagattatattttcataactgatgacattcacctcacgggtgaaatcttttcattctttagaagtttcggccaccccaggcttgaggcaatcacagccgcagacaatgtaaggaaacatatgaaccagccgaaggtaatagtttatgaaaccctgatgaaaggacatgccatattttgcgggattatcatcaacgggtatcgggacaggcatggagggagctggccacccatccacctccctgtgcatgccgccacctctataaggaatgctcaggcttcgggtgaagggttgacgtatgagcagtgtgtcgataactggaagtcatttgccggtgtaaggtttggctgcttcatgcccctgagtttagacagtgaccttactatgtacttaaaggacaaggctctagcagctctcaaaaaggaatgggactccgcttatccgaaagaattcctccgctataacccacctaagagtactagttcacggaggctagtcgatgtcttcctcaatgattcgacatttgacccttataacatgatcatgtatgtggtgagcggtgattacctccgagaccctgacttcaattcatcttatagcctaaaggaaaaggaaattaaagagactgggagactctttgccaaaatgacttacaagatgagagcatgtcaggttatagccgaaaacctgattcccaatggtatcgggaagtattttagagacaatgggatggcaaaagatgagcatgacctcactaaagctctccatacattggcagtctcaggagttccaaaggattttaaagataattaccgcggtggacccagggccaagactttctcctccaagaagacacacactggggctggtatctcaagggtgtctagaaatgaggcaaactaccggtcacccgaacaacgaggctgcaacaccggtggccccgatcagatagagagttatgaaacagttagtgcttttatcacagctgatctgaaaaagtattgcctgaactggaggtatgagacaatcagcttatttgctcaaaggctaaatgagatatacgggttaccatccttcttccagtggttacataggcgccttgaaagatcagtattgtatgtcagtgaccctcattgtccccccgatttagatagccacgtgaacttggataatgtcccgaatgatcagattttcatcaaataccctatgggggggatagaaggctattgtcaaaaactgtggacaattagcactatcccctatctttacttggctgcacatgagagcggggtcaggattgcctctcttgtccagggagacaatcagacaattgcagtcaccaagcgggtcccaagttcatggccttaccaccttaagaaaagagaagctgcacgcgtgacaagagaatatttctgtctcctgaggcaaagactccatgatattggccatcaccttaaggcaaacgaaactatcgtgtcatcacacttctttgtttactccaaggggatatattacgacggactactaatctcacagtctctcaaaagcattgcacgatgtgtcttctggtcagaaactatagttgatgagacaagagcagcttgcagcaacatcgccacgactatagccaagagcatagagagagggtttgacaggtaccttgcttattctctgaacatcctgaaagttatacaacagatactaatatcactgggtttcacaataaattctacaatgacacaagatgtagtggtccctcttctatcaaaccatgacctcctgataaggatggcccttttacctgctccaatcgggggtatgaactacttaaacatgagtaggttatttgtcaggaacatcggggatccagtgacatcgtctatagctgacctcaagaggatgattggtgcgtcactgatgcctgaggagacacttcatcaggtgatgacacaacaaccaggtgactcatcatttctcgactgggctagtgacccctattctgctaacctagtatgcattcaaagcataacaaggcttctcaagaatatcaccgcaaagtatgttctaatcaacagccccaacccgatgctcagaggtttattccatgatgacagcaaggaagaagatgagcaattagccacctttctaatggacaggagtgtaatagtcccgagagccgcccacgaaatattagaccatagtataactggagcccgggaagcaattgcagggatgctagatacaactaaaggactcatcaggactagctccagaagagggggcctgaccaccagagtgatagcaagactatccacatatgactatgagcagtttagatctgggatggtgcttctaacaggctcaaagagaaattatctcattgatagagactcatgctcagtccagctggctagggctctgagaagccacatgtgggccaggctcgcccgaggaaggcccatatatggcttagaggtgccggacgtgctagaatcaatgagaggccacctgatccaacgccatgcaacctgcatcttatgtgactttggttcagccaattatggttggttttttgtaccatcgaactgtcagttggatgacatagatagagagacgtcagcactcagggtcccctacatcggatcgacaacagatgagaggactgatatgaagctcgcatttgttaagtcacccagtcgaaccctgcggtcagctgtgcggatagccaccgtgtactcatgggcatacggagatgacgacaaatcatggaatgaagctttaaaactagcacagcagagggcaaaagtgagcctggaggaattaaaaatgataactccaatttcaacatccaccaacctagcacatagactcagggatcggagtacccaagttaagtactctgggacatctttggtcagagtggctcggtatacaacaatatcaaatgataacctatcctttgtcatctcggataagaaagtagatacaaacttcatctatcagcaggggatgttactaggtttgggtgtcctcgagacattgtttaggcttgataaagacacaggaccctcaaacactgtactgcacctccatgtagaaacagattgctgcgtgatccctatggtagatcacccgaggatcccaagcttgcatgaattgaagttcagaagggagctatgtaccaacccactgatttatgatagtgcacccatcatcgacagggaagcaacaaaactctatacccaaagtcatcggagacatctcgtggaatttgtgacatggtctacatctcagttgtaccacatcttggcaaaatcaactgcattgtcgatgatagacttagtgacaaaattcgagaaagatcatatgaacgaggtatctgctctgataggagatgatgatatcaacagttttataacagagttcctccttgtagagcctagactgtttaccgtctacttaggtcagtgtacagctataaattgggcatttgacattcattaccatcgaccttcagggaaatatcagatgggggaactcctgacctcattccttgcaaggatgagtaagagcgtattcaaggtctttgtgaatgcactgagccaccccaagatttacaggaagttctggcatagtgggattatagagccaatccatggtccttcattggatactcaaaatcttcatattactgtatgtaatatgatctacagttgctatatgacttaccttgacctactgttgaatgacgaactggacgagttcacatacctcctctgcgaaagtgatgaggacatagtggctgaccgctttgataacatacaggctagacatctgtgtgtcctatcggatttatactgcaatcccagaggatgcccgaccatcaggggtctacaaccagtagagaaatgtgccatcatgaccaaacacatcgaggccgaggcaaaactatccctcgctggcccttcatggaacataggccccattgtaattgatcacttctcttgttctctgacttacttaaggcggggttcgatcaagcaaattcggttgagggttgatccagggttcatttttgaggctctaactgtaacagatccgcagaaacccaactttcagcatgaacaagccgctgatatgcacataagcaattttaggccgccctatgatggtgtggcagagctgttagggacgataaactcgagtaagcataaccttcctatacttggcacaggtgtttataattacgaggtccatgcgtttcgcaggataggattaaactcgtctgcttgttacaaggcagtggagatatccacgctaatcaagagctctatggacccagaagaggatagcttgttcttaggggaaggatcagggtcaatgttgataacgtataaagaaatccttaaattaaagaagtgcttttacaacagcggggtgtcagcagaatctagatcaggccagcgagagttagccccttacccatctgaggtaagcctggtcgaacatcagcttggtgcagagaaaactgtcaaagtactattcaacgggaggcccgaggttacctggataggtagtgtagattgcttcaattatatcatcagcaatatacagacatctagccttggcctaatacactcagacatagaaaccctccctacaaaagatatcacagagaaattggaagagttgtcagctatcctagcgttggctctattgctaggtaaggtaggttcagtattggttatcaaagtaatgcctataagtggagactatgtccaggggttcatgagttatgtggtgccttattacagagaggtactcatcatctacccgagatatagtaacttcatatcaactgaggcatatctagtcctgttgggactcagggccaatagactgatagatcctgaaagaattaaacaacaggtgatggaatccgggatcagaactatccccggtttagtcggacatatattatccatcaagcagctcaattgcatacaaagccaggcggggccagctatcactagaggtgagataaacccgatattaagaaagctcacacctatcgagcgtattctgatcagctgcgggcttaccatcaacggcacaaagatttgcagtgatgtagtccaccatgatatatcatcagggccggacggtctgcttaattcttctatcattctgctcaaggagttggccagattcagggataatcaaaggagtcagcaggggatgttccatgcttaccccgttctgctgagcagcaggcagcgtgaactgatctccagggttgctagaaagttttggggttacattctcttatactccagcgataggagactactaagtaggctggtgagtaatctcaagtctggataccttttgtttgatcttcatcagaacttgttcatgaaaaacctgtcaaagtctgagaagcagctgatcagaacaggagggctcaagcgtgagtggctttttaaactcactacgaaagagatcaaagagtggttcaagctaataggttacagtgcactcattcgggagtga

SEQ ID NO: 11359 - DNA, 57 bp, unidentified
  source 1..57: mol_type = other DNA
  misc_feature 1..57: note = Synthetic
atgcccggatcccacataagtacgtcctcgaggatccaactctctgcaaaaatataa

SEQ ID NO: 11360 - DNA, 1809 bp, unidentified
  misc_feature 1..1809: note = Synthetic
  source 1..1809: mol_type = other DNA
atggaaagcgatgctaaaaactatcaaatcatggattcttgggaagaggaatcaagagataaatcaactaatatctcctcggccctcaacatcattgaattcatactcagcaccgacccccaagaagacctatcggaaaacgacacaatcaacacaagaacccagcaactcagtgccaccatctgtcaaccagaaatcaaaccaacagaaacaagtgaaaaagatagtggatcaactgacaaaaatagacagtctgggtcatcatacgaatgtacaacagaagcaaaagatagaaatattgatcaggaaactgtacagagaggacctgggagaagaagcagctcagatagtagagctgaggctgtggtctctggaggaatctccagaagcatcacagattctaaaaatggaacccagaacacggaggatattgatctcaatgaaattagaaagatggataaggactctattgaggggaaaatgcgacaacctgcaaatgttccaagcgagatatcaggaagtgatgtcatatttacaacagaacaaagtagaaacagtgatcatggaagaagcttggaatctatcagtacacctgatacaagatcaataagtgttgttactgctgcaacaccagatgatgaagaggaaatactaatgaaaaatagtaggatgaagaaaagttcttcaacacaccaagaagatgacaaaagaattaaaaaagggggaaaagggaaagactggtttaagaaatcaaaagatactgacaaccagacatcaacatcagactacagatccacatcaaaagggcaaaagaaaatctcaaagacaacaaccaccaacaccgacacaaaggggcaaacagaaatacagacagaatcatcagaaacacaactctcatcatggaatctcatcatcgacaacaacaccgaccgaaccgaacagacaagcacaacccccccaacaacaactcccagatcaacttatacaaaagaatcaacccgaacaaactctgaatccaaacccaagacacaaaagacaaatggaaaggaaaggaaggatacagaagagagcaatcgatttacagagagggcaattactctattgcagaatcttggtgtaattcaatccacatcaaaactagatttatatcaagacaaacgagttgtatgtgtagcaaatgtactaaacaatgtagatactgcatcaaagatagacttcctggcaggattagtcataggggtttcaatggataacgacacaaaattaatacagatacaaaatgaaatgttaaacctcaaagcagatctaaagaaaatggacgaatcacatagaaggttgatagaaaatcaaagagaacaactgtcattgatcacgtcactaatttcaaatcttaaaattatgactgagagaggaggaaagaaagaccaaaatgaatccaatgagagagtatctatgatcaagacaaaattgaaagaagaaaagatcaagaaaaccaggtttgacccacttatggaggcacaaggcattgacaaaaatatacccgatctatatcgacacgcaggaaatacactagagaacgatgtacaagttaaatcagagatattaagttcatacaatgagtcaaatgcaacaagactaatacccaaaaaagtgagcagtacaatgagatcactagttgcagtcatcaacaatagcaatctctcacaaagcacaaaacaatcatatataaacgaactcaaacattgcaaaagtgatgaagaagtatctgaattaatggacatgttcaatgaagatgtcaacaattgctaa

SEQ ID NO: 11361 - DNA, 1320 bp, unidentified
  misc_feature 1..1320: note = Synthetic
  source 1..1320: mol_type = other DNA
atggaaagcgatgctaaaaactatcaaatcatggattcttgggaagaggaatcaagagataaatcaactaatatctcctcggccctcaacatcattgaattcatactcagcaccgacccccaagaagacctatcggaaaacgacacaatcaacacaagaacccagcaactcagtgccaccatctgtcaaccagaaatcaaaccaacagaaacaagtgaaaaagatagtggatcaactgacaaaaatagacagtctgggtcatcatacgaatgtacaacagaagcaaaagatagaaatattgatcaggaaactgtacagagaggacctgggagaagaagcagctcagatagtagagctgaggctgtggtctctggaggaatctccagaagcatcacagattctaaaaatggaacccagaacacggaggatattgatctcaatgaaattagaaagatggataaggactctattgaggggaaaatgcgacaacctgcaaatgttccaagcgagatatcaggaagtgatgtcatatttacaacagaacaaagtagaaacagtgatcatggaagaagcttggaatctatcagtacacctgatacaagatcaataagtgttgttactgctgcaacaccagatgatgaagaggaaatactaatgaaaaatagtaggatgaagaaaagttcttcaacacaccaagaagatgacaaaagaattaaaaaagggggaaaagggaaagactggtttaagaaatcaaaagatactgacaaccagacatcaacatcagactacagatccacatcaaaagggcaaaagaaaatctcaaagacaacaaccaccaacaccgacacaaaggggcaaacagaaatacagacagaatcatcagaaacacaactctcatcatggaatctcatcatcgacaacaacaccgaccgaaccgaacagacaagcacaacccccccaacaacaactcccagatcaacttatacaaaagaatcaacccgaacaaactctgaatccaaacccaagacacaaaagacaaatggaaaggaaaggaaggatacagaagagagcaatcgatttacagagagggcaattactctattgcagaatcttggtgtaattcaatccacatcaaaactagatttatatcaagacaaacgagttgtatgtgtagcaaatgtactaaacaatgtagatactgcatcaaagatagacttcctggcaggattagtcataggggtttcaatggataacgacacaaaattaatacagatacaaaatgaaatgttaaacctcaaagcagatctaaagaaaatggac

SEQ ID NO: 11362 - DNA, 1812 bp, unidentified
  source 1..1812: mol_type = other DNA
  misc_feature 1..1812: note = Synthetic
atggaaagcgatgctaaaaactatcaaatcatggattcttgggaagaggaatcaagagataaatcaactaatatctcctcggccctcaatatcattgaattcatacttagcaccgacccccaagaagacctatcggaaaacgacacaatcaacacaagaacccagcaactcagtgccaccatctatcaaccaaaaatcaaaccaacagaaacaagtgagaaagatagtggatcaactgacaaaaatagacagtctgggtcatcacacgaatgtacaacagaagcaaaagatagaactattgatcaggaaactgtacagagaggacctgggagaagaagcagctcagatagtagagctgagactgtggtctctggaggaatctccagaagcatcacaaattctaaaaatggaacccagaacacggaggatattgatctcaatgaaattagaaagatggataaggactctattgaggggaaagtgcgacaatctgcagatgttccaagcgagatatcaggaagtgatgtcatatttacaacagaacaaagtagaaacagtgatcatggaagaagcttggaatctatcagtacacctgatacaagatcaataagtgttgttactgctgcaacaccagatgatgaagaagaaatactaatgaaaaatagtaggacaaagaaaagttcttcaatacaccaagaagatgacaaaagaattaaaaaagggggaaaagggaaagactggtttaagaaatcaaaagatactgacaaccagataccaacatcagactacagatccacatcaaaagggcagaagaaaatctcaaaaacaacaaccatcaacaccgacacaaaggggcaaacagaaatacagacagaatcatcaggaacacaatcctcatcatggaatctcaccattgataacaacacagatcgaaccgaacagacaaacacaactcccccaacaacaacctccggatcaacttatacaaaagaatcaatccgaacaaactctggatccaaacccaagacacaaaagacaaatggaaaggaaaggaaggatacagaagagagcaatcgatttacagagagggcaattactctattgcagaatcttggtgtaattcaatccacatcaaaactagatttatatcaagacaaacgagttgtatgtgtagcaaatgtactaaacaatgtagatactgcatcaaagatagacttcttggcaggattagtcataggggtttcaatggacaacgacacaaaattaacacagatacaaaatgaaatgctaaacctcaaagcagatctaaagaaaatggatgaatcacatagaagattgatagaaaatcaaagagaacaactgtcattgatcacgtcattaatttcaaatcttaaaattatgactgagagaggaggaaagaaagaccaaaatgaatccaatgagagagtatccatgatcaaaacaaaattgaaagaagaaaagatcaagaaaactaggtttgacccacttatggagacacaagggattgacaagaatatacctgatctatatcgacatgcaggaaatacactagagaacgatgtgcaagttaaatcagagatattaagttcatacaatgaatcaaatgcaacaagactaatacccaaaaaagtgagcagtacaatgagatcactagttgcagttataagcaacagcaatctctcacaaagcacaaaacaatcatatataaacgaactcaaacattgcaaaaatgatgaagaagtatctgaattaatggacatgttcaatgaagatgtcaataattgccaatga

SEQ ID NO: 11363 - DNA, 1122 bp, unidentified
  source 1..1122: mol_type = other DNA
  misc_feature 1..1122: note = Synthetic
atggaaagcgatgctaaaaactatcaaatcatggattcttgggaagaggaatcaagagataaatcaactaatatctcctcggccctcaatatcattgaattcatacttagcaccgacccccaagaagacctatcggaaaacgacacaatcaacacaagaacccagcaactcagtgccaccatctatcaaccaaaaatcaaaccaacagaaacaagtgagaaagatagtggatcaactgacaaaaatagacagtctgggtcatcacacgaatgtacaacagaagcaaaagatagaactattgatcaggaaactgtacagagaggacctgggagaagaagcagctcagatagtagagctgagactgtggtctctggaggaatctccagaagcatcacaaattctaaaaatggaacccagaacacggaggatattgatctcaatgaaattagaaagatggataaggactctattgaggggaaagtgcgacaatctgcagatgttccaagcgagatatcaggaagtgatgtcatatttacaacagaacaaagtagaaacagtgatcatggaagaagcttggaatctatcagtacacctgatacaagatcaataagtgttgttactgctgcaacaccagatgatgaagaagaaatactaatgaaaaatagtaggacaaagaaaagttcttcaatacaccaagaagatgacaaaagaattaaaaaagggggagaaaagggaaagactggtttaagaaatcaaaagatactgacaaccagataccaacatcagactacagatccacatcaaaagggcagaagaaaatctcaaaaacaacaaccatcaacaccgacacaaaggggcaaacagaaatacagacagaatcatcaggaacacaatcctcatcatggaatctcaccattgataacaacacagatcgaaccgaacagacaaacacaactcccccaacaacaacctccggatcaacttatacaaaagaatcaatccgaacaaactctggatccaaacccaagacacaaaagacaaatggaaaggaaaggaaggatacagaagagagcaatcgatttacagagagggcaattactctattgcagaatcttggtgtaa

SEQ ID NO: 11364 - DNA, 1119 bp, unidentified
  misc_feature 1..1119: note = Synthetic
  source 1..1119: mol_type = other DNA
atggacaaacttagagttctatacgatgagttcgtcaccattagtaaagataatcttgaacgcgagactggtcttagcgcatcagatgttgatatggattttgatttaaacatttttatgacgttggttccagtcttggagaaaaaggtatgccccatcactccaactatagaagatgataaaatcgtaactatgatgaaatattgtagttatcagagtttttcattctggttccttaaatctggcgccgtcgtgaaatcggtatataataaactagatgatgtggaaaaggaaaagtttgtagccacatttagagacatgttgcttaatgtacaaactctaatttctcttaactctatgtatactagactgcgtcaagatacagaagatatcgtatccgattccaaaaaaataatggagattgtttcccatttgagagcgtcgactacagagaacgcggcgtatcaagttctccaacaaaacaatagtttcatcgtatctacactaaataaaatcttatctgatgaaaactatctcttgaaaattattgcagtattcgactctaaactaatttctgaaaaggagacattgaatgaatacaaacaattgtacaccatttcttctgaaagtttggtatacggaattagatgcgttagtaatctggatatatcatctgttcaactgagtaataataaatacgttctctttgttaagaaaatgctacctaaaatcatactgtttcagaataatgacatcaacgcacaacaatttgctaatgttatttctaaaatttatactctgatttatagacaattgacgtcgaatgtcgatgttggatgtctattaacagataccatagaatctgccaaaactaaaatatccgtagaaaaaattaaacagacgggtattaataatattcaaagtcttatcaaattcatatctgataacaagaaagaatataagacaataatctctgaagaatatctatcgaaggaagatagaatcattactattttgcaaaatatcgttaatgaacacgatataaagtacgacaataaactactgaacatgagagacttgattgtgacatttagagaacgatattcgtataaattctaa

SEQ ID NO: 11365 - DNA, 1119 bp, unidentified
  source 1..1119: mol_type = other DNA
  misc_feature 1..1119: note = Synthetic
atggacaaacttagagttctatacgatgagttcgtcaccattagtaaagataatcttgaacgcgagactggtcttagcgcatcagatgttgatatggattttgatttaaacatttttatgacgttggttccagtcttggagaaaaaggtatgtgttatcacaccaactatagaagatgataaaatcgtaactatgatgaaatattgtagttatcagagtttttcattctggttccttaaatctggtgccgttgtgaaatcggtatataataaactagatgatgtggaaaaagaaaagtttgtagccacatttagagacatgttgcttaatgtacaaactctaatttctcttaactctatgtatactagactgcgtcaagataccgaagatatagtatccgattccaaaaaaataatagagattgtttcccatttgagagcgtcgactacagagaatgcggcgtatcaagttctccaacaaaacaatagttttatcatatctacactaaataaaatcttatctgatgaaaactatctcttgaaaattattgcagtattcgactctaaactaatttctgaaaaggagacattgaatgaatacaaacaattgtacaccatttcttctgaaagtttggtatatggaatcagatgcgttagtaatctggatatatcatctgttcaactgagtaacaataaatacgttctctttgttaagaaaatgctacctaaaatcatactgtttcagaataacgacatcaacgcacaacaatttgctaatgttatttctaaaatttatactctgatttatagacaattgacgtcgaatgtcgatgttggatgcctattaacagacaccatagaatctaccaaaactaaaatatctatagaaaaaattaaacagacgggtattaataatgttcaaagtcttatcaaattcatatcggataacaagaaagaatataagacaataatctctgaagaatatctatcgaaggaagatagaatcattactattttgcaaaatatcgttaatgaacacgatataaagtacgacaataaactgctgaatatgagagacttgattgtaacatttagagaacgatattcgtataaattctaa

SEQ ID NO: 11366 - DNA, 87 bp, unidentified; identical to SEQ ID NO: 2235
  misc_feature 1..87: note = Synthetic
  source 1..87: mol_type = other DNA

SEQ ID NO: 11367 - DNA, 87 bp, unidentified; identical to SEQ ID NO: 2235
  misc_feature 1..87: note = Synthetic
  source 1..87: mol_type = other DNA

SEQ ID NO: 11368 - DNA, 1119 bp, unidentified
  source 1..1119: mol_type = other DNA
  misc_feature 1..1119: note = Synthetic
atggacaaacttagagttctatatgatgagttcgtcaccattagtaaagataatcttgaacgcgagactggtcttagcgcatcagatgttgatatggattttgatttaaacatttttatgacgttggttccagtcttggagaaaaaggtatgcgctattacaccaactatagaagatgataaaatcgtaactatgatgaaatattgtagttatcagagtttttcattctggttccttaaatctggtgccgttgtgaaatcggtatataataaactagattatgtgaaaaaggaaaagtttgtagccacatttagagacatgttgcttaatgtacaaactctaatctctcttaactctatgtatactagactgcgtcaagataccgaagatatagtatccgattccaaaaaaataatggagattgtttcccatttgagagcgtcgactacagagaacgcggcgtatcaagttctccaacaaaacaatagttttatcatatctacactaaataaaatcttatctgatgaaaactatctcttgaaaattattgcagtattcgactctaaactaatttctgaaaaagagacattgaatgaatacaaacaattgtacaccatttcttctgaaagtttggtatacggaatcagatgcgttagtaatctggatatatcatctgttcaactgagtaacaataaatacgttctctttgttaagaaaatgctacctaaaatcatactgtttcagaataacgacatcaatgcacaacaattcgctaatgttatttctaaaatttatacgttgatttatagacaattgacgtcgaatgtcgatgttggatgtctattgacagatacgatagaatctgccaaaactaaaatatctgtagaaaaaattaaacagacgggtatcaataatgttcaaagtcttatcaaattcatatcggataacaagaaaaaatataagacaataatctctgaagaatatctatcgaaggaagatagaatcattactattttgcaagatatcgttaatgaacacgatataaagtacgacaataaattgctgaacatgcgagacttgattgtgacatttagagaacgatattcgtataaattctaa

SEQ ID NO: 11369 - DNA, 63 bp, unidentified; identical to SEQ ID NO: 2237
  source 1..63: mol_type = other DNA
  misc_feature 1..63: note = Synthetic

SEQ ID NO: 11370 - DNA, 1119 bp, unidentified
  misc_feature 1..1119: note = Synthetic
  source 1..1119: mol_type = other DNA
atggacaaacttagagttctatacgatgagttcgtcaccattagtaaagataatcttgaacgcgagactggtcttagcgcatcagatgttgatatggattttgatttaaacatttttatgacgttggttccagtcttggagaaaaaggtatgtgttatcacaccaactatagaagatgataaaattgtaactatgatgaaatattgtagttatcagagtttttcattctggtttcttaaatctggcgccgttgtaaaatcggtatataataaactagatgatgcggaaaaggaaaagtttgtagccacatttaaagacatgttgcttaatgtacaaactctaatttctcttaactctatgtatactagactgcgtcaagataccgaagatatagtatccgattccaaaaaaataatggagattgtttcccatttgagagcgtcgactacagagaatgcggcgtatcaagttctccaacaaaacaatagttttatcatatctacactaaataaaatcttatctgatgaaaactatcttttgaaaattattgcagtatttgactctaaactaatttctgaaaaggagacattgaatgaatacaaacaattgtacaccatttcttctgaaagtttggtatatggaatcagatgcgttagtaatctggatatatcatctgttcaactgagtaacaataaatacgttctctttgttaagaaaatgctacctaaaatcatactgtttcagaataacgacatcaacgcacaacaatttgctaatgttatttctaaaatttatactctaatttatagacaattaacgtcgaatgtcgatgttgggtgtctattaacagacacaatagaatctaccaaaactaaaatatctgtagaaaaatttaaacaaacgggtattaataatgttcaaagtcttattaaatttatatcggataacaagaaagaatataagacaataatctctgaagaatatctatcgaaggaagatagaatcattactattttgcaaaatatcgttaatgaacacgatataaagtacgacaataacctgctaaatatgagagacttgattgtgacatttagagaacgatattcgtataaattctaa

SEQ ID NO: 11371 - DNA, 87 bp, unidentified; identical to SEQ ID NO: 2235
  misc_feature 1..87: note = Synthetic
  source 1..87: mol_type = other DNA

SEQ ID NO: 11372 - DNA, 219 bp, unidentified
  source 1..219: mol_type = other DNA
  misc_feature 1..219: note = Synthetic
gtgcgttccggaatgaagagccgcaaaaagaagcccaagactacagttatcgatgacgatgatgattgcatgacgtgttctgcctgtcagtctaaattggttaagatttccgacatcacaaaagtatcattggattatattaatactatgaggggtaatacactggcctgcgcagcatgcggatcgtcgcttaaacttcttaacgattttgcgagttaa

SEQ ID NO: 11373 - DNA, 219 bp, unidentified
  misc_feature 1..219: note = Synthetic
  source 1..219: mol_type = other DNA
atgcgttccggaatgaagagtcgcaaaaagaagcccaagactacagttatcgatgacggtgatgattgcatgacgtgttctgcctgtcagtctaaattggttaagatttccgacatcacaaaagtatcattggattatattaatactatgaggggtaatacactggcctgctcagcatgtggatcgtctcttaaacttcttaacgattttgcgagttaa

SEQ ID NO: 11374 - DNA, 81 bp, unidentified; identical to SEQ ID NO: 2243
  misc_feature 1..81: note = Synthetic
  source 1..81: mol_type = other DNA

SEQ ID NO: 11375 - DNA, 219 bp, unidentified; identical to SEQ ID NO: 11372
  misc_feature 1..219: note = Synthetic
  source 1..219: mol_type = other DNA

SEQ ID NO: 11376 - DNA, 15 bp, unidentified
  misc_feature 1..15: note = Synthetic
  source 1..15: mol_type = other DNA
atgttcactaattaa

SEQ ID NO: 11377 - DNA, 618 bp, unidentified
  misc_feature 1..618: note = Synthetic
  source 1..618: mol_type = other DNA
atgctggaagtagaagctcctctggaaatcgttcaggaatcctcaagaaaacttcttgggctgaccaatctgagcgaaattaccaaacctttaatagaggcagaaaaacccaacctaaattcactgtgtctactcaaccacaaggaaatactatcccacattattcctggttctccgggatcactcaatttcaaaaaggtagagactttaaattttcagatggtcaaggagttcccattgctttcggagtacccccttctgaagcaaaaggatattggtatagacacagccggcgttcttttaaaacagctgatggtcaacaaaagcagttgttaccgagatggtatttctactatctcggtaccggcccatatgccaatgcatcctatggtgaatccctcgaaggggtcttctgggttgctaatcaccaagctgacacttctactccctccgatgtttcgtcaagggatcctactactcaagaagctatccctactaggtttccgcctggtacgattttgcctcaaggctattatgttgaaggctcaggaaggtctgcttctaatagtcgaccaggttcacgttctcaatcacgtggacccaataatcgttcattaa

SEQ ID NO: 11378 - DNA, 18 bp, unidentified
  source 1..18: mol_type = other DNA
  misc_feature 1..18: note = Synthetic
atggaattccatacttaa

SEQ ID NO: 11379 - DNA, 18 bp, unidentified
  misc_feature 1..18: note = Synthetic
  source 1..18: mol_type = other DNA
atggaattccatacttaa

SEQ ID NO: 11380 - DNA, 63 bp, unidentified; identical to SEQ ID NO: 2246
  source 1..63: mol_type = other DNA
  misc_feature 1..63: note = Synthetic

SEQ ID NO: 11381 - DNA, 63 bp, unidentified; identical to SEQ ID NO: 2246
  source 1..63: mol_type = other DNA
  misc_feature 1..63: note = Synthetic

SEQ ID NO: 11382 - DNA, 30 bp, unidentified; identical to SEQ ID NO: 2248
  source 1..30: mol_type = other DNA
  misc_feature 1..30: note = Synthetic

SEQ ID NO: 11383 - DNA, 15 bp, unidentified
  source 1..15: mol_type = other DNA
  misc_feature 1..15: note = Synthetic
atgttcactaattaa

SEQ ID NO: 11384 - DNA, 195 bp, unidentified; identical to SEQ ID NO: 2249
  source 1..195: mol_type = other DNA
  misc_feature 1..195: note = Synthetic

SEQ ID NO: 11385 - DNA, 2796 bp, unidentified
  misc_feature 1..2796: note = Synthetic
  source 1..2796: mol_type = other DNA
atggccaccccatcgatgatgccgcagtggtcttacatgcacatcgccgggcaggacgcctcggagtacctgagccccggtctcgtgcagttcgcccgcgccaccgacacctacttcagcttgggaaacaagtttagaaaccccaccgtggcccccacccacgatgtaaccacggaccgctcgcaaaggctgaccctgcgttttgtgcccgtagaccgggaggacaccgcgtactcttacaaagtgcgctacacgctggccgtaggggacaaccgagtgctggacatggccagcacctactttgacatccggggagtgctggatcgcggtcccagttttaagccctactcgggtaccgcgtacaattccctggctcccaagggcgctcccaaccctgcagaatggacgaattcagacagcaaagttaaagtgagggcacaggcgccttttgttagctcgtatggtgctacagcgattacaaaagagggtattcaggtgggagtaaccttaacagactccggatcaacaccacagtatgcagataaaacgtatcagcctgagccgcaaattggagaactacagtggaacagcgatgttggaaccgatgacaaaatagcaggaagagtgctaaagaaaacaacgcccatgttcccttgttacggctcatatgccaggcccactaatgaaaaaggaggacaggcaacaccgtccgctagtcaagacgtgcaaaatcccgaattacaattttttgcctctactaatgtcgccaatacaccaaaagcagttctatatgcggaggacgtgtcaattgaagcgccagacactcacttggtgttcaaaccaacagtcactgaaggcattacaagttcagaggctctactgacccaacaagctgctcccaaccgtccaaactacatagcctttagagataattttattggtctcatgtactacaatagcacaggtaacatgggagtactggcaggccaggcttctcagctaaatgcagttgttgacctgcaagacagaaatactgagctgtcctaccaactcatgttggacgccctcggagaccgcagtcggtacttttctatgtggaaccaagctgtggatagttacgatcctgatgtaagaatcatagaaaaccatggcgtagaagatgaattgcctaattattgctttcctttgggaggcatggcagtaaccgacacctactcgcctataaaggttaatggaggaggcaatggatgggaagccaataacggcgttttcaccgaaagaggagtggaaataggttcagggaacatgtttgccatggagattaacctgcaagccaacctatggcgtagctttctgtactccaatattgggctgtacctgccagactctctcaaaatcactcctgacaacatcacactcccagagaacaaaaacacctatcagtatatgaacggtcgcgtgacgccacccgggctggttgacacctacgttaacgtgggcgcgcgctggtcccccgatgtcatggacagtattaacccttttaatcaccaccgcaacgccggactccgctaccgttccatgctcctgggaaacggacgctacgtgcccttccacatccaggtgccccagaaattctttgcaattaaaaacctgctgctgctccccggttcctacacctacgagtggaacttccgcaaggacgtgaacatgatcttgcagagctcgctgggcaatgacctgcgagtggacggggccagcatccgcttcgacagcatcaacctgtacgccaactttttccccatggcccacaacacggcctccaccctggaagccatgctgcgcaacgacaccaacgaccaatctttcaacgactacctgtgcgcggccaacatgctgtaccccatccccgccaacgccaccagcgtgcccatctccattccctctcgcaactgggcagccttcaggggctggagtttcacccgcctcaaaaccaaggagaccccctcgctgggctccgggttcgacccctacttcgtctactccggctccatcccctacctggacggcaccttctacctcaaccatactttcaaaaaggtgtcaatcatgttcgactcctccgtcagctggcccggcaacgaccgtctgctgacgcccaacgagttcgaaatcaagcgttcggtggacggtgaagggtacaacgtggctcagagcaacatgaccaaggactggttcctgattcagatgctcagccactacaacatcggctaccagggcttctacgtgcccgaaaattacaaggaccgcatgtactctttcttcagaaacttccaacccatgagccgccaaattgtagattcaacggcttacactaattatcaggatgtgaaactgccataccagcataacaactcagggttcgtgggctacatgggacccaccatgcgagaggggcaggcctacccggccaactatccctatcccctgattggggccaccgccgtgcccagcctcacgcagaaaaagttcctctgcgaccgggtgatgtggaggatccccttctctagcaacttcatgtctatgggctccctcaccgacctggggcagaacatgctgtacgccaactccgctcacgccttggatatgacctttgaggtggatcccatggatgagcccacgcttctctatgttctgtttgaagtcttcgacgtggtgcgcatccaccagccgcaccgcggcgtcatcgaggccgtctacctgcgcacacctttctctgccggtaacgccaccacctaa

SEQ ID NO: 11386 - DNA, 1050 bp, unidentified
  source 1..1050: mol_type = other DNA
  misc_feature 1..1050: note = Synthetic
atggggaacccccggagcccgctcgatcgacggctacggttcaggaatgtaccgttcttaccgccccgaattgcggcatcgtcaacaacgacggcgcggtctctgaaggccaagaccatggagatgcggttcaccatagcctggatgtggtttcccagtgtgctgctgatactggggttgttgacacctccgagtaacgggtgcaccgtcgatgttggacgaaacgtatccattcgagaacagtgccgccttcgaaacggtgcgacgttctccaagggagacatcgaaggtaacttcagtgggcccgtcgtcgtggagttggactacgaagacatcgatattactggcgaacggcagcgacttcggttccatctcagcggactcgggtgtcctacaaaggaaaatataagaaaagacaatgaaagcgacgtcaacggtggaattcgctgggctctatatatacaaaccggcgacgccaagtacggtattcgtaaccagcatttgagtatacggttaatgtatcctggggaaaaaaatacacaacagctgttgggttctgatttcagttgcgaacgtcaccggagaccgtccacgccgttgggaaagaacgccgaagtgcctcccgcgacccgcacgtcttctacatacggcgtcctcagcgcttttgtagtgtggatcggatccggcctcaatatcatctggtggaccggcatcgtgcttctggcggcggacgctctcggacttggcgagcgttggctgaggttggcactgtcccaccgggataaacatcacgcatcgagaaccgcggcgctccagtgtcaacgcgacatgttacttcggcaacgtcgacgggctcggcggctgcacgccgtttctgaaggcaaactgcaggaagagaagaaacgacagtctgctctggtctggaacgttgaggcgcgaccctttccgtccacacatcagctgattgtgctgccccctcctgtagcgtcagctcctcctgcggttccctcgcagccccccgagtattcgtctgtgtttccgcctgtataa

SEQ ID NO: 11387 - DNA, 24 bp, unidentified
  source 1..24: mol_type = other DNA
  misc_feature 1..24: note = Synthetic
atgaaaacttgctgtacgatgtag

SEQ ID NO: 11388 - DNA, 198 bp, unidentified
  source 1..198: mol_type = other DNA
  misc_feature 1..198: note = Synthetic
atggtaccgccgccggaattcaggagagctgatatggtagtggaaagattttctgtatcattatccccaagtttaacttttaccagatttggtatctgtagtaccgcaccctttttgaatcacattctcataatttcctttccatgtacgtctacagcagtaactttaccaatacaatctcctatccagacgtggtaa

SEQ ID NO: 11389 - DNA, 1275 bp, unidentified
  misc_feature 1..1275: note = Synthetic
  source 1..1275: mol_type = other DNA
atgaatccggataatacaatcgcagtgattacagagactattcctataggtatgcaatttgataaagtatatttgtctacatttaacatgtggagggaaattctatccaataccacaaaaacactagatatatcatctttttattggagtttatcggatgaagtgggtacgaatttcggcacgataatattaaacaagattgtacaattacccaaaagaggagtacgagttagagtagccgtcaataaatctaacaaaccattaaaggatgttgaaagactacaaatggccggagttgaagtacgatacatagatattacaaatatcctaggaggagttcttcatacaaaattttggatatctgataatacacatatttatttaggaagcgctaacatggattggagatcactaactcaggtcaaagaattgggtattgcgatcttcaataataggaacttggcagcggatctcactcaaatttttgaggtatactggtatcttggagttaacaatctaccatataattggaaaaacttttatccgtcgtattataatacagatcatcctcttagtattaacgtaagcggcgttccacactctgtatttattgcttctgcaccgcaacaactatgtactatggaaagaaccaatgatttaaccgctttattgtcatgtatcagaaatgcgagtaaattcgtttatgtatctgttatgaactttatccctattatttattcgaaggcaggcaatattttgttttggccttatatagaagatgaattaagaagagccgctatagacagacaagtgtcagttaagctattgattagttgctggcaacgatcttcgtttatcatgagaaactttttaagatctatcgctatgctaaaatctaaaaacataaatatagaagtaaagctatttattgtaccagatgctgatcctcccattccgtattctagggtaaaccatgccaaatatatggtaaccgataaaacggcgtatataggtacctcaaattggacaggaaattactttacggatacatgtggagcatctattaatattacaccggatgatggattaggtcttcgtcaacaattggaagatatttttatgcgtgattggaattcaaaatacagctatgaattgtacgatactagtcctactaaaaggtgtagactattaaaaaatatgaaacaatgtacaaatgatatatactgcgatgagatacaaccggaaaaagaaattcctgaatattctcttgaataa

SEQ ID NO: 11390 - DNA, 141 bp, unidentified; identical to SEQ ID NO: 2262
  source 1..141: mol_type = other DNA
  misc_feature 1..141: note = Synthetic

SEQ ID NO: 11391 - DNA, 462 bp, unidentified
  misc_feature 1..462: note = Synthetic
  source 1..462: mol_type = other DNA
gtgccagggcagcgttttgctatacaaaatacgagaatgtcaggaagcaactccattatgacaaggttgcgcgcacgctccacatcatgcgccagacatcacccttacaccagagcccaattaccacgatgtgaggaaaatgaaacccgagcttctatgactgaagaccacccgctgttgccagattgtgatactatgactatgcatagtatgaccgtgattcagactccggagtcgcatccgcaacagttggactgtgaaagcgctttaaaagactatcccgatgcatttttatgtattactgaccccagattggctcgctctgaaactgtttggaatgtggaatctaaaactatgtctatctctaatggtatccaaatgtttaaagctgtgcgtggggagagattggtgtattctgttaaatgggaagggggaggcaaaataactactcgaatactgtaa

SEQ ID NO: 11392 - DNA, 936 bp, unidentified
  source 1..936: mol_type = other DNA
  misc_feature 1..936: note = Synthetic
gtgccagggcagcgttttgctatacaaaatacgagaatgtcaggaagcaactccattatgacaaggttgcgcgcacgctccacatcatgcgccagacatcacccttacaccagagcccaattaccacgatgtgaggaaaatgaaacccgagcttctatgactgaagaccacccgctgttgccagattgtgatactatgactatgcatagtgtaagttgtgttcgtggtcttccttgttctgccagctttactgttctgcaagagtttcccattccttgggatatgtttttaaatccagaggagttaaaaattatgagaagatgcatgcatttatgtctttgttgtgctactatagatatttttcagtctcaagtgattcatggtcgagagaattgggttcttcattgtcattgtaatcagcagggttcacttcaatgcatggctgggggagcggtgttggcagtgtggttccggaaggttatattgggttgcatgattaaccaacgttgtccatggtacagacaaattgttaatatgcacatgccaaaagagatcatgtatgtgggtagtgtgtttttgagggaacgacatttaatttatattaaactttggtatgatggtcatgcaggggcgattatatcagatatgagttttggctggagcgcttttaattatggtttattaaacaatattgtgataatgtgctgtacctactgtagtaatctaagtgaaatcagaatgcgttgctgcgcgcatcgcaccagaaagttaatgttaagggctattaaaatcatgcttcaggacactgcggaccccgatcccataaacagcagtcgcacggagcgacgcagacagcggttgcttgtgggtttgatgagacacaatcgcccgattccgttttcggattatgattcccatcgttcttcttccagatga

SEQ ID NO: 11393 - DNA, 441 bp, unidentified
  source 1..441: mol_type = other DNA
  misc_feature 1..441: note = Synthetic
atacaaaatacgagaatgtcaggaagcaactccattatgacaaggttgcgcgcacgctcgacatcatgcgccagacatcacccttacaccagagcccagttaccacgttgtgaggaaaatgaaacccgagcttctatgactgaagaccacccgctgttgccagattgtgatactatgactatgcatagtatgaccgtgatccagactccggagtcgcatccgcagcagttggactgtgaaagcgctttaaaagactatcccgatggatttttatctatcactgaccccagattggctcgctctgaaactgtttggaatgtggaatctaaaaccatgtctatatctaatggtatccaaatgtttaaagctgtgcgtggggagagattggtgtattctgttaaatgggaagggggaggcaaaataactactcggattttgtga

SEQ ID NO: 11394 - DNA, 915 bp, unidentified
  source 1..915: mol_type = other DNA
  misc_feature 1..915: note = Synthetic
atacaaaatacgagaatgtcaggaagcaactccattatgacaaggttgcgcgcacgctcgacatcatgcgccagacatcacccttacaccagagcccagttaccacgttgtgaggaaaatgaaacccgagcttctatgactgaagaccacccgctgttgccagattgtgatactatgactatgcatagtgtaagttgtgttcgtggtcttccttgttctgccagctttactgttctgcaagagcttcctattccctgggatatgtttctaaatcctgaggagttaaaaattatgagaagatgcatgcatttatgtctatgttgtgccactatagatatttttcattctcaagtgattcacggtcgagagaattgggttcttcattgtcattgtaatcagcagggttcacttcaatgcatggctgggggagcggtgttggcagtgtggttccggaaggttatattgggttgcatgattaaccaacgttgtccatggtacagacagattgttaatatgcacatgccaaaagagatcatgtatgtgggtagtgtgtttttgagggaacgtcatttaatttatattaaactttggtatgatggtcatgcaggggcgattatatcagatatgagttttggctggagcgcttttaattatggtttattaaacaatattgtaataatgtgttgtacctactgcaaagatttgagtgaaatcagaatgcgttgctgcgcgcatcgcaccagaaagttgatgttaagggctattaaaatcatgcttcaggacactgtggaccctgatcccataaacagcagtcgcacggagcgacgcagacagcggctgcttgtgggtttgatgagacacaatcgtccgataccgttttcggattatgattcccatcgttcttcttccagatga

SEQ ID NO: 11395 - DNA, 78 bp, unidentified; identical to SEQ ID NO: 2268
  misc_feature 1..78: note = Synthetic
  source 1..78: mol_type = other DNA

SEQ ID NO: 11396 - DNA, 696 bp, unidentified
  misc_feature 1..696: note = Synthetic
  source 1..696: mol_type = other DNA
atgaaagtggtgatcgtgactagcgtagcatcgcttttagatgcatctattcagtttcaaaaaacggcatgtagacatcactgtaattacctatctatgcaaatagttaaagagatagaagaatttggtactatcaatgaaaaaaatttggaattcgccacttggaaagacgttatacaaaacgatgaaatagatgcattagtattttatagagtaaaacaaattagtatttctacgggtgttctatatgaatctatgatgcgcaatagaacaaaacctatttccatgttctttgtacgtgattgtctggcatttgatggagatcctccgtcttttagaatgacgtcttgtaatattaacgcatacaatcgtaataagattaaagatttgataatcctaatgaatatgaaaacatgcaataaaaaaattattggtgagtttataatagacaattttggaagcgtgaatgcattactatcgataattaattctaatgttacgtgggttacatcagttataaataatagtaacggtaggggtattaatatcagggtatcaaataataaaatgttaactataactagttttcgacgattcgtcaataaacttaaaatgtacaaaactactaaatgtgcttctcaattggataatctatgtactgagataaacaaaatggatattatagacaaaaaatga

SEQ ID NO: 11397 - DNA, 726 bp, unidentified
  source 1..726: mol_type = other DNA
  misc_feature 1..726: note = Synthetic
atccaggctttccgtacgcgtctcggcgaacgcatgcaggccgacggcgcggccatctacgtcagtctcagctcgctcttcgacgcgtcgttcgacttccaactcacagtatgccacgactactgcgagaggcacgcgctgagagtcctgcacgaggagcgcgcgtacgggacggtccgcgaggagctactccgctccgaggcctgggagcgcattcggggccttggcgtagcgcacgtggtgtttttccagctgcgccagtttggcaccagcgtcgcgcagctctacgcgctgatgcaacccacgacaatgacactgcatttcgtgcgcgactgcatgaccttcgacggcgggcggagcgcgcccgtcttccgcatcgtgcccatggacgtgagcacagccctgcgggcgcggatgcgcgactttgtcgcgctcatgcacatgcgctcgtgcactcgcgccatgctgcgcgacttcgtgctctgcaactttggcgcgttcgagactctagtgcagacacttcgccgccacgtactcatcgtgacgctggagctcgcgcagcacgagaagaccgcgaggcacagcctcgcgtcaagcaagaagcgcaaagccctgagcatgatgcgcttccgagccttcatgagcaaggtgagggcactgcgcccgctcttcgagagcagcgagctcgaggacatttgcgacgccatgcgctgcgtctcactgtga

SEQ ID NO: 11398 - DNA, 273 bp, unidentified
  misc_feature 1..273: note = Synthetic
  source 1..273: mol_type = other DNA
atagtgtttttcaacttggtgccgttaatatacttgggaacgcggaataaatttcggctcatggcgttaaccagaggaggagaccccgcaccgtccgtctgccttgtggtttggtttgcctgcgtgtactcactgctgattctggtcgttttgctgctcatctaccgttgttgcatcggcttccaagacgacctagtctcccgcaccttggctgtgtaccgagcttgtatacagggcccgatatgtaaccaaacccacaacagtacctcgtaa

SEQ ID NO: 11399 - DNA, 24 bp, unidentified
  misc_feature 1..24: note = Synthetic
  source 1..24: mol_type = other DNA
ctgctaaaatcaatgaaatggtag

SEQ ID NO: 11400 - DNA, 24 bp, unidentified
  source 1..24: mol_type = other DNA
  misc_feature 1..24: note = Synthetic
ctgctaaaatcaatgaaatggtag

SEQ ID NO: 11401 - DNA, 24 bp, unidentified
  misc_feature 1..24: note = Synthetic
  source 1..24: mol_type = other DNA
acgaagattataggggaaacatag

SEQ ID NO: 11402 - DNA, 24 bp, unidentified
  misc_feature 1..24: note = Synthetic
  source 1..24: mol_type = other DNA
atggaaaatgtacgtttaatgtaa

SEQ ID NO: 11403 - DNA, 24 bp, unidentified
  source 1..24: mol_type = other DNA
  misc_feature 1..24: note = Synthetic
acgaagattataggggaaacatag

SEQ ID NO: 11404 - DNA, 24 bp, unidentified
  misc_feature 1..24: note = Synthetic
  source 1..24: mol_type = other DNA
atggaaaatgtacgtttaatgtaa

SEQ ID NO: 11405 - DNA, 7605 bp, unidentified; identical to SEQ ID NO: 10664
  source 1..7605: mol_type = other DNA
  misc_feature 1..7605: note = Synthetic

SEQ ID NO: 11406 - DNA, 5637 bp, unidentified
  misc_feature 1..5637: note = Synthetic
  source 1..5637: mol_type = other DNA
atggagaaagttcatgttgacttagacgcagacagcccattcgtcaagtcactgcaaagatgctttccacattttgagatagaagcaacgcaggtcactgacaatgaccatgctaatgctagggcgttttcgcacctagctactaagctcattgagggagaagtggatacagaccaggtgatcctggatattgggagcgcgcctgtaaggcatacgcattccaaacataagtaccactgtatttgcccaatgaagagcgcagaagaccctgacagactctaccgctacgcagacaagcttagaaaaagtgatgtcactgacaaatgtattgcctctaaggccgcggacctgctaacagtaatgtcgacgcctgacgctgagacaccctcgttatgcatgcacactgactcaacttgcaggtaccacggctccgtggccgtatatcaggatgtatatgcagtgcatgcaccgacttccatttactaccaggcgctgaaaggtgtacgaactatctattggatcgggttcgatactacaccgttcatgtataagaacatggcaggcgcctaccctacatacaacacaaattgggccgatgaaagtgtgttggaagccagaaatatagggctgggtagttcagacttgcacgaaaagagtttcggaaaagtatccattatgaggaagaagaaattacaacccactaataaagtaatattttctgtggggtcaactatctatactgaagagagaatactgttacgcagctggcatctacctaatgtctttcatctaaaaggtaaaactagctttacaggcagatgtaacaccatcgtcagctgcgaaggttacgttgtcaagaagattacgctcagtcctgggatttacgggaaagtggataatcttgcttcgaccatgcaccgagagggattcttaagttgcaaggttacagacacgttaagaggggagagggtctctttccccgtgtgtacgtacgtgccagcgacactgtgcgaccagatgaccgggatactggcgactgacgtcagtgtcgatgacgcccagaagctgctggttgggctcaaccagcgaattgtcgtcaatggcagaacacaacgtaacacaaataccatgcagaattacctattaccagtggtagcccaggcgttctcgcggtgccgggaataccgcgcagacctggaagacgaaaaagggctaggggtacgggaacgttccctagtcatgggctgctgctgggctttcaaaactcacaagatcacatccatttacaagagacctgggactcaaactatcaagaaggtgcccgccgtatttaattcctttgtcatcccacaaccaaccagctatgggcctgatataggattgcgtcgccgaattaagatgctattcgacgcaaagaaggcacccgctccaattattactgaggccgacgttgcacaccttaaaggcctgcaggatgaagctgaagccgtggctgaggctgaagccgtacgtgcagcattacctccacttctgccggaggtcgataaggagaccgtagaggctgacatcgacctgatcatgcaggaggcaggagcaggcagcgtggagacacctagacgacacatcaaggtcacgacgtatccaggggaagaaatgatcggctcgtacgcagtgctttcaccacaagcggtccttaacagcgagaagctagcttgtattcacccgttagctgagcaagtgctcgtgatgactcacaaagggcgcgcaggacgatacaaggtagagccataccacgatagagttatcgtccccagtggtacagctataccaatccccgatttccaggctctgagtgaaagtgcaaccatagtatttaacgaacgggagttcgttaaccgttacttacaccacattgccgttaacggaggggcattgaatacagatgaagagtactacaaggttgtgaaaagcactgagacagactctgagtacgtatttgacatcgacgcaaagaagtgcgtgaagaaaggggatgccggaccaatgtgcctggtcggcgaactagttgacccgccattccacgaatttgcgtacgagagtttaaaaacacgtcctgctgcaccacacaaagtgcctaccatcggagtctacggagtcccaggttctggaaagtctggtataatcaaaagcgctgttaccaagcgtgatctggtggtcagtgcaaagaaagaaaattgcatggaaatcatcaaagacgtcaaacgcatgcgcggcatggacatcgccgcccgcacagtggattcagtgctgctaaatggggtaaaacactccgtcgacacactgtacatagacgaggcattcgcttgccatgcagggactctgctagcacttatcgccatcgtcaagccaaagaaagttgtattgtgtggagatccgaaacaatgcggcttctttaacatgatgtgtctaaaagtgcattttaaccacgagatatgcacagaagtgtatcacaagagtatctctcggcgatgcactaagacagtgacatccattgtttccaccctgttctatgataaacggatgagaactgtcaacccatgcaatgataagatcataatagataccaccagtactaccaaacctttaaaggatgacataatattaacctgcttcagagggtgggttaagcaactgcagattgactacaagaaccacgagatcatgaccgcagcggcctcacaggggtttactagaaaaggggtatacgcagtgcgctacaaggtcaatgagaacccgttatacgcacagacatctgagcatgtgaatgtactacttacacgcacagaaaaacgtatagtatggaagactttggccggtgacccttggatcaagacgttgacagcatcgtacccgggtaatttcaccgccacactggaagaatggcaagctgagcatgacgctatcatggcgaaaatacttgagacaccagctagcagtgacgttttccaaaacaaagtgaacgtctgctgggccaaagcgctagaacctgtgttggccaccgccaatattacgctgacccgctcgcagtgggagactattccagcgttcaaggatgacaaagcgtattcgcctgagatggccttaaactttttctgcaccagattctttggggtcgacatcgacagcgggttgttctccgcgccaactgttccgctgtcttacaccaatgaacactgggataatagcccaggtccaaacatgtatgggttgtgcatgcgcaacgctaaagaacttgcacgtcggtatccttgtattctgaaagccgtggatacaggtagagtggttgacgttcgcacagacactattaaagactataacccgctaataaatgtggtacccctgaatagaagactcccacactcattggttgtcacacagagatacactgggaacggtgattactcccagctagtgaccaagatgacaggaaaaaccgtactagtagtgggtacacctatgaacataccaggaaagagagtcgagacattaggccaaagcccacaatgtacatataaagcggaactggacctgggcattcctgccgctttaggcaaatatgacatcatttttattaacgtgaggactccctaccgacaccaccattaccaacagtgcgaggaccatgcgatccaccacagcatgcttactagaaaagcagtggaccatttgaacaaaggcggtacgtgcatcgcattgggctatgggactgcggacagagccaccgagaacattatctctgcagtcgctcgctcattcaggttctcacgtgtgtgccagccgaagtgtgcctgggaaaacactgaggtcgcgttcgtgtttttcggcaaggacaacggcaaccatctccaagatcaagataggttgagtgttgtgttaaacaacatataccaagggtcaactcaacatgaagctggcagagcacctgcgtatagagtggtgcgcggcgacataacaaagagcaatgatgaggttattgttaacgcggcgaacaacaaagggcaacccggtggcggtgtgtgtggcgccctttacaggaagtggcctggagcttttgataagcagccggtagcaactggtaaagcgcaccttgtcaagcattctccgaacgtcatccatgccgttggccctaatttttctcggctatcagaaaacgaaggagaccagaaattgtctgaagtgtacatggacattgccagaattatcaacaacgagaggtttactaaagtctccattccgttgttatctaccggcatttacgcaggtggtaaggacagggttatgcaatcgctgaaccatttatttacagccatggatactaccgacgcagacatcactatttactgtctagataagcaatgggagtcaagaataaaggaagctatcactcggaaggaaagcgttgaagagcttactgaggatgacagaccagttgacattgaactggtacgggtacacccgttgagcagcttggcaggtagacctggttattcaaccaccgagggcaaggtgtattcgtacctagaggggactaggtttcatcaaactgccaaagacgtagctgagattaacgctatgtggcctaacaagcaagaagcaaacgagcagatttgcttatacgtgttgggagagagtatgaacagcatccgctctaagtgtcctgttgaagagtcggaagcctcttccccccctcacaccatcccgtgtctgtgcaactatgcaatgactgcagagcgagtttacagattacgtatggcaaagaacgaacaattcgcagtttgttcgtcctttcagttaccgaaatacaggattacaggggttcagaaaattcaatgcagtaaacctgtgatattctccggcactgtacccccggccatacatccaagaaaattcgcatctgtgacagtggaagacactccggtggtccaacctgaaagattggtgcctaggcgacctgcaccacctgtgcccgtacctgcaagaatccctagccctccatgtacatcgaccaacggatcgacgaccagtatacaatcactgggggagtatcaaagcgcatctgcttctagcggagctgaaatctctgtagaccaggtttcgctatggagcatacccagcgctactgggttcgatgtgcgtacctcctcatcgttgagtctagagcagcctacctttccgacaatggttgtcgaagctgagattcacgccagtcaaggatcactgtggagtatacccagtatcaccggatttgaaacccgtgttccgtcacctccaagtcaggatagtagaccatccaccccatctgcaagtgcttcacacacgttcgtggacttaatcacgtttgacagcgttgcagagattttggaggatttcagtcgttcgccgtttcaatttttgtctgaaatcaaacctattccagcacctcgtacccgagttaataacatgagccgcagcgcagacacgatcaaaccaattccaaagccgcgtaaatgccaggtgaagtacacgcagccacctggcgtcgccagggccatatcggcagcggaatttgacgagtttgtgcggaggcactcgaattga

SEQ ID NO: 11407 - DNA, 5637 bp, unidentified; identical to SEQ ID NO: 11406
  source 1..5637: mol_type = other DNA
  misc_feature 1..5637: note = Synthetic

SEQ ID NO: 11408 - DNA, 18 bp, unidentified
  misc_feature 1..18: note = Synthetic
  source 1..18: mol_type = other DNA
atgctttccacattttga

SEQ ID NO: 11409 - DNA, 18 bp, unidentified
  source 1..18: mol_type = other DNA
  misc_feature 1..18: note = Synthetic
atgctttccacattttga

SEQ ID NO: 11410 - DNA, 810 bp, unidentified
  source 1..810: mol_type = other DNA
  misc_feature 1..810: note = Synthetic
atggaaagcgatgctaaaaactatcaaatcatggattcttgggaagaggaatcaagagataaatcaactaatatctcctcggccctcaacatcattgaattcatactcagcaccgacccccaagaagacctatcggaaaacgacacaatcaacacaagaacccagcaactcagtgccaccatctgtcaaccagaaatcaaaccaacagaaacaagtgaaaaagatagtggatcaactgacaaaaatagacagtctgggtcatcatacgaatgtacaacagaagcaaaagatagaaatattgatcaggaaactgtacagagaggacctgggagaagaagcagctcagatagtagagctgaggctgtggtctctggaggaatctccagaagcatcacagattctaaaaatggaacccagaacacggaggatattgatctcaatgaaattagaaagatggataaggactctattgaggggaaaatgcgacaacctgcaaatgttccaagcgagatatcaggaagtgatgtcatatttacaacagaacaaagtagaaacagtgatcatggaagaagcttggaatctatcagtacacctgatacaagatcaataagtgttgttactgctgcaacaccagatgatgaagaggaaatactaatgaaaaatagtaggatgaagaaaagttcttcaacacaccaagaagatgacaaaagaattaaaaaagggggaaaagggaaagactggtttaagaaatcaaaagatactgacaaccagacatcaacatcagactacagatccacatcaaaagggcaa

SEQ ID NO: 11411 - DNA, 810 bp, unidentified
  source 1..810: mol_type = other DNA
  misc_feature 1..810: note = Synthetic
atggaaagcgatgctaaaaactatcaaatcatggattcttgggaagaggaatcaagagataaatcaactaatatctcctcggccctcaatatcattgaattcatacttagcaccgacccccaagaagacctatcggaaaacgacacaatcaacacaagaacccagcaactcagtgccaccatctatcaaccaaaaatcaaaccaacagaaacaagtgagaaagatagtggatcaactgacaaaaatagacagtctgggtcatcacacgaatgtacaacagaagcaaaagatagaactattgatcaggaaactgtacagagaggacctgggagaagaagcagctcagatagtagagctgagactgtggtctctggaggaatctccagaagcatcacaaattctaaaaatggaacccagaacacggaggatattgatctcaatgaaattagaaagatggataaggactctattgaggggaaagtgcgacaatctgcagatgttccaagcgagatatcaggaagtgatgtcatatttacaacagaacaaagtagaaacagtgatcatggaagaagcttggaatctatcagtacacctgatacaagatcaataagtgttgttactgctgcaacaccagatgatgaagaagaaatactaatgaaaaatagtaggacaaagaaaagttcttcaatacaccaagaagatgacaaaagaattaaaaaagggggaaaagggaaagactggtttaagaaatcaaaagatactgacaaccagataccaacatcagactacagatccacatcaaaagggcag

SEQ ID NO: 11412 - DNA, 234 bp, unidentified
  source 1..234: mol_type = other DNA
  misc_feature 1..234: note = Synthetic
acgaatactataataccgcctttcaaaattgtaacaacaatgttgcctcatacatcggatacgacatcaaccttccgactaaagacggtattcgacttggtgtttgaaaacagaaacatcatatacaaggcggatgttgtgaatgacatcatccaccacagactgaaagtatctctacctatgattaaatcgttgttctacaagatgtctctccctacgacgattactacgtaa

SEQ ID NO: 11413 - DNA, 234 bp, unidentified; identical to SEQ ID NO: 11412
  misc_feature 1..234: note = Synthetic
  source 1..234: mol_type = other DNA

SEQ ID NO: 11414 - DNA, 15 bp, unidentified
  misc_feature 1..15: note = Synthetic
  source 1..15: mol_type = other DNA
aggatgatacattaa

SEQ ID NO: 11415 - DNA, 24 bp, unidentified
  misc_feature 1..24: note = Synthetic
  source 1..24: mol_type = other DNA
ctgctaaaatcaatgaaatggtag

SEQ ID NO: 11416 - DNA, 30 bp, unidentified; identical to SEQ ID NO: 2285
  misc_feature 1..30: note = Synthetic
  source 1..30: mol_type = other DNA

SEQ ID NO: 11417 - DNA, 24 bp, unidentified
  source 1..24: mol_type = other DNA
  misc_feature 1..24: note = Synthetic
ctgctaaaatcaatgaaatggtag

SEQ ID NO: 11418 - DNA, 63 bp, unidentified; identical to SEQ ID NO: 2286
  source 1..63: mol_type = other DNA
  misc_feature 1..63: note = Synthetic

SEQ ID NO: 11419 - DNA, 51 bp, unidentified
  source 1..51: mol_type = other DNA
  misc_feature 1..51: note = Synthetic
atgtcactctttctggaggaaatattgcagtcaaaattcgcgatgctataa

SEQ ID NO: 11420 - DNA, 51 bp, unidentified; identical to SEQ ID NO: 11419
  misc_feature 1..51: note = Synthetic
  source 1..51: mol_type = other DNA

SEQ ID NO: 11421 - DNA, 51 bp, unidentified; identical to SEQ ID NO: 11419
  source 1..51: mol_type = other DNA
  misc_feature 1..51: note = Synthetic

SEQ ID NO: 11422 - DNA, 933 bp, unidentified
  misc_feature 1..933: note = Synthetic
  source 1..933: mol_type = other DNA
atcccgtcgttcatcatgcagcatccacgggaagagaattcaatcgtcgttgaactcgaacccgcattggctacatttatcaaacaaggatttaataatctcgtaaaatggcccttgttaaacattggagtagttttgtctaatacatctacagctgtcaatgaggaatggctaactgctgtagagcatattcccaccatgaagatattttacaaacatatacataagatacttactagagaaatggggtttttagtctatttgaaaagatcacaatctgaacacgataattatataactttatacgattttgattattatattatagataaggatacaaattctgtaactatggtagataaaccgaccgagttaaaggaaactttgttacatgtatttcaagaatatcgtttaaagagttctcaaacaatagagcttatagcgtttagttcaggtacggtaataaacgaagacatggtttcaaaattaacatttttagatgtggaggtatttaatagagaatataataatgttaaaactatcatagatccggattttgtatctagatctccatttatagttatatctcctatgggtaaactaactttcttcgtagaagtatattcgtggtttgattttaaatcgtgtttcaaagatattatagatttcttagaaggtgctctaatagccaatattcataatcacatgattaaggtgggtgattgtgacgaaacagtatcgtcttataatccagagtctggaatgttgtttgttaatgacttaatgactatgaacatggtcaactttttcggatgtaattctaggttagaatcataccatcggttcgatatgacaaaagtagatgttgaactatttattaaagcattgtctgacgcgtgtaaaaaaattttgtcagcttctaatagattataa

SEQ ID NO: 11423 - DNA, 954 bp, unidentified
  source 1..954: mol_type = other DNA
  misc_feature 1..954: note = Synthetic
attccaaatcaatcgaacaacatccagtcgttcatcatgcggcatccgcgggaagagaattcaatcgtcgttgaactcgaaccctcattagctacatttatcaaacaaggatttaataatcttgtaaaatggcccttgttaaacattggaatagttttgtctaatacatctaccgctatcaatgaggaatggctaactgtggtagagcatattcccaccatgaagatattttacaaacatatacataagatacttactagagaaatggggtttttagtctatttgaaaagatcacaatctgaacgcgataattatataactttatacgattttgattattatattatagataaggatacaaattctgtaactatggtagataaaccgaccgagttaaaggaaactttgttacatgtatttcaagaatatcgtttaaagagttcacaaacaatagagcttatagcgtttagttcaggtacggtaataaacgaagacatagtttcaaaattaacatttttagatgtggaggtatttaatagagaatataataatgttaaaactatcatgaatccggattttgtatctagatctccatttatagttatctctcctatgggtaaactaactttcttcgtagaagtatattcgtggtttgattttaaatcgtgtttcaaagatattatagatttcttagaaggtgctctaatagccaatattcataatcacatgattaaggtaggtgattgtgatgaaacagtatcgtcttataatccagagtctggcatattgttcgttaatgacttaatgacaatgaacatagtcaactttttcggatgtaattctaggttagaatcatatcatcggttcgatataacaaaagtagatgttgaactatttattaaagcattgtctgatgcgtgtaaaaaaattttgttagcttctaatagattataa

SEQ ID NO: 11424 - DNA, 933 bp, unidentified
  misc_feature 1..933: note = Synthetic
  source 1..933: mol_type = other DNA
atcccgtcgttcatcatgcagcatccgcgggaagagaattcaatcgtcgttgaactcgaaccctcattggctacatttatcaaacaaggatttaataatctcgtaaaatggcccttgttaaacattggaatagttttgtctaatacatctaccgctgtcaatgaggaatggctaactgcggtagagcatattcccaccatgaagatattttacaaacatatacataagatacttactagagaaatggggtttttagtctatttgaaaagatcccaatctgaacgcgataattatataactttatacgattttgattattatattatagataaggatacaaattctgtaactatggtagataaaccgaccgagttaaaggaaactttgttacatgtatttcaagaatatcgtttaaagagttctcaaacaatagagcttatagcgtttagttcaggtacggtaataaacgaagacatagtttcaaaattaacatttttagatgtggaggtatttaatagagaatataataatgttaaaactatcatagatccggattttgtatttagatctccatttatagttatttctcctatgggtaaactaactttcttcgtagaagtatattcgtggtttgattttaaatcgtgtttcaaagatattatagatttcttagaaggtgctctaatagccaatattcataatcacatgattaaggtaggtaattgtgacgaaacagtatcgtcttataatccagagtctggaatgttgtttgttaatgacttaatgactatgaacatagtcaactttttcggatgtaattctaggttagaatcataccatcggttcgatatgacaaaagtagatgttgaactatttattaaagcattgtctgatgcgtgtaaaaaaattttgtcagcttctaatagattataa

SEQ ID NO: 11425 - DNA, 30 bp, unidentified; identical to SEQ ID NO: 2296
  source 1..30: mol_type = other DNA
  misc_feature 1..30: note = Synthetic

SEQ ID NO: 11426 - DNA, 21 bp, unidentified
  source 1..21: mol_type = other DNA
  misc_feature 1..21: note = Synthetic
atgtttttggaaagcgattaa

SEQ ID NO: 11427 - DNA, 183 bp, unidentified
  source 1..183: mol_type = other DNA
  misc_feature 1..183: note = Synthetic
atgacaaagtttaaagacgtgtattcgctgttatattgtgatttgcaagctcagttgtcgagagagactgtagacgtgccggaaggagtaagttactctgttcgaacgcctaatctactagatctcgttagggaaaatgagcaagatggcagtattattcctggctgtctttttgatgaatag

SEQ ID NO: 11428 - DNA, 27 bp, unidentified
  misc_feature 1..27: note = Synthetic
  source 1..27: mol_type = other DNA
aaggagacaaaatggggacagcattga

SEQ ID NO: 11429 - DNA, 1053 bp, unidentified
  source 1..1053: mol_type = other DNA
  misc_feature 1..1053: note = Synthetic
atgacacttagactccagaacaccaacatatatctgacttatatggacaaagaaaagaagatagcaggaccagcatggctactaacaacacttgctgaaagactagaaaggtatgaaacagaatacggtatatgctgtagagaaacagctccttctacaggaacgctacattatcatctgttcattaaatgtaaaagaatggtatcaataagaaacgctaatagtgtaattgaaatggaaggtattatcccgcacatagaaaaagttaataataatataaaaaggattattgattatataaaaaaaaatggagatattgcagtgctgaaccctgaaaatgccccaaaaaatactatgataagtaaacaggaaaaagcaaatctaatgataacaggagacttggagaagttatttattgatggaacattaggtgcagtagatatcatacgtgcagaaaaattgagatcgatattcataaaatactcccaaccaacaggatacaagcaaagaatggttttatggttcaagggagagactggagagggaaaaactagaacggccctcaaaatcgcagaacagtattacaacaacagttattggctaagtagtgacacgctcaaatggtttgatggttacaccaaccaaagggtagccatcattgatgacttccgcaagaacatgctgaccgattggagcttcattttaaggctactagatggatacaacctaattgtacaagtaaaaggtggtttcacttcctggaaaccagagctgatcataataacttctccagctactccagagcaagctttcagttggacaaacaaagaaggagaagaacagccatgggacaaacaagagcagctaaccaggagattaacaagctatgatgaattacaggtctatgaattccccttatgggaacaagaaagggtaagattagaaaatacaattaggaaaagacttgaaatgccattacttgatcaagagaacatgatgccagaagaagaatggagcaccatattaccagaaggcttcataacgccaagctaa

SEQ ID NO: 11430 - DNA, 27 bp, unidentified
  source 1..27: mol_type = other DNA
  misc_feature 1..27: note = Synthetic
aaggagacaaaatggggacagcattga

SEQ ID NO: 11431 - DNA, 1050 bp, unidentified
  source 1..1050: mol_type = other DNA
  misc_feature 1..1050: note = Synthetic
atgaccctcagactgcaaaataaaaacttgtatctgacgtacttggatacagaagaacgaatatttagtgaaacaattttaataacagaactggcagaacgattagacaaatatgtagtaaaatatgctattgcctgtaaagaagtagccccaacaacgggtactgttcactaccattgcctaatttgctgtgagaatgtaatatcaacaagaaatggaaaagaattactgactattgagaatgtaacgccacatgtcgaaaggatacaaaacaatttagtaaatatcgttaactatattaaaaaagatggaagtttcgcagaagtaaacaaagagaacgcaccaagaagaaaagagatagaaaaaagagagaaagcagagcttatgataaacggaaatttaagagaattatttatggaaggcgtattaggagctatagacataatccgtgcagagaaattgagaaacatattccaagtccaagcccccgctgacaaataccaaaagaaattgatcctctggtttaaaggagaaacaggggaagggaagacaaagacagctgtagatatagcagaaagatattttaatggtgaatactggatgtcaaatgaaacacttaaatggttcgacggctatagaggtcaaccagttgcaatcattgacgatttcaggaaatctatgcttacagaatggagcttcctcctcagattacttgatggctataacctaatcgtacaagtgaaaggaggctttgtaaaatggcaaccgaaagtgataatagttacaagtccagcatctcctagtgaagctttccaatgggtaaacaaggaaggagaaattatagaatgggataagcaagtacaattaacgagacgcttgacatatgaagacgaagagcagatataccaatttccattgtggaatcaagatcagctaaagctagaaaatacaataagaaagtatctgggattagcaccaatggaagaagaaagcatgttcccagaagaatggagtgtaatcgaaccagaaggcttcataacccctggttaa

SEQ ID NO: 11432 - DNA, 30 bp, unidentified; identical to SEQ ID NO: 2302
  misc_feature 1..30: note = Synthetic
  source 1..30: mol_type = other DNA

SEQ ID NO: 11433 - DNA, 186 bp, unidentified
  source 1..186: mol_type = other DNA
  misc_feature 1..186: note = Synthetic
atgttgttattgttgttcttatactctattggctttttaagtggaatatctatggatgaaaaaaatccaataggaactaaaaatttaaacgacgaatttaaaacaacttctgtaaagtcaccattttcgttaaataggaacagagaattgcctgcaattttctttagttctgtgtatagtttatag

SEQ ID NO: 11434 - DNA, 357 bp, unidentified
  misc_feature 1..357: note = Synthetic
  source 1..357: mol_type = other DNA
ttggagcctcggcggttgttcataatgacagcgtccacggtggccctggctttatttgtggcctcgatactaggtcactgctgggttacggccaactcgacaggtgtcgcatcatctacagagcgttctagtcccagtacggctgggctcagcgccaggccttcgcccggtcccacatcagtcactaccccaggattctatgacgttgcttgttccgcggatagttttagcccctccctttctagcttttctagcgtctgggccttgattaacgcgttactagtcgtcgtggccacatttttctatctggtatatctttgttttttcaagtttgtggacgaggtggtccatgcatag

SEQ ID NO: 11435 - DNA, 357 bp, unidentified
  source 1..357: mol_type = other DNA
  misc_feature 1..357: note = Synthetic
ttggagcctcggcggttgttcataatgacagcgtccacggtggccctggctttatttgtggcctcgatactaggtcactgctgggttacggccaactcgacaggtgtcgcatcatctacagagcgttctagtcccagtacggctgggctcagcgccaggccttcgcccggtcccacatcagtcactaccccaggattctatgacgttgcttgttccgcggatagttttagcccctccctttctagcttttctagcgtctgggccttgattaacgcgttactagtcgtcgtggccacatttttctatctggtatatctttgttttttcaagtttgtggacgaggtggtccacgcatag

SEQ ID NO: 11436 - DNA, 21 bp, unidentified
  source 1..21: mol_type = other DNA
  misc_feature 1..21: note = Synthetic
attatcatcatacacacatag

SEQ ID NO: 11437 - DNA, 36 bp, unidentified; identical to SEQ ID NO: 2311
  source 1..36: mol_type = other DNA
  misc_feature 1..36: note = Synthetic

SEQ ID NO: 11438 - DNA, 36 bp, unidentified; identical to SEQ ID NO: 2311
  source 1..36: mol_type = other DNA
  misc_feature 1..36: note = Synthetic

SEQ ID NO: 11439 - DNA, 33 bp, unidentified; identical to SEQ ID NO: 2314
  misc_feature 1..33: note = Synthetic
  source 1..33: mol_type = other DNA

SEQ ID NO: 11440 - DNA, 15 bp, unidentified
  source 1..15: mol_type = other DNA
  misc_feature 1..15: note = Synthetic
attgacatacggtaa

SEQ ID NO: 11441 - DNA, 678 bp, unidentified
  misc_feature 1..678: note = Synthetic
  source 1..678: mol_type = other DNA
atgcggatccagctgcttctggtatctaccttggtggcgtctatcgtcgccacacgtgtggaagacatggcgactttccgcacggaaaagcagtggcagcaggacctgcaatacagaagggaatttgtaaaaaggcaattagcccccaaacctaagtccaacatcgtggtatctcacaccgtcagctgcgtaattgacggtggaaacatgaccagcgtttggcggtttgagggacaatttaatcctcacatcgcatcagaggtcatccttcatgataccagtggcttgtataacgtgcctcatgaagtacaaaacgacggtcaagttctcaccgtcacggtgaaacgtagcgcccccgccgacatcgctaaagtactcatctcactgaaacccgtgcaattgtcttctggacagtacgaatgtcgcccccaattacaactaccctgggttcctcgaccgtcctcattcatgtacgacagctacaggctgtggtatgaaaaacgatggcttaccataattttgtacgtgttcatgtggacctacttggttacgctgctacagtactgcattgtccgttttataggtaccaggctgttctatttcctgcagagaaatatcacaattcggtttaccggaaaacctacatataatcttttgacctatcctgtcaagggctaa

SEQ ID NO: 11442 - DNA, 150 bp, unidentified; identical to SEQ ID NO: 2322
  source 1..150: mol_type = other DNA
  misc_feature 1..150: note = Synthetic

SEQ ID NO: 11443 - DNA, 189 bp, unidentified; identical to SEQ ID NO: 2326
  misc_feature 1..189: note = Synthetic
  source 1..189: mol_type = other DNA

SEQ ID NO: 11444 - DNA, 189 bp, unidentified; identical to SEQ ID NO: 2327
  misc_feature 1..189: note = Synthetic
  source 1..189: mol_type = other DNA

SEQ ID NO: 11445 - DNA, 231 bp, unidentified
  misc_feature 1..231: note = Synthetic
  source 1..231: mol_type = other DNA
atgggatcctgctgtggtagattctgtgacgctaagaataagaataagaaggaagatgtagaagagggaagagaaggatgttacaattataagaaccttaatgatctggatgaatccgaagcacgtgtagaatttggaccattatatatgataaatgaagaaaaatcagacataaatacattggatataaaaagaagatatagacacacgatagagtctgtatatttctaa

SEQ ID NO: 11446 - DNA, 21 bp, unidentified
  misc_feature 1..21: note = Synthetic
  source 1..21: mol_type = other DNA
atgaatccgaagcacgtgtag

SEQ ID NO: 11447 - DNA, 30 bp, unidentified; identical to SEQ ID NO: 2330
  misc_feature 1..30: note = Synthetic
  source 1..30: mol_type = other DNA

SEQ ID NO: 11448 - DNA, 78 bp, unidentified; identical to SEQ ID NO: 2331
  source 1..78: mol_type = other DNA
  misc_feature 1..78: note = Synthetic

SEQ ID NO: 11449 - DNA, 30 bp, unidentified; identical to SEQ ID NO: 2330
  source 1..30: mol_type = other DNA
  misc_feature 1..30: note = Synthetic

SEQ ID NO: 11450 - DNA, 327 bp, unidentified
  source 1..327: mol_type = other DNA
  misc_feature 1..327: note = Synthetic
atggccgaggaatttgtacaacaaaggttggccaataacaaagtgacaatttttgtcaagtatacatgtcctttttgtagaaatgcactggatattctaaataagtttagtttcaaaagaggagcgtatgaaattgtcgatattaaagaatttaaacccgaaaatgaattgcgtgactattttgaacaaattactggtggtagaactgttcctagaatcttttttgggaaaacttctattggtggatatagcgacctgttggaaatagacaacatggacgcattgggtgatattctatcatctattggggtattgagaacttgttga

SEQ ID NO: 11451 - DNA, 327 bp, unidentified
  misc_feature 1..327: note = Synthetic
  source 1..327: mol_type = other DNA
atggccgaggaatttgtacaacaaaggttggccaataacaaagtgacaatttttgtcaagtttacatgtcctttttgtagaaacgcactggatattctaaataagtttagtttcaaaagaggagcgtatgaaattgtcgatattaaagaatttagacctgaaaatgaattgcgtgactattttgaacaaattactggtggtagaactgttcctagaatcttttttgggaaaacttctatcggtggatatagcgacctgttggaaatagacaacatggacgcattgggtgatattctatcatctattggggtattgagaacttgttga

SEQ ID NO: 11452 - DNA, 1032 bp, unidentified
  misc_feature 1..1032: note = Synthetic
  source 1..1032: mol_type = other DNA
atatcgttagaaactatgtttggaaacatagtaaaatgtgatgatgttaaaaataaaattaaaaaacttgtctattgcgatattcacataacaaaacatataataaatccactattgtacccggtttataacgttaataatactatttttaataagtattcaaatttttttgatataaacgcaaaacaaaacgatgttagtttacaaactgttgaaatttttaaaagagataaatcctcgttaatttcttatgtaaaaactaccaataaaaagaaaaaggtggattatggagaaattaaaaaaacagtacatggatcgggaaaaaattttttgcattatttttcaggaaaaaaatcagatgagtatatgagtacaacaattaaatacaatgaaacaaaaccttggataaaaagcgtatcaaaacgcatgagagttgatataataaacaattctataataacaaaaggaaaaagttctatactacaaactattgagatagtatttttaaatagaacatgtgtaaaaatttttaaagattctacaatgcatataattttatctaaggaaaaaacagagttaaattgtacaggactaatcgataaactcttttctgtatataaaattttgtttttgttgttatacagcataacaaaccaaaaagagtttaacattatacacaacatagctaacgaaataataacgtctaataattttgaagataaaatacatataataaaattaaaaaaagaggagtatggaattaaaaattttaaaattggaatgtttaacttaacttttataaaatctattccatataccgtgtttccatctttactagataatggaagcaaaattaaattttttaaaggaaaaaaacttaacattgtagcaattaagtctgttaatgattgtaaaaagtatgtttatacatcaaactccatgttaaaaacaatgcttaaaagatctaatattcttcacaatttaaatatagaatctgctagcgttgacgaactaaagagcttactaagttaa

SEQ ID NO: 11453 - DNA, 30 bp, unidentified; identical to SEQ ID NO: 2337
  source 1..30: mol_type = other DNA
  misc_feature 1..30: note = Synthetic

SEQ ID NO: 11454 - DNA, 30 bp, unidentified; identical to SEQ ID NO: 2302
  misc_feature 1..30: note = Synthetic
  source 1..30: mol_type = other DNA

SEQ ID NO: 11455 - DNA, 45 bp, unidentified; identical to SEQ ID NO: 2338
  source 1..45: mol_type = other DNA
  misc_feature 1..45: note = Synthetic

SEQ ID NO: 11456 - DNA, 30 bp, unidentified; identical to SEQ ID NO: 2302
  misc_feature 1..30: note = Synthetic
  source 1..30: mol_type = other DNA

SEQ ID NO: 11457 - DNA, 27 bp, unidentified
  misc_feature 1..27: note = Synthetic
  source 1..27: mol_type = other DNA
aaggagacagatctgagacagccttga

SEQ ID NO: 11458 - DNA, 45 bp, unidentified; identical to SEQ ID NO: 2338
  misc_feature 1..45: note = Synthetic
  source 1..45: mol_type = other DNA

SEQ ID NO: 11459 - DNA, 45 bp, unidentified; identical to SEQ ID NO: 2338
  source 1..45: mol_type = other DNA
  misc_feature 1..45: note = Synthetic

SEQ ID NO: 11460 - DNA, 48 bp, unidentified; identical to SEQ ID NO: 2340
  source 1..48: mol_type = other DNA
  misc_feature 1..48: note = Synthetic

SEQ ID NO: 11461 - DNA, 12 bp, unidentified
  source 1..12: mol_type = other DNA
  misc_feature 1..12: note = Synthetic
atgatggattag

SEQ ID NO: 11462 - DNA, 411 bp, unidentified
  source 1..411: mol_type = other DNA
  misc_feature 1..411: note = Synthetic
atgaaaccttttaagaatatgaataaaataacaattaatcaaaaggataattgtatattagcaaatcgatgctttgttaaaatagatactcctagatacataccatcgacatccattagcagttctaatatcatcagaatacggaatcatgattttacattatctgaattattgtattcaccgtttcattttcaacagcctcagtttcaatatctccttcctgggtttgtattaacgtgtattgataaagtttcgaaacagcaaaaaaaatgtaaatattgtatctctaatcgtggagatgatgatagtttaagcattaatctatttattccgactattaacaagtctatatatattattatcggtttacggatgaaaaatttttggaagcctaaattcgaaatagaataa

SEQ ID NO: 11463 - DNA, 21 bp, unidentified
  misc_feature 1..21: note = Synthetic
  source 1..21: mol_type = other DNA
atgaatcaattaataaagtag

SEQ ID NO: 11464 - DNA, 207 bp, unidentified
  source 1..207: mol_type = other DNA
  misc_feature 1..207: note = Synthetic
ttggacatacattcaccgtccgcgtttatgaaactaaacggtgtttatggatttactcataagaatgaattaagaaagttaagttcaaataaggaaatagaagaatacagcaacaaacctcttcaagaaccagttagattaaatgattttataaatctgtttgactgtgttaagaaaaacattccactaaccaatgtaattgattag

SEQ ID NO: 11465 - DNA, 42 bp, unidentified; identical to SEQ ID NO: 2345
  misc_feature 1..42: note = Synthetic
  source 1..42: mol_type = other DNA

SEQ ID NO: 11466 - DNA, 39 bp, unidentified; identical to SEQ ID NO: 2346
  misc_feature 1..39: note = Synthetic
  source 1..39: mol_type = other DNA

SEQ ID NO: 11467 - DNA, 69 bp, unidentified
  source 1..69: mol_type = other DNA
  misc_feature 1..69: note = Synthetic
ataatcaaccccaaaatgtggattcggtatgctccggaactctccagaagacagaagacgtccatctga

SEQ ID NO: 11468 - DNA, 1002 bp, unidentified
  misc_feature 1..1002: note = Synthetic
  source 1..1002: mol_type = other DNA
atggatgttgtgtcgttggataaaccgtttatgtattttgaggaaattgataatgagttagattacgaaccagaaagtgcaaatgaggtcgcgaaaaaactgccgtatcaaggacagttaaaactattactaggagaattattctttcttagtaagttacagcgacacggtatattagatggtgccaccgtagtgtatataggatctgctcccggtacacatatacgttatttgagagatcatttctataatttaggagtgattatcaaatggatgctaatcgacggccgccatcatgatcctattttaaatggattacgtgacgtgactcttgtgactcggttcgttgatgaggaatatctacgaaccatcaaaaaacaactgcatccttctaagattattttaatttctgatgtgagatccaaacgaggaggaaatgaacctagtactgcggatttactaagtaattacgctctacaaaatgtcatgattagtattttaaaccccgtggcgtctagtcttaaatggagatgcccgtttccagatcaatggatcaaggacttttatattccacacggtaataaaatgttacaaccttttgctccttcatattcagctgaaatgagattattaagtatttataccggtgagaacatgagactgactcgagttaccaaatcagacgctgtaaattatgaaaaaaagatgtactaccttaataagatcgtccgtaacaaagtagttgttaactttgattatcctaatcaggaatatgactattttcacatgtactttatgctgaggaccgtatactgcaataaaacatttcctactactaaagcaaaggtactgtttctacaacaatctatatttcgtttcttaaatattccaacaacatcaactgaaaaagttagtcatgaaccaatacaacgtaaaatatctagcaaagattctgtgtctaaaaacagaaatagcaagagatccgtacgcggtaataaatag

SEQ ID NO: 11469 - DNA, 219 bp, unidentified
  misc_feature 1..219: note = Synthetic
  source 1..219: mol_type = other DNA
attccattaatgacagacctctccaaaaagggatatatattgtacgataatgtggttactcttccgttgactactttccaacagaaaatatccaagtattttaattctagactatttggacacgatatagagagcttcatcaatagacataagaaatttgccaatgttagtgatgaatatctgcaatatatattcatagaggatatttcatctccgtaa

SEQ ID NO: 11470 - DNA, 1101 bp, unidentified
  misc_feature 1..1101: note = Synthetic
  source 1..1101: mol_type = other DNA
atgttttgtggctctccgtttctcggcatatcttcttggagtctggcatctgcggctctgtgtcctccttcgtgctctttctctgcgggacgtgacctgcggtgcgatgcggaggtcccggaggttaaatggacggcgttcgttcgcactctcgtcacccggccgctgtcggcggacgacgtgtgggacttcgtctctacttttgcacattgcaggttggcgctctcgtggcccgtgggggccgaactgaggttcgccacctccgacatgctcgggatcacgcaggccgaggtggccaagctgtctcgccgatacggatgctgtcccggtatggatctcacggtcatcggggtcactatcttcgcagaagtttccgcgctggtgctggtcggagagtgcggggagatctacgcgtttaacggtgtgttcgacgacgcgctgtatcgtctcgccgaggacgcgttcggtctctggaaacacggcctgcgtcgcttcgagcccgtctacggttccaagtgtctcaccgaaaccggcgcctctttcttcggcggcatgagtggagttgacgacgtcctggctttcgccgtgtctttcgataaggctctcgtgccgttgccttggccgcgcggggctttctttgagttcgccgtacccgggaggccggagaagaggtggcggctcatacccggcggcggcgtcgcggtggtgatcggcagattcttcggacggggcgtcacttcacctctgcttagacgacaacgggtgctcatggatcaggtcggcagggtgtacgcggccagtctcgacgggggagccgtggtgcgtctctccgatagtttcagggcgtttctcgccatgggtgtgagaaaactctttaagaaccatcgattccccccgggacatctgtggaccatgcagctgcccgtgacttgcgttcacgcgcctgtgatagatctgcccgccgtctatcaactttctccgcacatggtagaacgaggaatgcccgtggcgtcttgcgaagcttctaccgtagttcgtggggattgcgaggagacggagacggaggagtcgacatccggtgattccgtcctcgtctgttaa

SEQ ID NO: 11471 - DNA, 3237 bp, unidentified
  source 1..3237: mol_type = other DNA
  misc_feature 1..3237: note = Synthetic
atggagtcagcaaaagatacaacctctacttctatgttcattctcggaaaaccctctggaaacaacatggaatccaatgaggaacgtatgcaaaactaccatcccgatccagtggtggaagaatccatcaaagaaatattggaagagagtctcaagtgtgatgtgtcctttgaaagcctgctttttccagaactggaagcctttgatcttttcatcccagagtcttccaacgacatcgcttccaagaatgtgtcctattccagtaatgtggaagaaggagcatctgacgaattcaaaactttggttgctcagtccgttggcaattgcatccaaagtattggtgcatcagtgaaggctgccatgaaacaggaacagtctaacatggaagacaatttaattaactccgctggcttattaacgctgcacagatccatgttggagaggctggtattagaacaattaggacagttgataaatattaatttactaagtagtgcttcatctcaatttgtttcatgttatgcaaaaatgttgtctggaaaaaacttggatttttttaattggtgcgaaccgcgattcattgtttttgcatgtgataaatttgatgggttagtgaaaaagatagcatcagaatccagagatttgctcatggatttgaaagctaatatgaacaatcaatttattacagccctcaaaaacattttttccaaagcttatgtggcattagatagtggaaaattgaacatggtcgccacctcattgttgttgatggcacacaacaaagagatgtccaatcctgaaatctccaataaggaattttgtaagcaagtaaatttacttaaacaggaactactggaaagtagaaatgagataatagaaaaccatgttaaaaatatgaaaatgtttcaggaatttgctaataagcagatgaatcaaatctttatggataactgtgataaaacattcctcaaaattcatataaattgtaaaaatttaattactgccgccaaaaatattggcattgctgttctccaaagtattgttctatgcagcaatgaattttcatggcaatacctcaaacctcgcagacaccagtttaaaattaccatgatgaatatgatcacccacgcatgtgaatgcatagaaacaatttatgatgatactggtttgattaaacctttaacttcctctgatataatggaaggctacattgctataaataaaaatagagagtcttccatctgtgatttaaacatagacccgtcagaatcaatattattagagttagctgattttgatgaacatggaaaatattcagaggaatcttctatcgaatctatccatgaagatgatgacaatgtagactatttaaaatacatggaagtacaatctcctactgataataatattcccactccgtcaaagaacaatgaatccccaacaagacaaaaacttacaaacatacatgaaaaagatgtaggaaaaatgtatccagacactccttctccagatgtgccagggaaatccaaagaggcaaaaacattcattgaatatagcagacagatagggaaagaacaaacaagccctaactgtgtatgtacagcctcagtgacagatctgggcggccctgataactttaaatccattactggccttgaaagtggtaaacacttcttgataaaaaaactacttgaaactcaacccgactcagtagttgtagagaccgggtctggacaacaagacattttggcttacagccccgataaaaggtcacagacaaaagaatggattcaggaaaaaggttctaactccaagtgtaccgaaacgcttcctggtatgacctttaccaactcagcaactcctgtcaaaagtcatggtgcaattcaggatactctaaatccagaaagcaaattagacaaagaaatggaagctgtagagagtctagtgaatctatgtgatggtttccatgacaaccctttaatatcagaaatgataacatttggttatgaaactgatcactcagcaccttatgagagtgaaagcgataacaatgatgaaactgattacattgcagactgtgattcaactgtcagaactaataacattcatatgaataacactaatgagaatacaccatttagcaagtctctatattcaccaccagaggtcactccttctaaggaagatcacaaaactgagaaaattgtggctgtgtctcaaaaatgcaaatctaaaaagagaacagctaaaaggaaaaatgttccaattaaaccatccaaatctaaaaaaattaagctagataggttacctgaaaccacaaacgtaattgttataagttcagagagtgaagatgaagaggatggtaacaatattattgataagtcaatgttagaaaaaactattaaatcagaacctaattctgaatcgagtagcgagtcagatgactgtacatctgaagataattacttacatttgagtgattatgataaagtgatcaataatggtcattgtcaaagtaaaggttttccatccccagtgtttaccatcccaataaggtcaatgccgggtacccatgatatcagaaacaaatttgttcccaaaaaacattggttgtggtttatgaggaaaactcacaaagtagacaattgtgttatacacagttctgcaaaaatgaatgtaaaaaatgacagtgatgtgacagaagctaatcactgcttcatcaatcactttgttcccattaaaacggatgatgaagaatatgagaaggaaaatgtctcatatacttatagtaaaatacaggatagcaaaacagacttggaagacataacaccaaccaagaaacttatcacagaaatggtcatggaaaattttatggatctaactgatatcattaaacacggcatagccaaacattgccaagatctttccagtaaatatactgttatcacccataccgcatgtgagaaaaatttaaatgtggcaaattcccaaaatcttgtaacagccgaaactcaaatatttgacccacagggaacaggaaataactcccccatactaaatattatcaatgacacaacatgtcaaaatgatgagaacagatgtacggaaggtacaagtaatgataatgaaaaatgtaccattagaagtgattgcaacagtgataaaatggaggtctttaaattagatggctacccctctgattatgatccattcgaagaaaatgctcaaatttattag

SEQ ID NO: 11472 - DNA, 4359 bp, unidentified
  source 1..4359: mol_type = other DNA
  misc_feature 1..4359: note = Synthetic
atggagccagcaaaaccctctggaaacaacatgggatccaatgatgaacgtatgcaagactaccgtcccgatccaatgatggaagaatctatcaaagaaatattggaagagagtctcatgtgtgatacatccttcgatgacctgattattccaggccttgaaagctttggtcttattataccagagtcttccaacaacatagagtccaataatgtagaagaaggatcagatggagagttgaaaactttagctgaacaaaaatgcaaacaaggaaatgataacgacgtcattcaaagcgccatgaaattatccggactatactgtgatgcggacatcacacacacacaaccgttgagtgataatacgcatcaagatcctatatattctcaagaatccagaatattttcaaaaactatccaggatccacggatagtagctcagacccacagacaatgcacatcctctgcttccaatctacaatcaaacgaaagcggttcgacccaggtgcgctttgcttcggaactaccgaatcaactcctacagcccatgtacacgtcacataaccaaaatgcaaatctacagaacaatttcacctcgttgccgtatcaaccttatcatgatccatacagagatatagagagttcctacagagaatctagaaataccaatagaggatatgactataactttagacatcatccgtataggcccagaggaggaaatggaaaatataattactacaatccaaactcaaagtatcaacagccatacaaaagatgttttaccagaacttataacagacgcggaagaggccacagatcatacgattgctcagacagatccgcggatttaccatatgaacattacacgtatccaaactacgaacaacagaatccagacccccgtatgaataactataaagattttacacaactaacaaacaagttcaattttgaatcctatgactatagcatggcattctcaacagactccacacacgtacaatccgacaattacaatcatccaacaaaagcacagacaataccagaaactacaaaaactaaaaaacatgaggctactaaggataacgaaacatccacagaaaatcaagttttaacgcctgacgtaatcagtttatcatacagacctagttcctacaaaatggatattattaaaaaaatatatgacactgacgttattccgttaccgaaggaagccttaacagccaatggctcaaatcgtgacgtggatattcagaagtacaaaaaagcacatatccgttgtagatcagtccagaagaaaaaagaacgcagttctcaaacaaacaaacatgatgaaaaccatgcctcatcacgttctgatcttaaggagagaaaatctaatgagaatgaagataaagccgttactaaagctagagatttttcaaaattaaatcccctattatctcctcttccgttgacacctgaacccgccatagactttgcggaccatacagataaattctattcgacaccagaattcaaccaaatacaacaaaatctacaccgatcaaaaacttctctacaagacacagttcccatatcaaaacatactccaagagccccgaccaaagataattcttacaaaaaacatcatgactccaaagacaattatcctaaaatgaaacattctcctggacgtacaacatctaaaaaaaatactacaaactccaacggacaccaaaactttaaggaagtatccgttaagaatgtttcagggaaagccacatctacatcaccaaaatcaaaaacacaccattattccagtagctctgatgaagaaggtcaatacaaatctccggtaaaaactattatccaatcaccttctccatattgcaagttaaaaaatccttcaattatggacaaaaacagtgctaaaaaccacactgcaagcgccgacaaaaatttaacagacaattcacctattcggagtaatttaaatcctactgcttttaacaaatccaacagtaacaaaagcatcacgaatagcacttctaacagtgatgagtgtactgacaggaaacctaactgcaattccaccaaaaatgaatctaaagatcctaaccgaacttgtggcaaaaactctgataaacatctgagtaaaagttgcaccatggcttctaaaagggctcccagcagagcctcaagcagagcctccagcagggattctagcagggcatcaagcagagcctccagcagagcctccagcagggattctagcagagcctccagcagagcctccagcagggattctagcagagcctccagtagagcctccagcagggcctcaagcaaagcctccagcagagcctccagcagagcctccagcagagcctccagcagggattctagcagggcctcaagcaaagcctccagcagagcctccagcagggattctagcagagcctccagcagggattctagcagggattctagcagggcctccagcagagcctccagcagggattctagcagggcctcaagtaaagcctcaagaaaagcctccagcagagcctccagcagggcttccagcagggcctcaagcaaagcctccggtaaagcctcaagcgaagcctccagcagagcctccagtaggaattctagcagggcctcaagcagagcctcaagcagagcctccagcagggattctagcagagcctccagcagagcctccagtagggattctagcagggcctcaagtaaagcctcaagaaaagcctccagcagagcctccagcagggcttccagcagggagctgaggcagatttattgcgattctaataaaagacaaacgcctccacatgacacctcaattaatacaaaatttgaaatatcagaaataaaatttcgatgtggagaagatctaaatttctacaaaaatactgcagctcgactccagtgctttaatcacaatgatcaattttacaacccccgattcagacctcatataagaaccaacagaaaaaaatcagaatccaccaatgacaccgattcagaaagttctatgtctagatgcaaatctcactgtcgaaattcaccagattcactgaccgttgtaagaagaaaaaaacacaaatctggatcatcaagcatctcttccagtattgaagaaaattgcagatctaattcacatatagtaaccggaaaagagaagtttacaccattttactatcagtcttccagaactagatcatcatcatcatcatcatcatcatcagcttctttatcatgttccaaatccacattaaaaacatgccgcaaaactcaatataaagacaataaacaaataaaatctaaatcagattcaaaacacaaaactacaaacatgtcttcagattacgaatcgaatagacatgcagatgtgtttaaaaactccccggaagcaggtgaaaaatttcccctacacaattctagtccatttaacacacatgaacaatccaatcattccgaaaacgccattgatgaagaacaaaaaaaggcacctaatatcacgacttctcacctacagggaaaacaaaatgtcagattacacaacacaaaaaaatgcaaaaaaaaacgcccccgcgatgatgattcagattccagcataaaaaatttctgcaagaaaagaatatccggagcgcagaaaacagagtctgaagtaagtgaacctgacgatttgtgttatagagattatgttagactaaaagaaagaaaagtatcagaaaaatttaaaattcaccgcgggagggtggctacaaaagattttcaaaaactatttagaaatactatgagagcatttgaatacaaacagatccccaaaaaaccttgcaatgaaaaaaatctaaaagaagctgtatacgacatctgctgtaatgggctctctaacaacgcagccatcattatgtactttacaagatcaaaaaaagtagctcaaatcataaagataatgcaaaaagaattaatgattcgacccaacatcactgtttcagaggcatttaaaatgaatcatgcaccgcctaagtattatgacaaagatgaaattaaacgatttatccaactacaaaaacaaggaccgcaagaattatgggataaatttgaaaacaacacaacacatgatctatttacgagacattcggacgtaaagactatgataatttacgccgctacgcccatcgactttgtaggagctgttaaaacatgcaataagtatgccaaagataaccctaaagaaattgtccttcgggtgtgttcaatcatcgacggtgacaatcctatctccatctataatcctatcagcaaagagtttaaatcgaaatttagtacactttcaaaatgttaa

SEQ ID NO: 11473 - DNA, 2826 bp, unidentified
  source 1..2826: mol_type = other DNA
  misc_feature 1..2826: note = Synthetic
atggagccagcaaaaccctctggaaacaacatgggatccaatgatgaacgtatgcaagactaccgtcccgatccaatgatggaagaatctatcaaagaaatattggaagagagtctcatgtgtgatacatccttcgatgacctgattattccaggccttgaaagctttggtcttattataccagagtcttccaacaacatagagtccaataatgtagaagaaggatcagatggagagttgaaaactttagctgctcagtccgctgggaattgcatccaaagtattggtgcatcagtgaaggctgccatgaaacaggaacagtctgacatggaagacaaattaattaagtgcgctggcttattaacgcagcaacaatccatgttcataggactaggattagaacaattatcacagttgataaacattaatttattaagtagtgcttcaactaaatatgttgaatcttattcaaaaatgttgcatggaaaagagttggatttttttaattggtgcgaacctagattcattgtttttgcatgtgataaattcgatgggttagtgaaaaaggtggcatcagaatccagaaacttgctcctggatttgagagctaatatgaacaatgacattattaaggccgtcaaagacattttttctaaagctactgtgacattagattgtcagaaacttaaccagggcgccaccatgttgatgatgatggcacacaacaaagagatgtccaatcctgacatctccagtaaggacttttgtgaaaaaataaatacacttaaacagacattactggaaggtaaaaatgagatagtagaaacaaatgctaaaaatatgcaaattttacagacatttgctataaagcagatgaatcaaatcttcatggatggttgtgataaagcattccttaaacttaatgtgaattgtaaaaatttaattactgccgccaaaaatcttgccaatactattctccagagtattgttatatgcagcaatgaattttcatggcaacacctcaaacttctgagacggggatttaaagttaccatgctgaatatgattacccaggcatgtgaatgcttagaatcagattatgatgatactggtttaattaaacctttaactccccttcaaataatggacggctacattaatatgaataaaaatagacagtcttccatctgtgatggaaacacagacccatcagactcaatgatattagacttagctgattttgatgaccatggaagatattcagaggaatcttctatcgaatctatccatgaagatgatgacaataaaatgtatccatgcactccttctccagaagtgccagggaaatccaaatatgtaggaacattcactgaaaacagcagacagtcaggggacgaacaaacaaaccctaactgtgtaggtacagcctcagtgacagatctgggcggccctgataacttgaactccatcagcggcctccagagttgtaaaaacatgttgctagaaagactacttgacactcaatgcgattcagtagttgaagggacagaacaagatggttcctatggcaacactttaatatcagaaatgatgatgtttggttatgaaactgatcactcggcaccctatgagagtgaaagcgataacaatgatgaaattgattacattgcaaactctgattcagctgcgagaactaataacattcatatgaatagcactgatgagaatacaccatttagcaattctatatgttcaccaccagaggtcaccccttctaagaaaaatgtcaaacctaagtctatgactccgggaagcaaacctaaaaagagggtagctaaaaggaaacatgtttcaagtaaatcacccaaaaataaaaagattaagacagatcagttacctaaggctgcagacgtaattgttataagttcagagagtgaagatgaagaggatggtgacaatattattggtaactcaatcttaataaaagctattaaatcagaatcagattctgaatcgagcagcgagtcaaatgactgtacatctgaacataaacagttacatttgagtgattatgatgaagttaccaataatggtcattgtccaagttatggttttccaactccagtgtttaccatcccaataaggtcaatgcagggtaccggtggtatcaaatccaaatttattcccaaaaaaaattggatttggtatatgaagaaaactcaccaagtagacaattgtcctattcacaattctgaaaatgtggatgcaaaagatgacagtgatgggacagaagccaaacactgctttatgaatcactttgtccccatcaaaacggatgatgaagactatgataagaacaatgtctcatatatttataataaaatacagaatagcaaaatagactcgggagacataataccaactaagaaacttatcatagatatggtgatggataattttatggatctaaatgatatcattaaacagggcataaccaaacattgccaggatctttgcaataaatataatgttgtcacccctactacatgtgaggacgatttaaatatgacaaattcccaaacttttgcaacaaccgcaactcaagtgtttgacccaccggtaacaggaaataattcctccatactaaatattatcaatgacacaacaagtcaaaatgatgaaaacagatgcactgaaggtacaagtaattctaatgaaaaatgtaccaatataagtgattgcaacagtgatggtacagaggcctttaaattagatggctacccttctgattatgatcctttcgtagaaaatgctcaaatctattag

SEQ ID NO: 11474 - DNA, 1659 bp, unidentified
  source 1..1659: mol_type = other DNA
  misc_feature 1..1659: note = Synthetic
atggacggccccaaattcagatttgtactactcatacttctaaccgccccggcaagaggacaagtcgactacgacaagttactcaaagtcgggatattcgagaaagggacggcgaatctcaaaatatctgtcagctctcaacagagatacatggtgatcaagatgatgccaaacctgggcccaatgaatcagtgcggaataaaagaagtgaatctctacaaagagagtatcctacgtttgataactccaatttctactactctgaattatataaagagtgagatacaggttgaaagagaagtggctttacaaccaaacgggacaatagtcaggttttttgggctaattgtggcagcaggagcactgaccctggcgacttccgctcagataacagcagggatagctctacacaattctcttgagaatgcaaaagcaatcaaagggttaactgatgcaattaaggagtcaaaccttgcaatacagaagatacaagacgcaacggctggcactgtgattgcactgaacgctctgcaagatcaggttaatacaaacattataccagcaatcaatactctaggttgcacggccgcagggaacacccttggaattgctctaaccaggtattattctgaattaatcatgatttttggtccgagtctcgggaatcctgtcgaggcccctttgacaatacaggcattggcaggtgcgtttaacggggatcttcacggaatgatcagggagtatggatacactcctagtgatatagaggacatacttaggacgaactcagttacgggtagggtcattgatgtagacctggttgggatgaacatcgttttggagatcaatctcccaactctttacacactccgagataccaagattgttaatctcgggaaaataacttacaatgtagacggatctgaatggcagacccttgtaccagagtggttggcaatcagaaataccctaatgggtggtgtagacctgagcaggtgtgtcgtatctagccgtgacctcatttgcaagcaagaccctgtgttctcactggacaccagtatcatatcttgcttgaatgggaatactgaatcctgccctagaaacagagttgtgaatagtgtggctccgcggtacgccgttatccgcggaaatatacttgcaaactgtatatctaccacttgtctgtgtggtgacccgggtgttcctattatccaaaaaggggataacacattgaccgcgatgtccatcaatgactgcaagctagtcggagtagatggctatgtcttccgtcctggtcctaaagcggtgaacgtgacttttaacttaccacatctgaatctaggacccgaagtcaatgtcaacccggtggacatctcaggtgcccttgggaaagtagaacaggacttggcatcgtctcgggatcaccttgcaaagtctgagaagatcctctctgggataaacccgaacattatcaatacagaaatggtcctggtcgcggtaattctgagcttagtatgcgcaatggttgtgatcggtatcgtgtgttggttatccatactcacaaagtgggttcgatcgtgcagagccgactgccgacggcccaacaaggggccggatcttggtccgataatgtcatctcaagacaacctcagcttttaa

SEQ ID NO: 11475 - DNA, 78 bp, unidentified; identical to SEQ ID NO: 2358
  misc_feature 1..78: note = Synthetic
  source 1..78: mol_type = other DNA

SEQ ID NO: 11476 - DNA, 6546 bp, unidentified
  misc_feature 1..6546: note = Synthetic
  source 1..6546: mol_type = other DNA
atggatcccaaggatatcctttaccctgaatgtcatcttgattcaccaattgtgcttggaaaggtcataagactgcattatctccttgaccttacagttgagtatgatattaaagactcatcaatcttgagaaacctagattataatgctaagtccgggagattatctaacagggatagggagctagtaaagcacaaagatatcttaagaaaagaagggtttgtcagatcaggatacagagggattgattacccaagagggaataaggaacttttcagattagtgatcccaaatctgacaaagcccctggagtgtctgttaaaacagagcaataaggtatttgataggattgagtctggattgagggacacgttcctggcatcagccaataagatttcggggaaaggcaaggaagtattcactgagcagaacctaacagagagcgggatggccggtgtgtccagatctattcataacaatggatggaaccaaccattcatgacttggttcacaatcaagaaagagatgcggaagttaaagaaggattatagaaagaacgccaagagcacagggatgaccagattggcatctcatcatgagaggtattccctatacattcactctgacttcgtgctgatttctgatcatgtgttggaagtatatcacttgctgactgacgatatggttttgggattctgtgatgtagtagaagggagattgatggtctcagcagttgcttcaatggaccctaattatgtgaacataggcattagaggggaacaattgtggagcttgattgactcgctcttcattctacttggtaataaagtctatgatgtggttggtatgctagagcccttggcattatcctatatccaactaagagatcctattaaagaaataagaggtgcattcctgtattataacctaagcgagttagaccagctcttaaaagaagacactatactttcaacaggtgaagttaaagactttatcgagctaataagtgagataatcaatatgggcagtgtatctgaaatatcagagattttctctttcttcagatcctttggtcatcccgtcctagaggctgttactgctgctgataaagtgagagatcatatgtgtaagcctaaagtcttagactatgagacactgcagaaaggacatgcagtattctgttctatgataatcaacggattcagagagagacacggaggatcttggccaccatgcttcctcccagactatgcatcatctgagctcaaagcggttatggcaaatcatgccgcaattccttatgagttaagtgtaaataactgggaatcttttataggcttcaaatttgacaaattcgaagaggtcaacctggatgaagatctgactatatttatgaaagataaggcactgtctcctattagggcagaatgggatactgtttacccgcaagagaacatgcaatactcacctggcagaagctctaccagtaggagattggtagatgtgttccttgaagacatggaattcaacccacaggacataatagattatgttgtatctggtagttacctgattgatcaggacttcaatatctcctatagcctcaaagagaaagagattaagcaagcgggcagattatttgccaagatgacatacaaaatgagagctgcacaagtcctagcagaatctctggttgcgcatggtgtggggaagtatttccaggaaaatgggatggttaaggatgagcatgaactccttaaatcactaacaaccttgtcactagctggggtacctagatcaaggcctggtgaggacccatctgcaacagaggagagcaagtttgtgaagatagctcagaagggaaaggagattctcaggaacaaccaaacaagaaggagtacacaagagagccgggatcaggatgggttagccaatgagaaacatgagactgttgcgtcattcataaccactgatctgcaaaaattttgtttaaattggaggtacgagagtgttatactcttcgcccagagattggatgagatctatgggttgccaggattcttcgagtggttgcacaaaagacttgagaagtctgtactgtatgttgcagatccaaattgtccacctgacttcaggaccaaaatgagtctggaggacaccccggacactgggatatttatccacaatccaatgggagggattgagggatactcacaaaaaatgtggactattatatctattagcatgatccacctagctgcagtccagacaggggtgagagtctccgcagttatccaaggagacaatcaatctatcgcagttactacaagagttccggtgagaatgaattataatcagaaaaagactgagtgttacaaaagcacgataagatactttgagactttgaggaaagtgatgggagggttgggacataacttgaaactgaacgagactatcatatccaatcagttctttatctactcgaagcgaatatactttgatggttctatcttaccccaaggtcttaaaactatttctcggtgtgttttctggtcagaaactttagtggatgaaactagggcagcttgctctaacatttcgacatctctcgctaaggcggtcgagaacgggatatcccctctattgtgttacctacttaatgcctggaaaacactgcaacaactacacatatccttagctttttcaattaacccgacaataacgaaagatctgtatgggccgattttgagctctcaagactggatgataatagctgtcatagtcccatcacaattaggcgggttcaattacatgagtctctctaggttgttcgtgcgtaatatcggggatcctttagtagcggcattggcagatgttaagagatatattgagattgggttactcacgacagctgccctcacgaagtttaccactcaagtcccaggggattccacagagttagactgggcatcagatccctactctgcaaatttaccccactcacaaagtgtgaccactgtaatcaaacatgtgacagccaggtctgtattatccaaatcaccaaaccccatgctggaagggttattccatgagaatactgatgaggaggatcatgatctggccagattcttaatagaccgagaaataatactgccaagagttgcaaatgttatactagatcaatccgtgacaggtgccaggtctgcaattgcagggctcttagacacgacaaagaccctaatcaagaatacggcaaacaaaggaggactttcaaatcgaactgtatcaaaacttttgtaccacgattatcaacaatttattgtctttaacaagatactaaggtcccaagtcgatgataccacagatttcagtctagtttgttcagtcacacttgctaagataatgagatctaggatgtgggtcaaggttgcaaaaggaagaaggatagagggattggaggttcctgatcccttggagtgtttgaggggtgaattaatagttgggtcgggttcatgcaccatatgcgaaagagggatggaccaatacagttggttctacattccacccgggatggatctagagggacagcatcgggagaatggatcactgagagtcccgtatttcggttcatcaacgtctgagaggtcggaggcatccgtgaatactactagaggattgtcgagagccgcaaaagcagccattaggatagcgtccgtatacacctgggcctacggagaatctcagcttagctggtatgaggcgtatgctttggcatcccaaagagcaaatctcacactagagcaattgaaagtgataaccccgaagtccacctcaactagcttgtctcacaggcttaatgactcttcgacgcaaatgaaatttgcctctacaaacttacaacgtgttagcaggtttgttactatctcaaatgatcatatcaagttgaaagggaacggggatgcaggggataccaatttgatctaccagcaagtgatgttagtaggcttgagtattatcgagttgacccacaggaggcaagagaataccggcgaggacagcaaggtcctacaccttcacatcagagaagactgctgtgtcgaattcacacaagaccagggggatatcccttccttaaacaatctacctgaatttgaagaccacccaacgaacagactgatttatgatcctaatccgctagataatatatatataaccaggatcaaagaaacaagcgtttacttacatgaactggacttcctggcttggcatgatgaagatataaagacggtgcttgggaattcagtaggacagatgattgaagaagttatagcgaccactgagagagataatcttaaggacattaatgcactttcaaatgaagataatatcaactcaatcataacggagatgatgctttctaatcctgatgatgtgttatcgtcactgggttgcatgttggtattaagatttgcgtatgaatgttatgcacggcatatagagggcaaagaacagtatatatcatatgtaagcgataagatcgaaacaatgtcacgttcaaatctgtcaatcttaatcaatagtctgactcatcctagagtgtttaggaagtactgtgatgaaggagtactggtcccggataggggacagacattatctactcaggacttccgggcacacagtgtagaatactgtatcgcaagtctacagagattttttgaaaaatggacaatttccggcaatataactatattactgtgtgaccaagatgaagtcatcataggtgagagagaactaactctcaaaggaaggatcaaggcaatgataatctgtatctactgtttgactgaaaattccccgagccttgttggtctcaatacaaaggaaagagatgaagtgctgactgaatacttggaagaggtcggtcaaagtaatatagagagtagatattgggtacttggatcaatagggattaagaagtacaatacatcccttacgtatattaggaggagcttagtcaaacagtacagattgagggatcttgatgttcagttactcattgatgagatggcagaacaagacatggaatcattatccatggctgacccaatatttgaccaagtgaataagacagagaccatggggtctgtgtcactatggcaatctataaaagtcaaggacctaacactagacaggaacccaagagcagaatctgccgaatatcgtatacccacaacatgtgagatacctagtcaaattttacggattgtgggagtaaattctacatcttgctcgaaagctcacgagttgaactcagtcatctgcaccctcccattagaagggaaatcctgtttgtttttggccgagggatcaggatcaatgatgacctattatatgttaagacacagattgaacaatgtttatttcaacacgggagtcggatcagaggatatcaatagtcaacgagaaaccgacccatccccgtcagagcctgtcctagtcgaggggaatctccgaatcaagcattgtctaagtgaaaaagtcactgtgttatttaatgggagacctgagacgacctgggtagggaatgaagattgtgaatcttatgtgactacacagataggtgaggacaaagtatcacttgttcactcagacatggaaagcgggatagagaaaagcaatcaggcggttcttgttgaacatgtatcactaatcaagatcttccaaggtgtgccaacgcctggagctacactagttagcaagatagcaccgagactagggactaactggactcagataatatcgttgtatttagaaacctttaccaatgtgacaatcttgtgtttaaagaacagtaaccctgcaagtagcgagctgtatgtcatatgtgatggtgtcaagacacgtattagggttaaatcaatcgtgtatgcgcagtgtgtccattatttaacagaggagagtcagtccagattagaacagcggattatcgatgccaaactcaaagctggtgagcatctaatgagtgttataaatgatctcaagagtggggagaagataaaccagattgaaagtttattgaagatcggcttttctgcaaacatgaccacagtagccagacaattcctgagggtgactgatctgacagatacaactaccatattcacaaagctcaggctggcactagttgacttactaagagtgacctcagaagagtcaacaactttatccttgtaccaaccttacccgctctcccagtcaggaaagtgtagggttgtaaaagagagagcaatgaagggttggattagtatcaatcttaacaccatcttcaccaagaggaactatctaaaacatgacttcgagtaccttgcagtacgaaacaaagtgataatagatatgaagtgcctgttggcttgtggagttgtgaacaagaaaaccggtgatagacttaatcggatgtcacatttactatactcagagattactaatcgtgacaagaagaaactgttcaaactcatcggatcggccttttatttctcaggacgttga

SEQ ID NO: 11477 - DNA, 42 bp, unidentified; identical to SEQ ID NO: 2360
  misc_feature 1..42: note = Synthetic
  source 1..42: mol_type = other DNA

SEQ ID NO: 11478 - DNA, 393 bp, unidentified
  source 1..393: mol_type = other DNA
  misc_feature 1..393: note = Synthetic
atgtatctgagccgccctattttttttgctgtgcatattcccgcacagttgcttcagtacttgcacgaactgaatatagaagtactggactttttaaaggagcagcttagtgatttttggctgaacattttacactgtgttactcccattcatcagttttgctactcgggagcggttctagtgagtttggcgccatccctggaacttttgtgctgcgtagccacacctgatttagttcctagcgcggagttaacagatttagtcggcgcagatctatttaattatttgcaaatgactttgcggatggagattcgcgatcgcggagagcaacctgacctgggtctgttaaatctgctgcaggtgtctcaggagcccgatatcttgcagtcatga

SEQ ID NO: 11479 - DNA, 234 bp, unidentified
  source 1..234: mol_type = other DNA
  misc_feature 1..234: note = Synthetic
ttgatagctatggagaatctcaaagcgatgctatacattattcgacgaagcggatgcagaatagatgatgcacaaattactactgacgatctagtcaaatcttactcattgatccgtcctaaaattctaagtatgataaactattataatgaaatgagtagaggatactttgaacacatgaaaaaaaatctaaatatgacagatggtgactctgtctcttttgatgatgaataa

SEQ ID NO: 11480 - DNA, 252 bp, unidentified
  source 1..252: mol_type = other DNA
  misc_feature 1..252: note = Synthetic
atgtcattgtataaagacttgatagctatggagaatctcaaagcaatgctatacattattcgacgaagcggatgtagaatagacgatgcgcaaattactactgacgatttagtcaagtcttactcattgatccgtcctaaaattctaagtatgataaactattataatgaaatgagtagaggatactttgaacacatgaaaaaaaatctaaatatgacagatggtgactctgtctcttttgatgatgaataa

SEQ ID NO: 11481 - DNA, 252 bp, unidentified
  source 1..252: mol_type = other DNA
  misc_feature 1..252: note = Synthetic
atgtcattgtataaagacttgatagctatggagaatctcaaagcgatgctatacattattcgacgaagcggatgcagaatagacgatgcacaaattactactgacgatctagtcaagtcttactcattgatccgtcctaaaattctaagtatgataaactattataatgaaatgagtagaggatactttgaacacatgaaaaaaaatctaaatatgacagatggtgactctgtctcttttgatgatgaataa

SEQ ID NO: 11482 - DNA, 252 bp, unidentified
  source 1..252: mol_type = other DNA
  misc_feature 1..252: note = Synthetic
atgtcattgtataaagacttgatagctatggagaatctcaaagcgatgctatacattattcgacgaagtggatgcagaatagacgatgcacaaattactaccgacgatctagtcaagtcttactcattgatccgtcctaaaattctaagtatgataaactattataatgaaatgagtagaggatactttgaacacatgaaaaaaaatctaaatatgacagatggtgactctgtctcttttgatgatgaataa

SEQ ID NO: 11483 - DNA, 24 bp, unidentified
  source 1..24: mol_type = other DNA
  misc_feature 1..24: note = Synthetic
atgccgttcaatcatgagacataa

SEQ ID NO: 11484 - DNA, 1377 bp, unidentified
  misc_feature 1..1377: note = Synthetic
  source 1..1377: mol_type = other DNA
ctgtttgtcaccgagcgcggacacagactcatggagacgcgagggcgaagaccgtgcccgtttcagcaccagcaggatgagtctcaagcgcacccttgcaagcgcccagccaggggcccaccccttcaccgtgacggagaccaccctcactcggaccctgagaccctggaaggacatgacgctggccgcgctggacgcccatcgtctcgtgccctacagtcgcagtcgtcccaacccccgaaacgaggaagtctgctggatcgagatgccgtagagcacgtcaccgagctctgggaccgcctggagctcctctcgcagaccctcgccaagatgcccatggccgacggactcaagcccctgaaaaactttgcttccctgcaagagctcctctcgctgggcggggaccgcctcctcggcgagctcgttcgggaaaacctccaagtcagagacatgctcaacgaggtggcccccctcctccgggacgacggcagctgcatgtccttgaactaccacctgcaacccgtcatcggggtcatctacggcccgaccgggtgcggcaagtcccagctgttgagaaacctgctctcttcgcagctcatcaccccagccccggaaaccgtttttttcatcgccccgcaggtggacatgatccccccctccgagatgaaagcctgggagatgcagatctgtgaggggaacttcgccccggggcccgagggaaccatcgtcccccaatctggcaccctccgccccaaattcattaaaatgtcttatgatgatctcacccaggagcataattatgatgtatctgaccccagaaacgtctttgccaaagccgcagcccacgggcccatcgccatcatcatggatgaatgcatggaaaacctgggcgggcacaagggcgtctccaaattcttccacgcattcccttccaagttgcatgacaagttccccaagtgcacgggctacaccgtcctggtggtcctgcacaacatgaacccccggcgggatctgggtggcaacatcgccaacctcaagatccaggccaaactgcacatcatctccccccgcatgcatccctcccagctcaaccgcttcgccaatacctacaccaaggggctccccgtggccatcagtctccttctcaaagacatcatccagcaccacgcccagcgcccctgctatgactggatcatctacaacacgaccccagagcacgaggccatgcagtggtgctacctccacccccgggacgggctcatgcccatgtacctcaacatccaatcccacctctaccgggtcctggaaaaaatccaccgcactctcaatgatcgggagaggtggaccagggcctaccgcgcgcgaaaaaataaataa

SEQ ID NO: 11485 - DNA, 42 bp, unidentified; identical to SEQ ID NO: 2370
  misc_feature 1..42: note = Synthetic
  source 1..42: mol_type = other DNA

SEQ ID NO: 11486 - DNA, 33 bp, unidentified; identical to SEQ ID NO: 2169
  source 1..33: mol_type = other DNA
  misc_feature 1..33: note = Synthetic

SEQ ID NO: 11487 - DNA, 45 bp, unidentified; identical to SEQ ID NO: 2371
  source 1..45: mol_type = other DNA
  misc_feature 1..45: note = Synthetic

SEQ ID NO: 11488 - DNA, 45 bp, unidentified; identical to SEQ ID NO: 2372
  source 1..45: mol_type = other DNA
  misc_feature 1..45: note = Synthetic

SEQ ID NO: 11489 - DNA, 45 bp, unidentified; identical to SEQ ID NO: 2371
  misc_feature 1..45: note = Synthetic
  source 1..45: mol_type = other DNA

SEQ ID NO: 11490 - DNA, 1047 bp, unidentified
  source 1..1047: mol_type = other DNA
  misc_feature 1..1047: note = Synthetic
atggccgacatctatagattccccaagttctcatatgaggataacggtactgtagagcctctgcctctgagaactggtccggataagaaggccatccctcatatcaggattgtcaaggtaggagaccctccaaagcatggagtgagatacctagatttgttgctcttaggcttctttgagacgccgaagcaaacggccagcttagggagtgtgtccgacctgacagagcacaccggctactcaatctgtggctccggatcgttacccataggtgtagctaaataccacgggtctgatcaggaactcttaaaggcctgcactgatctcagaattacggtgaggaggactgttcgagcaggggagatgatagtatacatggtggattcgatcggtgctccactcctaccatggtcgggcaggctgagacagggaatgatatttaatgccaacaaggtcgcgcttgccccccagtgcctcccggtggacaaggacataagattcagagtggtgtttgtcaatgggacatccctgggggcgatcactatagccaagatcccaaagactcttgcagaccttgcattgcctaattctatctctgttaacctactagtgacactcaagaccgggatctccacggagcaaaagggggtactcccagtactcgatgatcaaggagagaagaagctcaattttatggtgcatcttgggttgatcagaagaaaagtcgggaagatatactccgttgagtactgcaagagcaagatcgagaggatgcggctgatcttctcacttgggttaattggcggcataagcttccatgtccaggtcactgggaccctatctaagacattcatgggccagctcgcatggaaaagagcggtctgcttcccattgatggacgtgaatcctcatatgaacctggtgatttgggcggcgtctgttgagatcacagacgttgatgcggttttccagccggccatccctcgtgatttccgctactaccctaatgtcgtggcaaagaacatagggaggatcaggaagctgtaa

SEQ ID NO: 11491 - DNA, 198 bp, unidentified
  misc_feature 1..198: note = Synthetic
  source 1..198: mol_type = other DNA
atgagtctgaagcgcacacttgcaagcgcccagcccggggcccacccattcaccgtaacggagaccaccctcacgcggaccctgagaccctggaaggacatgacgctggccgcgctggacgcccatcgtcttgtgccctacagtcgcagtcgtcccaacccccgaaacgaggaagtctgctggatccagatgccgtag

SEQ ID NO: 11492 - DNA, 78 bp, unidentified; identical to SEQ ID NO: 2377
  misc_feature 1..78: note = Synthetic
  source 1..78: mol_type = other DNA

SEQ ID NO: 11493 - DNA, 87 bp, unidentified; identical to SEQ ID NO: 2379
  misc_feature 1..87: note = Synthetic
  source 1..87: mol_type = other DNA

SEQ ID NO: 11494 - DNA, 60 bp, unidentified; identical to SEQ ID NO: 2380
  misc_feature 1..60: note = Synthetic
  source 1..60: mol_type = other DNA

SEQ ID NO: 11495 - DNA, 48 bp, unidentified; identical to SEQ ID NO: 2383
  misc_feature 1..48: note = Synthetic
  source 1..48: mol_type = other DNA

SEQ ID NO: 11496 - DNA, 45 bp, unidentified; identical to SEQ ID NO: 2384
  misc_feature 1..45: note = Synthetic
  source 1..45: mol_type = other DNA

SEQ ID NO: 11497 - DNA, 699 bp, unidentified
  source 1..699: mol_type = other DNA
  misc_feature 1..699: note = Synthetic
atgaggctggttcccgagatgtacggtgttttctgcagcgagacggcccggaactcagatgagctgcttaatacagatctgctggatgttcccaactcgcctgtggcttcgcctccgtcgcttcatgatcttttcgatgtggaagtggatccaccgcaagatcccaacgaggacgcggtaaacagtatgttccctgaatgtctgtttgaggcggctgaggagggttctcacagcagtgaagagagcagacggggagaggaactggacttgaaatgctacgaggaatgtctgccttctagcgattctgaaacggaacagacagggggagacggctgtgagtcggcaatgaaaaatgaacttgtattagactgtccagaacatcctggtcatggctgccgtgcctgtgcttttcatagaaatgccagcggaaatcctgagactctatgtgctctgtgttatctgcgccttaccagcgattttgtatacagtgacgtgtccgacgtggaaggggaaggagatagatcaggggctgctaattctccttgcactttgggggctgtggttccagttggcatttttaaacccgtggcggtcagagtctcaggcagacggtgcgcagttgaacaaattgaagacttgctgcaggaagaacagacgcaacctttggacctgtccatgaaacgccctaagctgacttaa

SEQ ID NO: 11498 - DNA, 78 bp, unidentified; identical to SEQ ID NO: 2391
  misc_feature 1..78: note = Synthetic
  source 1..78: mol_type = other DNA

SEQ ID NO: 11499 - DNA, 18 bp, unidentified
  misc_feature 1..18: note = Synthetic
  source 1..18: mol_type = other DNA
atgaatgttaatacgtga

SEQ ID NO: 11500 - DNA, 42 bp, unidentified; identical to SEQ ID NO: 2393
  source 1..42: mol_type = other DNA
  misc_feature 1..42: note = Synthetic

SEQ ID NO: 11501 - DNA, 57 bp, unidentified; identical to SEQ ID NO: 2394
  misc_feature 1..57: note = Synthetic
  source 1..57: mol_type = other DNA

SEQ ID NO: 11502 - DNA, 3252 bp, unidentified
  source 1..3252: mol_type = other DNA
  misc_feature 1..3252: note = Synthetic
atggataaatcctccaaaccgacgattcggttattatttgccacaaagggatgtgcaatctcccactcgctgttgttgcttaccgggcagataagcacagaacctctgtatgtggtgagttatacttggactcccgacttagatgacgtctttgtcaaaaatgggagggaagagatcacgcaagtaatcccaactaaacgcccacgtgaagtaactgaaaacgatgaagaaaaccaaataatgcatttattttgtagtagggacgtcaacgttattttttatttaattggtggattttcaactggagatgtacgatcccgggtctggcctatatttttttgttgttttaaaacccaaactgattttaaagctttatataaggcgttatggtatggagcacccctaaatccgcatataatatctgataccctatgtatatcggagacgtttgacattcactcggaagttatacaaactctgatggtaacaacacaccatttaaaccgaaagggattatcggacaacggcctatgcatcacagaggcaacactctgcaagttagttaaaaaatccgttggtcgtcaggagctaacatcattatatgcccattacgaacgtcaagtattggctgcatatcgacgactctactgggggtatggatgctcgccgttttggtatattgttcgatttggaccctctgaaaaaacgctagtgttggctacacgctattacttgttacaaacggacacaagttacaatacgttggaaacccccttatatgacttacaggcaattaaagatttgtttttaacttaccaagtcccggcattacctaattgtagtgggtacaatatttcggacttgttgtcttttgataaactttccatgttttgttgttcctcaacatatacacgaggtttgacagccaaaaatgctctatcgtacattttacagcgaatacatacagacacaacggaaatacacgcagtatcggagtatattaccaacgatagaaaaggccttaaagttccagaccgtgaatttgttgattatatttatctggcacattttgaatgtttcaatcggaaacagatcgcagaccacctacaagcggttacatactcagattttgtgaataaaccggtcctcttaaaatcatccaacctgggaaaaagagctactgctaatttttttaatcatgtacgttctcgtctcaacatgcgtgactatataaaaaagaacgtaatttgtgatgtcactgaacttggacctgagattggacataaatatacaattactaaaacatatactttaagtcttacgtatgccgcaaaacctagcaagtttataggcgtatgtgacctagctacaacgctaactcgtcgtgtggaaaacattgaaaaacaatttagtccatatggatggtcctccactattccctcaaatccacccggttttgacgaattgtctaattttgaggattcgggtgtttccgcggaggcgttacgagcagccaactttgcaaacgatacacctaaccaaagtggtcgtactggttttgatacgagcccggggattacaaaactattactgtttttctctgctgccactgggatagccacacatgatgtatccatcctgagttataaaactccattagaagccctcatcggccattctgaggtaactggaccaatgcctgtatatcgggtagccttgcctcacggcgcccaagcatttgctgttattgctaatgatacgtggtcatcaataacaaaccgttacactttaccgcacgaggctcgattaattgcggaggaccttaaacaaattaatccatgtaattttgttgccgcttcactacgagatatgcagttgactttactattatctacgtctgttaaaaacgtttctaaaatttcatcaaacatacccaaagatcagctttatataaacaggaatgagctatttaatacaaatcttataatcacaaacctcatacttgatgtagactttcatataagaaaacccatcccattgggtattttacatgccggcatgcgagcatttcgtcatggtattttaacggccatgcaattactttttccaaaggccgtggtaaaccctaacaaagacccatgttatttttataaaactgcatgtcctgaacctaccgttgaggtgttggatgatgataatttattggatataaccagccattctgacatcgatttttacatagaaaatggcgaattatacacgtgtgtagaagagaattatacagaggatgtatggttttttgatacacagacaacgtctgaagtccatacacacgccgatgtatcaaacaatgaaaacttgcatgaaactctaccctgtaactgtaaagagaaaataggtttcagggtatgcgtaccaatcccaaatccctatgcgttagtggggtcttccactttaaaggggtttgcacaaatattacagcaagcggtgttgctggaacgggaatttgttgaatatattggtccgtatttacgggacttttcgtttatagatactggtgtttatagccacggacatagtttaagactgccttttttctccaaagtaacaaccacagggacggcggttggacaactactcccattttatgttgtacctgagcagtgtattgatatattagcgtttgtgacatcacatagaaacccggcaaactttcattttcattcaagaccgcagtcgaatgttccagtgcaatttattttacataaccttgggggggaatacgcagagttttttgaacgtaaggttgcgcgtaataaacaaatatttagctccccgcaaatatctttaacaaaggctctaaaagagcgcggggtaacttgtctggacgcatttacactggaggcctttgtcgacagcacaatattagaatctattgtggagcatattgctgttcatttccccgggcgtgatcgcgaatataccttaacatcatcaaagtgtatcgccatcaaaagggactgggtgttatttcagctcatatgcggaacaaaagggttcacttgtcttcgatatccccatcgcggaggaagaacggctccccggacatttgtgtctctgcgagtggatcatcacaaccgtttgtgtatttcgcttgcacaacaatgttttgctacaaagtgcgatagcaatcgcatgcatacaatctttactctagaagtacctaattatccaaatttaacttcgagttaa

SEQ ID NO: 11503 - DNA, 27 bp, unidentified
  source 1..27: mol_type = other DNA
  misc_feature 1..27: note = Synthetic
atgatagttcttacaattagagattga

SEQ ID NO: 11504 - DNA, 1773 bp, unidentified
  source 1..1773: mol_type = other DNA
  misc_feature 1..1773: note = Synthetic
atcacagcccattccctgatcacggataaactgagaaagatcacaagaatgcaagactcacatggtaatacacaaatactcaaccaggcaaattcaatggtgaaaagaacatggagattactatttggaattgcaaccttaatattacttgtttcaatatttgtgttatcgctcataattgtattacagtcaacaccggggaatttgcaaaacgatatcaatataattagaaaggagctcaatgaacttatggagaattttgaaactacatctaagtcactgttaagtgtatcaaatcaaatcacttacgatgtatcagtacttactcctataagacaagaagctattgaaacaaacatcatttcaaaaataaaagatcattgcaaagatagagtaattaaagaaggaagcacttgcacattgaatggcagccctttgcatgatgtctcttttttaaatgggttcaataaattctatttcacatataaagataatatgcaaattaagtttaaatcattattagattaccccaattttattccaactgctacaactccccacggatgcattcgaattccatcattctccttaggtcaaacccattggtgttatacccataatataaacctactaggatgtgcagaccctgcatctagcaatcaatatgtatcactaggaaccttacaagtcttaaaaatgggtgacccttattttaaagtcgagcatagtcattatttaaatgacgggaggaatcgaaaaggttgttcagtggttgctgtccccgacggatgcctgcggaattgtgtgaccatgacaaaaaatgagacagagaatttcaaagacctcaattggcaacacaattacttacatacatatcatataatggtaccattaaagactcgtataataaatccaccaggatcatccagagattgggttcatatcgcaccaggggtaggctcgggccttttgtatgccaaattacttatatttcctttgtatgggggtctcacggaaaaatcagtgatacataataatcaatcagggaaatattttttccctaattcaactaaattgcaatgccgtaacagcactatggaaaaaataaaaggagcaaaagattcatacacaataacttacttctcagggagacttatacagagtgcatttctggtttgtgatctaagacaatttctttctgaagattgtgaaatcttaattcctagtaatgattacatgatggtcggtgcagagggtcgattatataacattgagaacaacatattttattatcagagaggatccagctggtggccttatccgagcctctatagaatcaggttaaaccttagtaagaaatatcctagaataactgaaattaaatttacaaaaattgaaatcgccccaagaccaggcaacaaagattgtccaggaaataaggcttgcccaaaagaatgtataacgggagtctaccaagatatattgccactaagttatcccaatactgcatttccacacttaaaacaagcgtattatacaggtttttatcttaataactcgctcgagagacgcaatccaacattttatactgctgacaatctagattaccatcaacaggaaagattaggtaaattcaatcttactgctggatactctactacaacttgttttaaacagaccactactgcgaggttatactgtctctacataattgaagtgggtgactcagtcattggggactttcagatcaccctttttttagcagctcaatag

SEQ ID NO: 11505 - DNA, 45 bp, unidentified; identical to SEQ ID NO: 2371
  misc_feature 1..45: note = Synthetic
  source 1..45: mol_type = other DNA

SEQ ID NO: 11506 - DNA, 207 bp, unidentified
  misc_feature 1..207: note = Synthetic
  source 1..207: mol_type = other DNA
aagatctgcatcttcgacaagctgctaaccaagcagtacagcggctactgcatgctgtgcttcgtggagcagcggctggacgacgtgcagcatgccacgctgtacaacttcgaggtgtgcaggctctgctcgctgttggagaagagcgacaacgagaagttcgagtacctgcactttatttataactcgctcgtaaccactaaatga

SEQ ID NO: 11507 - DNA, 114 bp, unidentified
  source 1..114: mol_type = other DNA
  misc_feature 1..114: note = Synthetic
acgtgcagcatgccacgctgtacaacttcgaggtgtgcaggctctgctcgctgttggagaagagcgacaacgagaagttcgagtacctgcactttatttataactcgctcgtaa

SEQ ID NO: 11508 - DNA, 687 bp, unidentified
  misc_feature 1..687: note = Synthetic
  source 1..687: mol_type = other DNA
atgagttccacacagattcgcacagaaatccctgtggcgctcctaatcctatgcctttgtctggtggcgtgccatgccaattgtcccacgtatcgttcgcatttgggattctggcaagagggttggagtggacaggtttatcaggactggctaggcaggatgaactgttcctacgagaatatgacggccctagaggccgtctccctaaacgggaccagactagcagctggatctccgtcgagtgagtatccaaatgtctccgtatctgttgaagatacgtctgcctctgggtctggagaagatgcaatagatgaatcggggtcgggggaggaagagcgtcccgtgacctcccacgtgacttttatgacacaaagcgtccaggccaccacagaactgaccgatgccttaatatcagccttttcaggatcatattcatctggggaaccatccaggaccacgcgaattcgcgtatcaccggtcgcagaaaacggcagaaatagtggtgctagtaaccgtgtgccattttctgccaccactacaacgactagaggaagagacgcgcactacaatgcagaaatacggacccatctttacatactatgggctgtgggtttattgctgggacttgtccttatactttacctgtgcgttccacgatgccggcgtaagaaaccctacatagtgtaa

SEQ ID NO: 11509 - DNA, 687 bp, unidentified; identical to SEQ ID NO: 11508
  misc_feature 1..687: note = Synthetic
  source 1..687: mol_type = other DNA

SEQ ID NO: 11510 - DNA, 15 bp, unidentified
  misc_feature 1..15: note = Synthetic
  source 1..15: mol_type = other DNA
ctggaggcgaactaa

SEQ ID NO: 11511 - DNA, 102 bp, unidentified
  misc_feature 1..102: note = Synthetic
  source 1..102: mol_type = other DNA
atgatcagaactcgccatcagaatcgtcagtggatgaaaacgaacccccttaaacacgttttccaacttaataaatgctacccacataaaatcacgtgctag

SEQ ID NO: 11512 - DNA, 36 bp, unidentified; identical to SEQ ID NO: 2408
  source 1..36: mol_type = other DNA
  misc_feature 1..36: note = Synthetic

SEQ ID NO: 11513 - DNA, 1197 bp, unidentified
  misc_feature 1..1197: note = Synthetic
  source 1..1197: mol_type = other DNA
atggagatgaacaaggttctccatcaggatctggtgcaggccacgcggcgtatcctcaagttgggtcctagcgagctgcgcgtcaccgacgccggccttatctgtaaaaatcccaattactcggtgtgcgacgccatgctcaagacagacacggtctattgtgtcgaatatctgctcagctactgggagagccgcacagaccacgtgccttgttttatctttaaaaacactggctgcgccgtctccctctgctgttttgtgcgagcgcccgtcaagctcgtctcgccggcgcgccacgtaggtgagttcaatgtgcttaaggtgaacgagtcgctcatcgtcacgctcaaggacatcgaggagatcaagccctcggcctacggagtgctgacgaagtgcgtggtgcgcaaatccaattcggcgtcggtgttcaacatcgagctcatcgccttcggacccgaaaacgagggcgagtacgagaatctgctgcgcgagctgtacgccaagaaagccgcgtcgacgtcgttggcggtccggaaccacgtcaccgtaagcagtcacagcggcagtggtccatctctgtggcgcgcccgcatgtcggccgcgctcacgcgaacggcgggaaagcggtcccctcggaccgcatctccccctcctcctcctcctcgtcatccgagttgctctcccaccatggtcgccgctggcggcgccgctgccgggcctcggccgccgccgccacccatggcggcggggtcgtggcggctgtgtcgttgtgaggcctgtatgggacgatgcggatgcgcaagcgagggagacgctgatgaagaggaggaggagttgctggctctggcgggagaagggaaggcggcagcggcagcggcgggccaggacatcggagggtccgcgcgtcggcctctggaggagcacgtgagtcgtcggcgaggggtgtcgacccatcaccgtcatccgccgtctccgccgtgcacgccgtccttggagcggactggttatcgttgggcaccgtcatcgtggtggcgagcgcgctccgggccatcgcgaccgcagtctgggccgtggctgcccgcgcgctttgcgactctgggcccgctggtgctggctcttctgctggtgctggctctgctgtggcgcggtcatggccaatcgtcgtctccgacacgctccgcacaccgcgactga

SEQ ID NO: 11514 - DNA, 27 bp, unidentified
  misc_feature 1..27: note = Synthetic
  source 1..27: mol_type = other DNA
ctgaatgcacacatgtctaggggctaa

SEQ ID NO: 11515 - DNA, 1536 bp, unidentified
  misc_feature 1..1536: note = Synthetic
  source 1..1536: mol_type = other DNA
atggctctgtggacacaccagaatggtaaactgtatctgccacccccaagaccaatcgccagagttctcagcacggacgaatacgtgacaaatactagtctgtttttctatgctggtacagaacgcttactacaagtaggccatccattttttgaagttagaagccctcaggaaactgttgaggtgccaaaggtatctggtaatcaatatagggtgttacgtttaacattacctgatcctaataaatttgctttagttgattcctctatctttaacatggatagagaacgactagtatggagattaagaggtattgaaataggtcgtggaggaccgttaggggtagccacaacaggcaatccattatttaacaaatataatgatactgaaaatcctaacagatatcctctggctcaaacagatgataataggcaaaatgtatctacagacccaaaacaaacacagctctttatggttggctgtgcgcctccaataggggctcattgggatatagctgagttttgtgaaacacatagacctcaggctggagaatgtccacctgtgcaattaattaattctgttatacaagatggggatatgtgtgacattggctttggtgcttgcaatttcagaacatttcagcaggatagatcaggagtgcctttggatatagtagatagcacctgtaaatatccagattttctaaaaatgactaaagataaatatggtgatgaacttttcttttacggtagacgagaacaattgtacactcggcattacttcaccagagctggaacaataggtgatagcattcctacaccttataaaggttctgaattttatagacagccacaggatagtcaggcacaaaacactgtagattcccatatttatattgcaactcccagtggttcgctaactagtagtgatgcacaattatttaatagaccatattggttacaaaatgctcagggaactaataatggtatttgctggggaaatcagttatttgtgtcatatgttgacaatacgcgcaacactaattttaacttatctgtttacaaatcaggggcgcctggtgctccggtgccttctgattatagatataaggcctcagattttaaacaatatttgcgtcatgttgaggaagtggagatagagtgtatattccagctctgcaaggttactttggatgctgacatcttagcacatatcaatgtaatgaatccaaacatacttgagcagtggcaattggcatttgttcctccagcaccacaaagtattgaggatcaatatagatttttgcagtccatggcaactaagtgtcctactgctgctgctgcagaagacaacaatgatccttacaaagattataccttttggcaaatagatatgactgaacgattttctttagaattaaatcaatttccactaggtagacggtttttgtatcaaagtggattaataactaacaaacgtgttagaaaagagcagccagcaacacgacgcgtaaaacgcaaacgtacctcaaaataa

SEQ ID NO: 11516 - DNA, 33 bp, unidentified; identical to SEQ ID NO: 2414
  misc_feature 1..33: note = Synthetic
  source 1..33: mol_type = other DNA

SEQ ID NO: 11517 - DNA, 54 bp, unidentified; identical to SEQ ID NO: 2415
  source 1..54: mol_type = other DNA
  misc_feature 1..54: note = Synthetic

SEQ ID NO: 11518 - DNA, 84 bp, unidentified
  misc_feature 1..84: note = Synthetic
  source 1..84: mol_type = other DNA
atgtacaaaactactaaatgcgcttctcaattggataatctatgtaccgagatgaacaaaatggatattatagacaaaaaatga

SEQ ID NO: 11519 - DNA, 1110 bp, unidentified
  source 1..1110: mol_type = other DNA
  misc_feature 1..1110: note = Synthetic
gtggcggcacagcgacgcgcgtggatgtccacggccttgggcgagaatggcaaggacggcgaggccagctccccgtgctcgagcacgcccgcgagcacgcctgcgagtacgcctgcgggaacgccgacgatgactgcccccgcgttctactatagcatcgacggcgagcgcagcacgtacggaggctacgcgccggcggcgtactacgcgccgactcagctcatgcccgcgccatacacaggcgcgccctcacacgcgcccgcgcccgcgcacgcgcccgcgcccgcgcacgcgcccgcgcattccgccgccgtcacgagcctttccgtgcagagcgcggcgctgccaaccaacgcgcacgcgcacattgactgggtctcctgcgtgaacgtggtcatgcagaggatgcatcagtcttccaacttctttcccgagatcgacgtgcacgggaccaacgggcgcttcctgtgcaccatggtccacgagacggtgcggctcacctcgggcattcactgctcggtcaaggcggccaagaatgaggtgtgccacctgctgatgaatcgcctcaccggcgtgccgaactcttcgcaccaggaatgcccgtgcagcatggccgagacgcaagcatattatgaaaaattacaccataaaaagcaagaccacgtacgcagcgtgcaagcagtctctcactccgcgaacctgatcgagcgcaagtacttttccacgcgcggcttcggacgcgggcacggtagcgggccctgcggctctgggcgcttgcagtgcggcccgagcgcgtttcccgagcgcttcccgcccccgtccggggaccattcccacttgaaaacgcggcgcggcgcgccaagaggcactccgcgcggcagctggcgcggcgctgctcccggcggcgctcccggtggtgcccctggcggagccgcgtgcggcttgacgccgatcccggacggaatcaacccaccatgcctcaacgggacgacgatgcgggctcgagggggccgcggccggagagcgcgcggtgtagcctgtcccggacccaactcctcgatgccgaggatgttgctacgcccggtttccgtgccagtcagctccgagtga

SEQ ID NO: 11520 - DNA, 27 bp, unidentified
  source 1..27: mol_type = other DNA
  misc_feature 1..27: note = Synthetic
atgcttaccacatcatcaaactattaa

SEQ ID NO: 11521 - DNA, 159 bp, unidentified; identical to SEQ ID NO: 2426
  source 1..159: mol_type = other DNA
  misc_feature 1..159: note = Synthetic

SEQ ID NO: 11522 - DNA, 1008 bp, unidentified
  misc_feature 1..1008: note = Synthetic
  source 1..1008: mol_type = other DNA
atgactgaggtgtacgacttcgatcagtcctcttggtacaccaaaggctcattggcccctattttgcctaccacttatcccgatggtaggctcataccccaagtcagagtaatagatccaggactcggcgatcggaaagatgaatgcttcatgtatattttcttaatgggtataatagaagacaatgatggcctcggacctccaattggaagaacatttggatcgctgcctttaggagttgggcgtactacagccagacctgaggagttattgaaagaagccaccctgttggatattatggtaaggcgaactgcaggtgtcaaggaacaactggtattttataataacaccccattgcacatcttaactccgtggaaaaaggtccttacgagtggaagtgtgttcagtgcaaatcaagtctgtaacacagtcaatctaataccattagacatagcacaaagattcagggtggtatatatgagcatcactcgactatcagacgatggaagttacagaattccccgcgggatgtttgaattccgctccaggaatgctttagcatttaacattttagtcaccattcaagttgagggagatgtcgattcaagccgaggtaatttgggcatgttcaaagatcaccaagcgacattcatggtacatatcggcaatttctgccgcaagaaaaaccaagcctactctgctgattattgtaaactgaaaattgaaaagatgggattagtgtttgctctaggagggataggaggaacgagtcttcacatacgatgtactggtaagatgagcaaggccttgaatgcccagctaggtttcaagaaaatcctgtgttacccgctcatggagatcaatgaagatttgaatagatttctatggagatcagagtgcaaaatagtaagaatccaagcagtcctgcaaccatcagtcccacaggatttcagagtttataatgatgttatcatcagcgatgatcagggtcttttcaaaattctctaa

SEQ ID NO: 11523 - DNA, 30 bp, unidentified; identical to SEQ ID NO: 2433
  misc_feature 1..30: note = Synthetic
  source 1..30: mol_type = other DNA

SEQ ID NO: 11524 - DNA, 15 bp, unidentified
  misc_feature 1..15: note = Synthetic
  source 1..15: mol_type = other DNA
ataagactcatttag

SEQ ID NO: 11525 - DNA, 87 bp, unidentified; identical to SEQ ID NO: 2437
  misc_feature 1..87: note = Synthetic
  source 1..87: mol_type = other DNA

SEQ ID NO: 11526 - DNA, 174 bp, unidentified; identical to SEQ ID NO: 2438
  source 1..174: mol_type = other DNA
  misc_feature 1..174: note = Synthetic

SEQ ID NO: 11527 - DNA, 75 bp, unidentified; identical to SEQ ID NO: 2440
  misc_feature 1..75: note = Synthetic
  source 1..75: mol_type = other DNA

SEQ ID NO: 11528 - DNA, 42 bp, unidentified; identical to SEQ ID NO: 2444
  misc_feature 1..42: note = Synthetic
  source 1..42: mol_type = other DNA

SEQ ID NO: 11529 - DNA, 78 bp, unidentified
  source 1..78: mol_type = other DNA
  misc_feature 1..78: note = Synthetic
ttgacgagcgttctgacacagagattgtgtgcggttattaaaaacattggactaaggagctactgcacaactaactaa

SEQ ID NO: 11530 - DNA, 2280 bp, unidentified
  misc_feature 1..2280: note = Synthetic
  source 1..2280: mol_type = other DNA
atgccgctgacggcgcgtgccggccacaccctgcatcgtcttccgctctcccactattggtggcttctgttgggtcgacactcccttcgtcatgtccattcctaccttcgcctgcgcaaaggtctacgccttcctttaccttggcccgaacaagaatgtctgcatttacatcctaagccttacaagtttctcctgcgttacccttgtctaacaagacaaccgcatcttcttcagggctggcccgcggattcttctctatggttcgaccctaaaccctaccatccttcggccgacagcaagttgctacctctgggcctcatcacgctgtccgccttttccatgcgcgtttcggagccgacacactgcagcggcttccacgcggcagatccgtctctcagttggttaacgggatcgtccccttggctcgtgctcctacaagcgccaggagggtctctgttctgccacgacgtgttccaaggccggctctatctcctgtcgcactccgtgtcgctctttctaaagacgggccttcgccagtgtgaggccatctatcgcgcaccgctgtggcgcgtacggcccctgccgagcctatggacgtgtcgagatcccgacacggctttcttgccgaaattgctggcgagaaccgcccgacgcggcctggccgctttctatgccctgtggagactgcatctgggatcccgctcggagctctctcaccccgtgttggagtgggagagaacagagctggtcctgacggatcggagacgcgggtggccgtgtacgcacctcctgtccggctcggagtcccagcgcgtttcctcgagtgacgccggagacacatggaacgcagcgacagagaaggcggcggggggaaaagaggaggcggagagaggcgggcgacagcaagccactgacagactcgcaagtccgcacctgacgcggggccgccgcgactgcggtcggtcccttcagggtgaggagcccagcgccgcggaagactttgcgaggtgcagaccgctgctggacgaactgtgcggggagggcggctggcttccctttgcgtttctcacggcatctccgcacgtctgtctgatcctaacggagggaggccccgtcctggcgcttgacctgaacgacacctccctgtggcgcatcgcggacgacttggagctgctgctgcgcctggggagcctgctcctgctctcagggctccggcttcctctccgtcccccgagcgggagcggcgaggcggcgagaaagccggggtacgagaaggaagagggaagagggagagcgacgacggcgagcgcgacggccgcgacgtcgccgcgcagaccgacccgtccgaggggggtgacggagaagggacgtgtgacaaccggggacgtccctttctccgcacatcccgaatctgaggaacagacagacggccaccacgggcgccaagaaagcggccacggcgaccagcgcggcggggacggacgaggacaccgcgatgacggcgcgcgccgccacgcgaatgacgaaacagagccccagcagcgcggagagcacgaggacggggaacagaccgactccgggcgcgaggaggacgcacaggagagcgaggtcgcaagaagagacgagaagggaacggagcagggcggtagcggaaggagctgcgggagggcaacgcagacgtacggcgggagaggcgaacatggtgcctggtcgtcgatccccctgtctgtccccaggcccgatccccgcgtgtgggtccctcctcctcatctgttattcccttccccgctgccgtcgataacgcccgtcgaagacgagccgtccgcccgccctcggtgcccgccaggtcccgcggaggaaccctctaagtgttctccgtgcccgccctgcccgtcgcccgacgccccgcagtccgctgtcccgcgcctctccgctctgtccgtcccctcgccgtccaccgcgcgtgtccgtttctccctctcctccctctcctcctcctcctcctcctcttcctcctcctccccgtcctactctccctccccgttgtctccgccctctcccgtctctccctcgtctcccagatctccgttcatctcccccattagatctccgggactccgagcaaagccgtgggtgtcctccgggcatcccgtggcgttcccgccggcgccctcgtccgcgccgcccttttccaaaagagtcccgtccgttccctcatcggcatctccgtccgcgccgtgcatcggcaggtcgcggccgccctccgcacagacggcgtga

SEQ ID NO: 11531 - DNA, 2280 bp, unidentified; identical to SEQ ID NO: 11530
  misc_feature 1..2280: note = Synthetic
  source 1..2280: mol_type = other DNA

SEQ ID NO: 11532 - DNA, 120 bp, unidentified
  source 1..120: mol_type = other DNA
  misc_feature 1..120: note = Synthetic
atgtccattcctaccttcgcctgcgcaaaggtctacgccttcctttaccttggcccgaacaagaatgtctgcatttacatcctaagccttacaagtttctcctgcgttacccttgtctaa

SEQ ID NO: 11533 - DNA, 120 bp, unidentified; identical to SEQ ID NO: 11532
  source 1..120: mol_type = other DNA
  misc_feature 1..120: note = Synthetic

SEQ ID NO: 11534 - DNA, 225 bp, unidentified
  misc_feature 1..225: note = Synthetic
  source 1..225: mol_type = other DNA
atgtgtgcagaaagggcgccatttattgaccaaagtcaatcaatgactttatttattgaggaacgcccagacgggacaattcccgcctccaaaataatgaatttgcttatacgtgcctataaagccggccttaaaacgggtatgtactactgtaaaattcgtaaagctacgaacagcggactgtttgcgggaggcgaattaacctgtaccagttgtgctttataa

SEQ ID NO: 11535 - DNA, 552 bp, unidentified
  misc_feature 1..552: note = Synthetic
  source 1..552: mol_type = other DNA
atggacatcgacccttataaagaatttggagctactgtggagttactctcgtttttgccttctgacttctttccttcagtacgagatcttctagataccgcctcagctctgtatcgggaagccttagagtctcctgagcattgttcacctcaccatactgcactcaggcaagcaattctttgctggggggaactaatgactctagctacctgggtgggtgttaatttggaagatccagcgtctagagacctagtagtcagttatgtcaacactaatatgggcctaaagttcaggcaactcttgtggtttcacatttcttgtctcacttttggaagagaaacagttatagagtatttggtgtctttcggagtgtggattcgcactcctccagcttatagaccaccaaatgcccctatcctatcaacacttccggagactactgttgttagacgacgaggcaggtcccctagaagaagaactccctcgcctcgcagacgaaggtctcaatcgccgcgtcgcagaagatctcaatctcgggaatctcaatgttag

SEQ ID NO: 11536 - DNA, 48 bp, unidentified; identical to SEQ ID NO: 2450
  misc_feature 1..48: note = Synthetic
  source 1..48: mol_type = other DNA

SEQ ID NO: 11537 - DNA, 42 bp, unidentified; identical to SEQ ID NO: 2451
  misc_feature 1..42: note = Synthetic
  source 1..42: mol_type = other DNA

SEQ ID NO: 11538 - DNA, 33 bp, unidentified; identical to SEQ ID NO: 2452
  source 1..33: mol_type = other DNA
  misc_feature 1..33: note = Synthetic

SEQ ID NO: 11539 - DNA, 36 bp, unidentified; identical to SEQ ID NO: 2453
  source 1..36: mol_type = other DNA
  misc_feature 1..36: note = Synthetic

SEQ ID NO: 11540 - DNA, 6750 bp, unidentified
  misc_feature 1..6750: note = Synthetic
  source 1..6750: mol_type = other DNA
aggtcatctgaaagggttgttgtgatggatccacaagtccaaatacaccacatcatcaagccagagtgccatctcaactcacctgtggtggagaagaaactgacgctattatggaagctcacaggtttaccgttgccacctgaccttaatagttgcgttacacacaaggatgtgacgtgggatgaagtgctccggttggaggctaatttgacaaaggaattacggcaattggtgcgaggcctgaccaatagaatgcatgaaagaggggagtttattgactcatataaacctttatgccatccacgtacgttaagttggttgactaatatcagcttgattaagagtgacaacattctagcaggccataagaaaatgctagtccggattggcggtatgttgcatgaacaaacagaccaattgtttgtcactcttggcaggaaattagcaggtgacccttgcttgttccatcaactaggccacctagctggatgtccacccaattccagatttgaggaacaggtaggaggctgcagtttgtggtcacccataagcgatccagccctggtcacaggtggtgaatatgccaactgtgtgtatgcgtggtacttaatacgtcaaaccatgcggtacatggccctccagagaaagcaaacaagagtgcaatcacagcagaatgtcctaattggatcagatacaatcgtgggaattcatccagaactagtgataattactggaattagagacaggacattcacctgtttgacttttgatatggtgctaatgtacgcagatgtggtggaaggccgtgccatgacaaagttggtcgcactcaccgagccgacaatggtagaagtcattcagagagtcgaaaaattgtggttcctagttgacagcatctttgaggaaatcggtggtgcaggttacaatattgttgcatctctggagagcttggcatatggtgctgttcaactgtgggataaatcactggaacatgctggtgagtttttctcattcaatcttactgagataaggagtgagctagagaaccatttagatcctggtatggcatttagagtagttgagcaggtgcggttgctatatactggactgagtgtgaaccaagcaggtgaaatgttatgcattttacgtcactgggggcatcccttgctgtgcgctgtgaaggcggcaaagaaagtcagagaatcgatgtgtgcaccgaaattaacctctctagataccacactcaaagtgttagcattctttattgcagatattatcaatggacatagacggtcacattcagggttatggccaagtgtcagacaagagtcacttgtgtccccattgctccagaacctctatagagaatccgccgagcttcagtacgcgattgtgcttaagcactatagagaagtatcccttattgaattccaaaaaagtattgattttgacttagttgaagatctgagcgtgttccttaaggataaagccatctgtcgaccaaagagtaactggttagctgtattcaggaagtccctactccccggacatttgaaagataagctgcaatctgagggcccttctaaccggcttctgcttgattttttgcaatcaagcgaatttgacccggctaaggagttcgagtacgtgacatcactggagtatcttcaggacccagagttctgcgcatcttattccttaaaggaaagggaagtcaagactgatgggcgcatatttgcaaaaatgactagaaaaatgaggaactgtcaagtcttgctagagagtttgctcgcatgccacatatgcgattatttcaaagagaacggagtagtacaagagcaaatcagcttaacgaaatcactgcttgcgatgtcgcaacttgctcctcgtgtgtctgagtatcaagggagagttctccgttcaactgataggtgcagtagagctacagctacacctgggcaggacacaagcccaggcgagggggtcaggcgacggaaaacgattatagcatcattcttgactactgacctacagaaatattgtctcaattggaggtacactgtagtaaaaccttttgcacagaggcttaaccagttatttgggataccccacggctttgagtggattcacctccgcttgatgaatacgaccatgtttgtaggagacccacataatgtccctcagttttcatcaacacatgacttagaatcccaagaaaatgatggaatatttattgtatcacctcggggtggtatagaagggctatgccaaaaaatgtggaccatgatctccattgcggcaattcatctagcagccacagaatcaggttgtcgggttgcatctatggtccaaggggacaatcaagcaattgcaatcaccacagagatcgaagagggtgaggacgcatccgtagcatcaataaggttaaaagaaatatctgagaggttttttagagtgttcagagagataaacagaggtatagggcacaacttaaaagtccaagaaacaattcatagtgagtcattcttcgtgtactcgaaacggatcttctttgaggggaagatcctcagtcaactactaaaaaatgcaagtaggttagtgttggtatccgagaccgtgggtgagaattgtgtcggcaattgctcaaatatcagttccacagttgctaggctcattgaaaatggattggataagagagtcgcatgggggctcaatatcatgatgatcgtaaaacaaattctttttgacattgatttctccttggagcctgaaccatctcaaggcttgattcatgctattcgccaagatccaaacaacataaaaaacatctctatcactcctgctcaattgggtggattaaattttctagccctatctcggctatttacaaggaacataggagaccccgtctcgtcagccatggcagatatgaagttctacatacaggtcggattattatcccctcatctgctaaggaatgcaatttttagggaacccggagatggaacgtggacaacactgtgcgccgacccgtactcattaaaccaaccatatgtgcaattgccaacgtcgtacttaaaaaagcacacacaacgcatgctgctcactgcctcaacaaatcctttattgcaaggcacccgagtagagaatcagtacattgaggaagaaagactagcaaagttccttctggatcgagaactggttatgccacgtgtggcgcatacagtctttgagaccactgttgccgggagacgaaagcatctgcaaggattgattgacaccacaccgaccattattaaatatgcccttcatcaccaccctatttctttcaagaaaagcatgctgatatcatcttactcagctgactacattatgtcgttcatcgatactatcgcaacagtggaatacccaaagcgtgacaccatgaagctctggaacagaggactaataggtgtcgacacctgcgcggtcacacttgcggattacgcaagaacatattcgtggtgggagatcctaaagggaaggtcgataaagggagttaccacacctgatacattagaactttgctctgggagcttaatagagcaaggccatccgtgtgctcagtgcacaatgggtgatgaatccttttcatggttcttcctcccaggaaatattgatattgaaaggccagacttttctagggtggcccagagaatcgcttatgtcggctcaaagacggaagaaaggcgggcagcttcactgacaacaatcaaagggatgtcaactcaccttagggcggcattaagaggagcgagtgtttacatctgggcgtatggagacagtgacaagaattgggacgatgctaccaagctcgctaacacaagatgtgtaatatctgaagaccatctacgtgccctttgtccaatcccaagttcagcaaacatacagcatagactgatggatggaataagtgtaacgaagttcactcccgcgtctctagcaagggtgtcatcatatattcatatttcaaatgaccggcatcagagtagaattgacggtcaagtgatcgaatcaaatgtgattttccaacaggttatgcttctcggtctcggcatttttgagacatttcaccctttgtctcacaggtttgtgactaaccccatgacactccacttacacacagggtactcatgttgcataagagaagctgataatggtgatttcttagaatccccggctagtgtaccagacatgactatcacgactggcaataagtttctttttgaccccatgcccatccaggatgacgatgctgcaaaactacaggtatcttcattcaagtactgtgagatgggccttgaagtgcttgacccaccaggacttgtaaccttactatccctagtgactgcacgcatctctattgatacatccataggggagagcgcgtacaactcgatacacaatgatgctattgtatcattcgacaattccatcaactggatatctgagtacacgtactgcgatcttagactactggcagtagcaatggctcgggagttttgcgacaatctctcttatcagctttactatctgagagttaaagggcgacgggcaatccgggattatatccgtcaagccctctcgaggataccagggttacagctcgctaatatagccttgactatatctcatccgggaatttgggcaagactgaggctaatcggggcagtaagtgctgggaatagccccattagtgcaaccgtaaattatcctgctgctgtgtgtgagctcatactatggggttatgaccaatatactgcacaactactagatggttatgaattagaaatcatagtcccaaattataaggatgatgacttgaacaggaaagttgaacatatattagcaagacgggcttgtctgctgagtctactgtgtgagtatccaggaaaatacccgaacatcaaagaccttgaacctattgagaaatgcactgccctgtctgacctgaataaattgtggatggcgacagatcacagaactcgggaatgtttttcagggatatctcagatatttgattcacccaagttaaatccattcatcactaatctttacttcttgagtaggaagctgctcaatgcaattagaagcagcacggactgtagggcctacgttgaaaacctttatgaagatattgacattgaactaacatctctcactgaggttgtacccttaggagaggatgatcaaatgatcactgggcctctgcgctttgaccttgaactaaaagaactcaccccagattttactatcacttggtgttgctttgactccacggcagcactgatgtcacggtgcattaatcatgccacagaaggtgcagagcgctacatccgaagaacggtcgggacagcttcaacatcttggtacaaagcagcaggaatattaactacacctggcttcctcaacctccctaaaggcaatggattgtatctcgctgagtcatcaggggccattatgactgtgatggagcatcttgtctgctctaataaaatctggtataacaccttgtttagcaatgagctcaacccacctcagaggaatttcggtcctaacccaattcagtttgaagaaagtattgtggggaaacacattgcagctgggattccttgcaaggcaggacacgtgcaagagttcgaggtactctggagagaggtagatgaagagacagatctgacatccatgagatgtgtgaattttatcatgtcgaaagttgaacagcactcgtgtcatattgtatgctgtgatttagaattggctatgggaactcccctggaagtggcccaatctgcatatacacacatcataaccctcgccttacattgcctaatgattagcggaaaattagtactgaagttgtatttctcacaaaatgccttattacaccatgttctctccttgttacttgtattaccatttcatgtaacaatccacactaatgggtattgctctcaccgaggctctgaagggtatatcatcgccacgaggacaggggttgctctgggttcaaatgtgtcccaggtactaggcagtgtgactgagatggtacggaaaggtcagacccttgtccccgtaaaggtacttacagcgatctccaatggatttaaaactgtatcaagctctttaggcaggcttaggggtgagctctattcgccatcgtgtagcattccgcagtcggctacagacatgttcctcattcaacttggagggaaggtgcagtcagattggaatacaaactctcgaggctatagagtgggtgataccgaactcgtattacaggacattatatcaatattgagcacactactaaaagaaataatacatgtaagggaatccagggagtcagtggacagggtgctgttgcttggggcatacaacctgcaagtatccggaaaagtaagaacaatggctgcggctgcaacaagaaacatattgcatctccatatagttagacttattggggactcaatgtccaatataaggagactagtacctctgctagataagggctttatagtaatatcagacatgtatagtgtgaaagatttcttgagaaaaactgagtcccctaagtacttcttgaacaagcttggcaagagcgagattgcacagatatttgaggtagagtccaagattattctgagcagggcagagatcaagaatattttgaaaatgatagggattgtagcaaaacagcactcagagtaa

SEQ ID NO: 11541 - DNA, 669 bp, unidentified
  source 1..669: mol_type = other DNA
  misc_feature 1..669: note = Synthetic
atgaccatgcgggatgaccttcctctggtggatcgagatctggtcgacgaggccgccttcgggggggaggagggagaactgccgctggaggaacagttttcattgtcctcgtacggcacctctgatttttttgtcagttcggcatactcgcgtcttccgccccatacccagccggtcttttcaaagcgcgtgattctgttcctttggtcgtttttggtcctgaagccgttggagatggtggcagcgggcatgtattacgggctgaccggaagggtggtggcgccggcctgtatcctggccgccatcgtcggctactacgttacgtgggcggtgcgggcgctcctcctgtacgttaacatcaagagggatcgtctgccgttgtcggcgcccgtgttttgggggatgtccgtgtttttgggaggcacggccctgtgtgccttgttcgccgccgcccacgagaccttcagtccggacgggcttttccactttatcgccaccaaccaaatgctgccgcccaccgatcccctgcgcacacgggccctggggatagcctgcgcggccggggcctcgatgtgggtggcggcggcggacagctttgccgcctctgccaatttcttcctggcacgcttttggaccagggccatcttgaatgcacccgtcgcgttctaa

SEQ ID NO: 11542 - DNA, 180 bp, unidentified
  misc_feature 1..180: note = Synthetic
  source 1..180: mol_type = other DNA
atgaccttcctctggtggatcgagatctggtcgacgaggccgccttcgggggggaggagggagaactgccgctggaggaacagttttcattgtcctcgtacggcacctctgatttttttgtcagttcggcatactcgcgtcttccgccccatacccagccggtcttttcaaagcgcgtga

SEQ ID NO: 11543 - DNA, 1683 bp, unidentified
  misc_feature 1..1683: note = Synthetic
  source 1..1683: mol_type = other DNA
atgaacactcaaatcctggtattcgctctgattgcgatcattccaacaaatgcagacaaaatctgcctcggacatcatgccgtgtcaaacggaaccaaagtaaacacattaactgaaagaggagtggaagtcgtcaatgcaactgaaacagtggaacgaacaaacatccccaggatctgctcaaaagggaaaaggacagttgacctcggtcaatgtggactcctggggacaatcactggaccacctcaatgtgaccaattcctagaattttcagccgatttaattattgagaggcgagaaggaagtgatgtctgttatcctgggaaattcgtgaatgaagaagctctgaggcaaattctcagagaatcaggcggaattgacaaggaagcaatgggattcacatacagtggaataagaactaatggagcaaccagtgcatgtaggagatcaggatcttcattctatgcagaaatgaaatggctcctgtcaaacacagataatgctgcattcccgcagatgactaagtcatataaaaatacaagaaaaagcccagctctaatagtatgggggatccatcattccgtatcaactgcagagcaaaccaagctatatgggagtggaaacaaactggtgacagttgggagttctaattatcaacaatcttttgtaccgagtccaggagcgagaccacaagttaatggtctatctggaagaattgactttcattggctaatgctaaatcccaatgatacagtcactttcagtttcaatggggctttcatagctccagaccgtgcaagcttcctgagaggaaaatctatgggaatccagagtggagtacaggttgatgccaattgtgaaggggactgctatcatagtggagggacaataataagtaacttgccatttcagaacatagatagcagggcagttggaaaatgtccgagatatgttaagcaaaggagtctgctgctagcaacagggatgaagaatgttcctgagattccaaaaggaagaggcctatttggtgctatagcgggtttcattgaaaatggatgggaaggcctaattgatggttggtatggtttcagacaccagaatgcacagggagagggaactgctgcagattacaaaagcactcaatcggcaattgatcaaataacaggaaaattaaaccggcttatagaaaaaaccaaccaacaatttgagttgatagacaatgaattcaatgaggtagagaagcaaatcggtaatgtgataaattggaccagagattctataacagaagtgtggtcatacaatgctgaactcttggtagcaatggagaaccagcatacaattgatctggctgattcagaaatggacaaactgtacgaacgagtgaaaagacagctgagagagaatgctgaagaagatggcactggttgctttgaaatatttcacaagtgtgatgatgactgtatggccagtattagaaataacacctatgatcacagcaaatacagggaagaggcaatgcaaaatagaatacagattgacccagtcaaactaagcagcggctacaaagatgtgatactttggtttagcttcggggcatcatgtttcatacttctagccattgtaatgggccttgtcttcatatgtgtaaagaatggaaacatgcggtgcactatttgtatataa

SEQ ID NO: 11544 - DNA, 54 bp, unidentified; identical to SEQ ID NO: 2462
  source 1..54: mol_type = other DNA
  misc_feature 1..54: note = Synthetic

SEQ ID NO: 11545 - DNA, 105 bp, unidentified; identical to SEQ ID NO: 2464
  misc_feature 1..105: note = Synthetic
  source 1..105: mol_type = other DNA

SEQ ID NO: 11546 - DNA, 195 bp, unidentified
  source 1..195: mol_type = other DNA
  misc_feature 1..195: note = Synthetic
agggtaaatccagcggaaaaggtaatgattcaacatcaaggtcagacgatggatccagccaactgcgagacaagcagagtaataaggctaatcctgccactgcggaaccgggtacatccaattgtgaacactataaggctcgaccgggtattgcgtctgtacagaaagccactgaaagcgccgaactgcccatga

SEQ ID NO: 11547 - DNA, 10053 bp, unidentified
  source 1..10053: mol_type = other DNA
  misc_feature 1..10053: note = Synthetic
atgaataagaataagaaacaaaaaccaaacactaaaatgaggagtaatcctcagaaaaacaaaattaaattggttaataaaaaattgcaaactttctttatggccttcttccaaattctgctggcggtgttcaagaattttaaggtttcactccaactgaggttcctggaaaaagtttaccggactgtctttaagaacttggcaatcaggagccctaaaggagctgtggctataatgaaatggggtgtcggttaccttaagaagagaaagcaaaagaggcaaaaatctagtggtggctatgaaattgaggctgcaagacaggctctctatccaattactttaggagttatggtcattttttgtggctatcagagtggaaatgaacctgtgtgtgtcgatttcaacaatcagactaacatcgttccttatgagaatgggaaagttatctttgggaacgtcaccattgtccctccaattgatagatttggtcttttgattccaacagacaattatgacactatagagtgcgttaggatgagtcctggcattgaattgagtgaagaagtttgtggattcatggggccaaagtatgatgtccttttgagaacacaatggggaaaaagagagacagaacacatgcacagaactagaagaagtgttacagagacaacccatgagagctctggtggagaacattgggattatagtgaatacctcacagattttgaacacaaaatgagcaagtacaaaatgccagtacttataatattggtgggatatttggttttaaaaactcaaaatatggcattattaataatacttgtgatagcccaattctacctcgctgatgctgggcactgccacgatcctgagaaatttgacatcatagaagctggtggctacacgaaaatgacaacattccttaaacatgacaaatgtttcatggttagggttccagaacatgatgtggttgaaataacagttgttaagaaaacaattaggccaactactgggtgtaaaacattcttactaggggctagtgtcaacactgaaagtagggccaaatgtccaggagctggttctgcaacgataccaaaaaccccaggagataagactttttgccatattgagcatgttgataggggttgggatagtggctgttttatatttggcaaaggagaagttgtcacttgtgcagcagtaacttactcgaaacctttttatgcttggatggttgattcagaacaaattacttgggaagttgaggttaattttggaggagattccaatcgtaaaaaaacagctgaaatctcgatggactcagaatatgaggaatttgaagaccccaagaacactggaagtaagattaggctgtattgtaagactcctagacaggaatgggacaactactatatggtagctagaccaggtggttccctctacaaagttaggagagagttaattaatgacttgaacttgccttggacagattttaaatacccctatgttactacaacaatagtaagaaatggagaaagcattttgaggtttaaaagaccaacaatgacctacattccagttactgttgcagcaggacttgaaagactctacatggatgtggtcctgcaagggcctgttctgaagtgttcaggaaaccactgtacaaaagaacaatggtcaggaaattccgaaacagaattgcctacaattactgaagatgtgggaactttaaagtgtgaaattgactactcaggtctgaaagtcagagttaccaatgtagctctttgcacccatacatcaacaatagtctctggacctttagtaacaaatgacattgtcatgattgtcctgagaggaactggttcagatactactgagtgcaaattgaaagttgaagggaaaagtgcaagttcaaataattggatcacaaattattgcgccccccattccagatcaatgtcagtcaaaccaaatgaacaaacaacagtgaaaatgacttgccccaatggaatcattgacctcagatttaatgggaaaacaacaactcaggtagaggttaagtattccaggacaatgaaattggttagttccatgatggcttcttttaaggatgtgactgaaaatgtcatgatacatgagagtggatttgagacatttaagaaagtggctaaaatgctcaccactccagtagtgggcttcttcaagagcatccttggtttggcttcaaattggtacattctaatttttgctttgctgcttgtctacgtgggtgtcaataaacaggggcctgtagggaacatcatgttggcattgggattaatttgtttgcttacctattactttgaagtggtagcagctgacaagtatgttctaatggttgatactgatgacatgtccttgagtgttggcaaagctcaccacattgaatgggattggaagattaccatgccattgattccatcattaccttaccaagtaactttaattggtcttgatccaaaatatggtattaccatttatagggttgattcccaggaagagtacacaaatttggccaaagttttaagtgaaaaatatgatctggttaggaaaataacaggttggtatggaaattcatggattaaggtgccttgcagagtgatagctagtgatgcagcattgaatctcacagctgattgtgaaaaagcaatttctgaaaattccaaggttgctgtcctcacttcagaacatactccaattgtgtgtagggattgcatagagaaatttgttaaattatccttagataaggaggaacagggagcttttagaaaccacaaacattacaatttccaaaatttgactagagaggagtgtgttattgatgggaattggacctatagttctgctatcgaagtttacagtaaatatgaattggagaatgaagatgaaattaccactactcaaggtggtgggtacggaaccataactattggagaaaaaacttggaaatatgttgaagtcaaatttggtccaataagtgtaaaaaatactatactctttcaaggggtattggactcagttgtacctaccaagaggaaatgggtgaacatgactaattgggcttgcaattttttcaagaaagagaatcaagttaataggggacacatattggctaaatcccttggaggtcctgctgctggctacaattgtatgattcaacttgtcaaggaaaataatgaagatgaagacattgaaaaatcagcattggattccgccctcaaacaatccacatcttatcgtagagaaattaagcctaagaatataaaggctatctattacacacaaaaagttgatgagagaaatataatgtgtggatggaatggaaaggattcagtgaatgtagtaaaagcatcaaaaatgaacaaggacaacatccaagatttgattacaaagaacttgaacgtgctaatggtaattgacaacaatgatgaaagttcaattagagcactaattggagacaaaatgttgttctgcgaggcaaactgggttgattgtaacactcatgattatgaattaagcttttggacatcagcattgatcacaacaaaaagccgaagttatgaacataaaccttgcaaaattcaacctaaagatgagatctttgaagatgccgattcctttttcagcgatgagaaagttgttttaacaactgcaggaatatccagagataatgttaatttttactggttgtttaccttctttttgggttggattctttttgaatgggctgtcatagtagatttaggttcaatctttttgtataacattaagaaaagatggacagttcttctaataattccaactgttttccagttaatggtgaatggaataataacgtcaattgtctcaataacagtgttcttttgcgggagcatgaagaatacgttggtaactgcaacagacatagtagaagggatcaatcttggacactggaaaaggactgccatggtgacactaatggtgagtgggtttttcaagaatgaatttctgtctctgctaatgattctcaactttacattaaattggactcactttgttccaattttgatgtgcctcccccacttcctgggcttacctaacccttggatatggctaggagttttggttttagctctaattggcttaacaaatgggaaactcgagctggatttccaaaacaaattggtacccttacctcagaagaaatttgaaactcaattgcaattaggcaaagtttactggacagcctctggaattgaagtggagattagagaagaaattagaatggcaaaatatgattaccctttgctagctctttacctgactttagttttttcagcttctttaattcactggtcttttggaattacaacgttgatgctgggtggttctctatttaacctaagagacaaatcgaaagggctaattccgatgccagaattggaagaagttcatgatccacctgaaaaattgaaagatggtttctattccattagtgtggctggactctgctggaaatatcaaattggaattggctatgttcacaatggcactctcaccacccaataccacgtcacttgtggccgagatctttggtggaagggtaaaagttactctccagttgaagagaatgttgtctctgactatgcttgttactttggtccgtggtctttcccgaaattgcaagagggctcagaatttaccataatgatgagatggaagaacattgctttgaagaccatggggaaaattacaggtaattattacgcaattccaacagagaagatcccaaaaggacagtcaggaacccccatattccaagagattaatggaacccttaaaccagtggcattagctggcaactccatcgtatttggaggtgaaagtgtccaggtgggtgagaacccttcctttgctcctcacttggacggtaaaattaaacagttgctcaacacaaggggatgctgggaagaatttgttctaaagtgtggagctggaaaaacaagaggtgtaatcaaggatacaatccagcatgctactaggatgggagtgaaggtgcttgtcttagttccaaccagagttgttgctaatgaagcttacaatgtgctcaaggatgtagggactgtgggtatacaaacgtcaacatataggaatgatgttggattaatgcatacaatcatgtgtcactcaacatttgcaagaagaattatgagaaagggaaagaggattctgagaaattggcaactcattattgttgatgaatcccacttctgcaatcctgagaccctagctctccacaatcttttcatgcgtgatctccgttcaccaacacccacttactcagtaatgtacttgacagccacaggttacacatcctatgattcaaactccaatttctttgtacacgaccatcctgtcgcatcgaaaaatgattttttggaaatcataaagcaaaacaaagaaaagaaaattgtatattttgtagctagtggacctgaagcaaatgaaattgctgggaaattaagggcagagattcaaaacataataatagttactagacagactttcaacaacacctatgaggctgcgaagaccatggaacagggtttgattttgactaccaatatcagtgaaatgggtgcaaactacaacgctgacattgttatggacccattagaggagataataccagtcttaggtgaagagggagttcaattggaaaaaacagtttgcacaagggcttctaaaattcaaagaaggggcagagttggaaggtcaaaaccaggagactattattatttagctgtgaatgaaggacaaataaaccaacaaatgcaccaccaacaagacatagtctgggctgaggctgaaatgtgctccaacttgatgggtgagatctgggaaccagaaaactttcaaggatctgaacccccggctcccattaactattacttgacacctcaaaaattggcgaccattgtcaacaagactgaaatggaaaatggatggacatactacacctcataccaccttactgatgattatggcaattccataccatacaatgttactgacccccaactccactacactcctaaccactgcccgaagtgtactggtctccacttcccagtttgggatgaaagaaaccatgatatgttggtcagttgtggtagggacttggacaacaacgatgttaacacaaggacaaggcaaaatgttggggtaatacaacctttagtacaaagagtctttagtggcattaggatgcaatcatcaggagagggttgtgaattgttctcaattttatttggggttcaatgttatggatggatgacttactttgacatgccagcgtcttggatagctttggctcaccaagctttgccgccacaatggagggagactatcaccccaatgaagttactctttatcctttttggcttcatgttaaaggttgtttatgacaaaataatggtaaataaacacttggtttacaactatgctccatacaaaggacattcacaaatgctaatgtttttgactgtagcatctaccatgttacaaaacgaggctctcaaaattatgtcctatcccatctggcaaattctttttgtggtcttcattacagtcatagttgtggaaacagtttgtggtataacacagagggagaagtcaactggtgaagtcactcaactagtaaccataggtgcagtgatcttcattatctattacatactggctgatggtgaaatactgaccttaatcaagaaactaataaaagtcaaaatacaacaaattgagaataactatgaagtcccgcaacaaccaattgaggatacccggattagaacttggagtctgtttgacagaccgccagtttacctttatttcacccttcatccagttatcatccaactggctaggtcaacttcagttaaggcattaattcaatttgttgataatgtgaaattaaggaaaacccctgtaaatatgccccaacccacagtttatttcatagtagctgtgtttataagtatattcaatttttattattatagttttcctcatttagtagcttcaattataccttctattctactttattgtgttatttactgtgcacattatactgatatttttaagaggtttgtagatactaatcatgagttaggcaatagtaataatcaacatataccttattctgatcctgcttatagtgaaatttatagagttttagttatagttatagagataacatatttgttagtttataaaactttaactttggattcggtgttggtagttttacatatgacttcaccatggattaggggacctataggagagggattaaacaattatggcgtagtcatattagctatgagcatgaagcatttgatgataccccaatctatagtggcaattacagcagtagttttagaccatttgaagacaacacaaagatttaggagttcaatctttaccactcaaattctaaataggatggtggaacattatcaggaccttgaatggagagggaggcagtataaattcactcttaataagttaaacaaacatgacttcctccaattcaaaggagaaaatgtgtatgaattggagaataaagatgattttccttcaagaggttttgccaagatggactggatgatcaaatctacccttttccaaccccgaggttttgtagtcgatggaggttgtggagctgggggcttttcagccaggatgtgttttgagaaaccagttgccaagatcctgggctataccattggaaaagataaacatcatacacctgatttgaacggtaaaaaggtctacaaaaaatttaattgggaaattggagacttatttaaaaagagaattagatgtgacacatttgtcatggacattggagaatctcatcccaatcaagagattgaagccataggagatctaaaaaggttgaattggtttaaagaaaatgtggattgtaagaattggtgcattaaaataatggtaccaactcatgaacaggtgctacatgctctcccaaaaggttccacattaattcgaaacccttggagcagaaattctaccttggaaatgtattgtgttccagggtcgaatgaaccagggagaatggttagtaatgtgattaaagttctaaatcaaagaattaacagaacaagctggcagggaagtatcatgaaaaaactgtactatccagaagatgaagaacaagttggttcaactaaggttaactacatcattgagaaggaaaagttgcaaaattttacgttgcaagaagaacgtagagtttttaatcactggaaatgtctcggtagtgttgaagcctcaaggaagggaagttctggtcaaaactacaactcaataatcacagcaataactagtggattgaggaaagtagtaccctctattgaacattggatgttaacatcaacaaaacctgaagacactttttccaccttcctaaggaaagttgatcaaccaccccaacctttgggtaactacaaaagtgaatttcaagagaagttcaaatgggttcaacaatggtacaaatcaaaaaacaagcatggtaggatactaactaatgaggaagttatttcaaaatttaagagtgatggtgctctcggctttaggtgccaacattatggatccatacaagaagcacttgaaaatccaaatttctttaaagaccttgaagctgaagaaataaatcaccttcatggaaaatgtactagaggagtgtttgatgtgatagggaagaaagaaaagaaagatttgtatggtaagcctaagggctcaagactcatcatgtatctggacctggttgaaagattcttggaacacaaatacctgggttttttgaattcagatcattggtgtcacccagaaaatttgccctcaggagtgtctgctgttagtccttatgagtaccctaggatgattgtggagaaatgcaaaattgatccacgttcggacttgatggaaaactgggtgatccaggacgacacagctggttgggatactagattacatgatgatgttttggagtgtgaacaatcttttctttgcgattttgcagaaagtgaagaacatatcaaacatatcttaagaatctataaaaattacaggaaccccatgatcaaattaacagatgattctggaacaagagacctgatcttgattgggaaaggccagagatgctcaggaacagtggtaacatattcaatgaacacaataacaaacacagtggttcaaatgatgaggatgcaggaagttcttgaactcagtaatgaagaatgtcttcacaaaatgatggttagtggtgatgattgcctgctagtccttaaaccggaagaagctattaaagtctcaaaaagccttaaattcatcaattcaacaggattcataaggaaggacgttccaagacacgtgccatcaccagtagtgaaagattggaaaaatataagtttttgttcccatggaatagctaaaggaaggatgcaaaatggtgaatatctttggaccctgggcaaaaatgaggctgagataattggaaaagctcagctccagattggagcttttggagatgagataaatgaacaatcccaggctaaagcaatggctctatacttattgctgacttttcccatgaggagagatatcagattgatagccaaagcaattatggcatgttgccaggaaggcctcgttccgatggggaaggttaaagagcctttgatttggggcgaaccatggctggacagcatggacatagtcaacatcatcaataagatctatgggactaatttttatactctagaagaagtaccatatgttcgccactccttggacatggagcgtggttccacaattcacaccaatgagagatcaaattggaaaaagtttctccttgagaaaatggttccagatctaagtaggagaaataatacagctccaaacatgaattggttggttaggaatggaaacaggggtaatcttttagtttaa

SEQ ID NO: 11548 - DNA, 1410 bp, unidentified
  misc_feature 1..1410: note = Synthetic
  source 1..1410: mol_type = other DNA
atgaatccaaaccaaaagataataaccattggttcggtctgtatgacaattggaatggctaacttaatattacaaattggaaacataatctcaatatggattagccactcaattcaacttgggaatcaaaatcagattgaaacatgcaatcaaagcgtcattacttatgaaaacaacacttgggtaaatcagacatatgttaacatcagcaacaccaactttgctgctggacagtcagtggtttccgtgaaattagcgggcaattcctctctctgccctgttagtggatgggctatatacagtaaagacaacagtgtaagaatcggttccaagggggatgtgtttgtcataagggaaccattcatatcatgctcccccttggaatgcagaaccttcttcttgactcaaggggccttgctaaatgacaaacattccaatggaaccattaaagacaggagcccatatcgaaccctaatgagctgtcctattggtgaagttccctctccatacaactcaagatttgagtcagtcgcttggtcagcaagtgcttgtcatgatggcatcaattggctaacaattggaatttctggcccagacaatggggcagtggctgtgttaaagtacaacggcataataacagacactatcaagagttggagaaacaatatattgagaacacaagagtctgaatgtgcatgtgtaaatggttcttgctttactgtaatgaccgatggaccaagtaatggacaggcctcatacaagatcttcagaatagaaaagggaaagatagtcaaatcagtcgaaatgaatgcccctaattatcactatgaggaatgctcctgttatcctgattctagtgaaatcacatgtgtgtgcagggataactggcatggctcgaatcgaccgtgggtgtctttcaaccagaatctggaatatcagataggatacatatgcagtgggattttcggagacaatccacgccctaatgataagacaggcagttgtggtccagtatcgtctaatggagcaaatggagtaaaagggttttcattcaaatacggcaatggtgtttggatagggagaactaaaagcattagttcaagaaacggttttgagatgatttgggatccgaacggatggactgggacagacaataacttctcaataaagcaagatatcgtaggaataaatgagtggtcaggatatagcgggagttttgttcagcatccagaactaacagggctggattgtataagaccttgcttctgggttgaactaatcagagggcgacccaaagagaacacaatctggactagcgggagcagcatatccttttgtggtgtaaacagtgacactgtgggttggtcttggccagacggtgctgagttgccatttaccattgacaagtaa

SEQ ID NO: 11549 - DNA, 42 bp, unidentified; identical to SEQ ID NO: 2468
  source 1..42: mol_type = other DNA
  misc_feature 1..42: note = Synthetic

SEQ ID NO: 11550 - DNA, 39 bp, unidentified; identical to SEQ ID NO: 2469
  misc_feature 1..39: note = Synthetic
  source 1..39: mol_type = other DNA

SEQ ID NO: 11551 - DNA, 39 bp, unidentified; identical to SEQ ID NO: 2470
  source 1..39: mol_type = other DNA
  misc_feature 1..39: note = Synthetic

SEQ ID NO: 11552 - DNA, 10290 bp, unidentified
  misc_feature 1..10290: note = Synthetic
  source 1..10290: mol_type = other DNA
atgaaaaacccaaaaagagccggtagcagccggcttgtcaatatgctaagacgcggtgcagcccgtgtcatccctccaggaggagggctcaagaggctgcctgtaggattgctgttgggtcggggtccgatcaaaatgatcctggccatactggcattcctacgatttacagcaataaaaccgtccactggcctcatcaacagatggggaaaagtgggcaaaaaagaggccatcaaaatcctcacaaaattcaaggctgacgtgggcaccatgctgcgtatcatcaacaatcggaagacaaaaaagagaggagtcgaaactggaattgtgttcctggcattgctggtgtctattgttgctgtggaagtcacaaaaaagggggacacctattacatgtttgcggacaagaaggacgccggaaaggtggtgacctttgagactgaatctggacccaaccgttgctccatccaagcaatggacattggacatatgtgtccagctacaatgagctatgaatgtcccgtgctggaaccacagtatgagccagaggatgtcgactgttggtgcaactcgacagcagcatggattgtgtatggcacatgcacccacaagacaacgggagagacaagacgttccagacgttcaatcaccctgccatctcatgcctcacaaaagttggagaccagatcatcgacgtggcttgaatcccgcgaatactccaaatatctaataaaggtggaaaactggatcctccgcaatccaggatatgcgttggtggctgcagtgattggatggactctgggcagcagtcgcagccagaagatcatctttgtcactctgctcatgttggtagcccccgcatacagcatcagatgcattggaattggaaacagagacttcattgagggaatgtccggtggcacctgggtggacattgtcctggaacatggtggttgtgtgacagtaatgtcaaacgacaaacccacattggactttgaactggtgacaacgaccgcaagtaacatggctgaggtcaggtcctactgctatgaagctaacatatccgagatggcatcggacagcaggtgccccacacagggggaagcttatcttgacaaaatggccgactcccagtttgtgtgcaagcgtgggtacgttgacaggggctggggaaacggatgtggactctttggaaaaggaagcattgtcacttgcgctaagttcacgtgtgtgaaaaagctcacagggaaaagcattcaaccggagaatctcgagtaccgggtccttgtttcggtgcacgcttcccaacatggaggaatgattaacaatgacaccaatcaccaacacgacaaggagaacagagcgcgcattgatatcacagctagcgctccccgtgttgaggtggaacttggctcctttggatccttctcgatggagtgtgaaccccggtcaggattgaactttggtgacctgtattacctcaccatgaacaacaagcattggctggttaatagagattggtttcacgatctttccttgccatggcatacaggagccacatcaaacaatcatcactggaacaacaaggaggcgctggtagaattcagagaagcccacgcaaagaagcagacggctgtggtcctgggaagtcaggaaggagctgttcacgcagcactggccggcgcactggaggctgagtctgatggacacaaagcgactatctactctggacacttgaagtgtcgcttgaagctagacaaactgcgcctgaagggaatgtcatatgcactctgcacaggagcattcaccttcgctcgcaccccctctgaaacaattcacggcaccgccacagtggagctgcaatatgcaggtgaagatgggccgtgcaaagttcccatagtaattaccagtgacaccaatagcatggcctcgacaggcaggctgatcacagcgaatccggtggtcacggaaagtggagcaaactcaaagatgatggtcgagattgaccctccgtttggtgattcttacattattgtgggcactggcacaacaaaaattacccaccattggcacagagccggtagttcaattggacgtgcatttgaggctaccatgagaggagcaaaacggatggcggtcctcggcgacaccgcttgggactttggctctgttgggggcatgttcaactccgttggaaagtttgtccaccaggtgtttggatcagcatttaaggcattgtttggaggcatgtcctggttcacacagctcctgataggatttctgctcatatggatgggtttgaacgcacgcggtggaaccgtggccatgagcttcatgggcattggggctatgctgattttcctagccacctcggtgtcaggagacacaggatgctcggttgacatatccagaagggaaatgcggtgcgggagcggcatattcgtgtacaatgacgttgacgcatggcgaagccgctacaaataccatcctgaaacccccagagctttggccgctgccgtgaaaacggcttgggaagaagggacctgtggcattacctcagtgagcagaatggaaaacctgatgtggagctctgtggctggagagttgaatgcaatccttgaggacaattcagtgccattgacagtcgtcgttggcgagccaaaatatccactgtacaatgctccaaagaggctgaaaccaccagcatcagagttaccgcaggggtggaagtcctggggaaagtcatactttgtctcagccgcaaaaaacaacaactcctttgtggtagatggtgacaccatgaaggaatgcccaagacagaagcgagcatggaacagcttgagaatagaggatcatgggttcggagtcttccacactagcatctggctgaaattccatgaggacaactccaccgaatgtgacacagctatcataggaacggcggttcgcgggaaggaagccgttcatagtgacttgggctactggatagagagtgagcgcaatgacacatggaggctctctcgagcgcacctgatcgaagcaaagacatgtgaatggccacggtcgcacacactgtggacggacggagtggaagagagcgagctgatcattccacgtggcttagccggtcctttcagccatcataacacgcgtgctggctacaagactcagaataaaggtccctggcatttaggtgatgttgaaattcagttcgccacgtgccccggaacaaccgtggtccaggaccaagagtgcagggacaggggcgcttctctacgcacgaccacagctagtggaagggtaatcaatgaatggtgctgcaggtcgtgcaccatgcctccactcagtttcaagacaaaagatggatgttggtatgcaatggagatacgtcctgtgaaagaacaagagtcaaacctcgtgcgatcgcacgtcactgccggaagcacagaccacatggaccatttctctctcggattagtagtggtcatgttgatggtgcaagaaggtatgaagaagagaatgacatcaaaagcaataatcacctcagcggcctttctcctggcggttatgatagtgggaggtttcacgtaccaggattttgggaggctggtggtattggtgggtgctgcatttgctgagatgaacactggaggtgacgttgcgcacctggcgctggtggcagcgtttaaagtgaggccagcgatgctggtctcattcatgttcagagccttgtggacccccagggagtcactgcttttagctctggctgcctgcctcctgcaggtgtcagtgacaccactggatcattccatcatgatcgtggttgatgggattgcgctgtcctggttgtgtctgaaagccatcttggtgccgcgtaccccaaacatagcccttcctcttctcgctatgctgtcacccatgctccaaggtaccaccattgtggcatggcgagctatgatggcggccctggctgtcataaccttggcttccatgaagcatggaaggggtgtaaaaaagacgtttccctacaccatcggatgcatccttggcagcatgggcttagttgaaaacttggggttggttggcctcctcttgttgacagcctcaaaaaagaggagttggcctccgagtgaggtgatgacggctgtcggactgatctgtgcaattgtgggcggactaaccaagaccgacattgacatggcgggacccatggcagccataggactgctggtggtgagctatgtggtttctggcaagagtgtggacatgtacattgaaaaggtgtgtgacatatcatgggacaaggacgctgaaataacaggcacaagtccgcggctggatgtggctctcgacgacagtggagatttctcacttatccaggatgacgggccccccactcgagagattgtgttgaaggtgtttctgatgtgtgtttgcggtgtcagccccatagccatcccctttgcagccgctgcttggttcgtgtacattaaatcagggaaaagaagcggcgccatgtgggacattccatccccaagagaagtgaaaaaaggggaaacaacggctggagtgtacagaatcatgacgcgtaaattgctgggcagcacacaggtgggagccggagtaatgcatgaaggtgtttttcacacaatgtggcacgtcacaaaaggttcggcccttcggagtggtgagggacgcctagatccatactggggaaacgtgaagcaggatttgatctcttactgcggaccatggaaactggatgggaaatgggacggcgtgtcggaagtccaactgatagcggtcgccccaggtgagcgcgccagaaatgtgcagacaaaaccaggagtgttcaagaccactgatggggaaatcggggccttggcccttgacttcccaggcggaagttcaggctccccgataattgacaaaaatggacatgtaattggcctgtatggaaatggtgtcgtggtcaagagtggaagctacgtgagtgccatcatgcagacagagaagatggaggaacccgcagttgactgctttgaggaggacatgctgagaaaaaagaagctgacggtgctcgacctccatccaggagctggaaaaactcgaagagtgctccctcagatcgtcaaggctgcaattaagaaacgcctacgcacggtaatcctggcacccacccgagtggtggcagctgagatggctgaggcactaaaagaccttccaataaggtacatgactccggcagtttcagccacccatgatggcaatgagattgttgaccttatgtgccacgccacttttacatcaaggctaatgcaaccaattagggtgcctaattacaatctatatataatggatgaggcccacttcacagatcctgcaagcatcgctgcaagagggtacatagcaacaagagtggacatgggagacgccgcggccatcttcatgacggccacccctcctggcagcactgaagctttcccggattcaaacgcccccatcacagatgttgaaacagaggttcctgacaaggcgtggaattctggatttgaatggatcactgattacccagggaaaaccgtttggtttgtccctagtgtcagaatgggcaatgagatctcggcctgcctcacaaaagccggcaaatcggttatccaactcagccggaaaacctttgaaacagagtaccagaagacaaagaatggtgagtgggactttgtcgtgaccactgacatctcagaaatgggagccaacttcaaggccgacagagtcatagactcacggaaatgcttgaagccagtgattctggatgacatggaagagagagttgttcttgccgggccgatggcagtaacaccatccagcgcagctcaacgcagaggaagaattggaagaaaccccaacaaaactggagatgagttctattacggggggggctgtgccgcaacggatgatgaccatgctcattgggtagaggctaggatgctgcttgacaacatctacctccaggacaacctcgttgcatctctgtacaagccagaacaaggaaaggtctcggcaatagaaggggagttcaaactgagaggagaacagaggaaaaccttcgtggagctgatgaagagaggggacttgccagtgtggttgtcatatcaagtggcggcctccggactcagctatactgaccggcgctggtgctttgatggaaaaaacaacaacaccatcctggaggactgcgtccccgtcgaggtgtggacaaaatttggagagaaaaagattctgaagcccagatggatggacgctcggatctgctctgatcatgcctctttgaagtctttcaaggagtttgctgcaggaaagagaacaatagccactggcttaattgaggcttttgggatgcttcccgggcacatgactgagagattccaggaggccgtcgacaatttggccgtgttgatgagggccgaggcaggctctagggcacacagaatggctgcagcacagctccctgagacaatggaaaccatcctgctcctcagcctgctggcattcgtgtcacttggtgtattttttgtactgatgagggcaaaagggttaggaaaaatggggtccggcatgatcgtgctggcaggaagtggctggctcatgtggatgtctgaggtggaaccagcccgcatagcttgtgtggtgatcatagtgtttctgctaatggtcgttctgattccggaaccggagaagcagcgctctccccaggacaatcagctggctctaattatcttgatcgcgacgggcctcatcacgctcatcgcggccaatgagctgggttggttagaaagaacaaagagtgacctcaccaggctgttttggagagaacacgctgagccaacaggagggagagggttttccttctcgctggacattgacctgcggccggcatcggcctgggcaatatatgccgctatgacaaccctgatcacaccgacagtccaacacgctgtgaccacatcgtacaacaactactctctcatggctatggccactcaggccggagttctttttggcatgggacggggggtgcctttttacaaatgggactttggcgtgccactccttatgctgggctgctactcacaacttaccccactcaccctgatcgtggctctcgtgatgctagccgctcactatctctatctcatccccgggctccaggcaacggccgccagggccgcccaacgaaggacggctgctggaataatgaaaaacccagtggtggatggaattgtggtaactgacatagacccaatccaaatcgatccaaatgtcgaaaagaagatgggccaggtcatgctcatctttgtggctttggcgagcgcggttctcatgagaacggcatggggttggggagaggctggtgcccttgcatcggcagcagctgccaccctatgggaaggggctcccaacaagtactggaattcatcaacggctacatccttgtgcaacatatttcggggaagttatctggcaggtccctccctcatctacaccgtcacacgcaatgcaggtatcatgaagaaaaggggcggtggaaatggagaaacggtgggcgagaaatggaaggagcgcttgaatcggatgaccgcgcttgaattctacgcctacaagcggtcaggaataactgaagtgtgcagagaacccgccagaagagccttgaaggatggagtcgtcacaggaggacacgctgtctcccgcggaagcgcaaagctgcgatggatggtggaacgtggccacgtcaatctagtgggacgcgttgtcgacctcggatgtggaaggggtggctggagttactacgccgcatctcaaaagcaagtcctcgaggtgagaggctacacaaaagggggagcgggccacgaggagcccatgaatgtccaaagttatggttggaacatagtgcgactcaagagtggagtggacgttttttatctaccatcagaaccatgtgacacgctgctctgtgacattggagagtcatcctcgagcccagcagtggaagaagcccggactctgagagtgctcgggatggttgaaacctggctggaacggggcgtaaagaacttctgcatcaaagtgctctgcccgtacaccagtgccatgattgagcggctggaagccctccagcgtcgctacggaggaggcctggtgagggttccactctccagaaattccacccacgaaatgtactgggtctctggagcaaaatcaaacatcatcaggagtgtgaatgccaccagccagctgctcatgcacagaatggacatccccacgcggaaaacaaagtttgaagaagacgtcaatctggggaccggaaccagggcagttgaaagcagagctgaccctcccgacatgaaaaaactaggcagccggattgagcggttgagaaaggaatatggatccacttggcactacgatgaaaaccacccctacaggacatggcattaccacggcagttatgaggctgacacgcaaggctccgcctcctcaatggtcaacggcgtggtgcgtctcctctcaaaaccatgggatgcattgagctcggtcaccaacattgctatgacggacacaactccgtttggacagcagcgggtgttcaaggagaaagtggacacccggactccagaccccaagcagggcacgcaaagagtcatggccataacatcacaatggctgtgggaccgcctagcaagaaacaagacccctcggatgtgcacgcgacaggaattcataaacaaggtcaacagtcacgcggcgttgggacccgtttttagagaacagcagggatggggttcagcggccgaagcggtggtagatcctaggttttgggagctcgttgacaatgaaagagaagcccatttgagaggggagtgcttgacctgtgtctacaacatgatggggaaaagagaaaagaagctcggtgaattcgggaaggcaaaaggcagcagagccatttggtacatgtggctgggagcccgcttcctcgagttcgaggccctgggcttcctcaatgaagaccactggttaagcagagagaactctggagggggagttgagggcttgggcctccaaaaacttggatacatccttgaagagatcagcaggaggccaggaggcaaaatgtatgccgatgacacggctggctgggacacccgcatcacgaaatgcgacctagaaaatgaggcgcgcattttggaaaaaatggacgggatccacaaaaaactcgcacgggccgtcatcgagttgacatacaagcataaggttgtgagagtcttgagaccagcaccacaagggaaggtcgttatggacatcatctccaggccagaccaaagggggagtgggcaggtggttacttatgccctcaacacctatacaaacttggtggtgcagctgatccgtaacatggaagcagaggctgtcatcaatgaaagagacatggaggagctccaaaacccatggaaagtcatcaattggctagaaggaaatggatgggacagactccgctcgatggcagtgagtggagatgactgtgtcgtgaaaccaatggatgataggttcgcctatgcactgaatttcctcaatgacatgggcaaggtcagaaaagatgtccaggaatggaagccctcgccggggtggacaaactgggaagaagtgcccttttgctcccaccacttcaacaagctcccgatgaaggatggaagaacaataatagttccctgccggcaccaagatgagttgataggcagggctagagtttctccaggaaaaggctggtcactcagtgaaacagcatgcttgggcaagtcttatgcccagatgtggctactgttgtactttcacaggagagatctccgactcatggcaaacgcaatctgctctgctgtaccggtgagttgggtgcccacggggagaacaacctggtccatccatgggcgtggagagtggatgacaacagaggacatgctagaggtatggaacagagtgtggatcatagagaatgagtacatggaggacaagacccctgtcacagagtggaccgatgttccatacttgggaaagagagaagacttgtggtgcggctcccttattggacacaggccaagaagcacatgggcagagaacatctgggctgccatttatcaagtgcgccgagcaatcggcgaaactgaagaatatagagactacatgagcacacaggtccgctatggctcggaggaagggccaagcgctggtgtgttgtaa

SEQ ID NO: 11553 - DNA, 33 bp, unidentified; identical to SEQ ID NO: 2472
  source 1..33: mol_type = other DNA
  misc_feature 1..33: note = Synthetic

SEQ ID NO: 11554 - DNA, 2181 bp, unidentified
  misc_feature 1..2181: note = Synthetic
  source 1..2181: mol_type = other DNA
atgaattcgttacaatctctgtgtgtgttgtgcgctaggcttaatgaatgtgctttggaccttgaatgtttaaagttttgtgatcctgtaatagtattgtctgatatggcaaattttaaaaagaatgggattgtgattctgcatttatatcaaactttttttgaaggtatcaaagaacaaaatcttctttgtgcgtcagctttgacggtttatatgcaggtactgctaaaagctatgtatgaacaggtgcttcttttggatgcagcgttggaaagctttatggtagaccaggatagaaaaaaatattttgaaaaggtgttgtgtttgaggcgttgtgctgagcacttgtcaataaacatttcattgaataacggtgttgagtttatcgtgcaattatctacgctaaatgatatagaacaattaatcagtaagatcaactccgtatatgctttacttttgccccaagaagggttgcagatttgcggaaaaattatagacttgttaactatcatgtgtggtgcatgtatggttgcgaaaccggagagttatctcgaaactaagacttgcatgaagtgttacgaagaattgactttgactccaaaccaaggaaaatcacttcgaagaagattacatgggaagttttgtaatcatttgaccgaacaaaaagctttttttaatattgaaaaaaacattgagacgatagagaaagacttaggggaggctattttgaactatgggactgttcagtctgttgcgactgaaatcaaaaagatttttaagcagcagcgttcagccgagtcgttgcatgttagtgatgctgagaaaactctgaaaaagtataatatttttagcaaggtacctgacgtgatatattctttaagtgagtttacgtattggtctaaaatatcggaaacgatagtgagaaatgtcgctattacgcttcagcagttaaatagttgtcatacgttgtataagcaattacagaatgatgtcagtctttatctttacggtgaagtgtctgaagacttcttggctttgagtgaaaatttgttaacgcatgacgagcgcttgtacgttggctccatttatgtgtctccttcgaggctgatagatcttgtcactggcctgagcattaaaaatctcgaagaaagtccaatatttaaaagattggctgaggaagatgaggttcaacataaaattaagagtctcttgcatgacattcgggatccacagacgacagaaacaccgggaaggcttaacacgatcaattgcatgcttcaaactcataatcttcagcaggaagtcttggcccggaaaaaggcgtattttcaaaaggtttctgaatctggttataatagggtgatggcatgtattcgagagcaagaatcactcataaataaggtagtgagtgtgaatgtgtatgggaattttatttttgaggccttatcgaagattatgaacggtttcgttctcagaaaaatgtacttggatggctctttccgtgtagatagctgtacatacgatgaacatctttatattaaaaacaatctgatgccgaagaagctccctttggagctcttgccggatttaagtgagattatgtacacattgttaacgggtccgttatcggattttcataaatctgcctatccacttccggcgaacatctcaatggcgtatggttgcgaccacgcggagatgttaccgcatatgaaggaagatttagctagatgcatagagggcactattcatcctagtgtgtggatggtgtgcgaatacaatgaattttttaacttttccggtgtaactgatgtaaatgacatgcagaaaaaaatgtggaattttatcagagagttaacactttctgttgcactatataatgatgtttttggaaagcgattaaaaattgtgcgtatagatgaggagggggatttgagtggaaatgtcgttttgacatttaatcacgagtctcctttattatttcacactggtggtggcatgacaaagtttaaagacgtgtattcgctgttatattgtgatttgcaagctcagttgtcgagagagactgtagacgtgccggaaggagtaagttactctgttcgaacgcctaatctactagatctcgttagggaaaatgagcaagatggcagtattattcctggctgtctttttgatgaatag

SEQ ID NO: 11555 - DNA, 33 bp, unidentified; identical to SEQ ID NO: 2476
  source 1..33: mol_type = other DNA
  misc_feature 1..33: note = Synthetic

SEQ ID NO: 11556 - DNA, 24 bp, unidentified
  misc_feature 1..24: note = Synthetic
  source 1..24: mol_type = other DNA
atgactaagaaaaaccgattataa

SEQ ID NO: 11557 - DNA, 2181 bp, unidentified
  source 1..2181: mol_type = other DNA
  misc_feature 1..2181: note = Synthetic
atgaattcgttacaatctctgtgtgtgttgtgcgctaggcttaatgaatgtgctttggaccttgaatgtttaaagttttgtgatcctgtaatagtattgtctgatatggcaaatttcaaaaagaatgggattgtcattctgcatttatatcaaactttttttgaaggtatcaaagaacagaatcttctttgtgcgtcagctttgacggtttatatgcaggtgctgctaaaagctatgtatgaacaggtgcttcttttggatgcagcgttggaaagctttatggtagaccaggatagaaaaaaatattttgaaaaggtgttgtgtttgaaacgttgtgctgagcacttgtcaataaacatttcattaaataacggtgttgagtttatcgtgcaattatctacgctaaatgatatagaacaattaatcagtaagatcaactccgtatatgctttacttctgccccaagaagggttgcagatttgcggaaaaattatagacttgctaactatcatgtgtggcgcatgtatggttgcgaaaccggagagttatctcgaaaccaagacttgcatgaagtgttatgaagaattgactttgactccaaaccaaggaaaatcacttcggaaaagattacatggaaagttctgtaatcatttgaccgagcaaaaagctttttttaatattgaaaaaaatattgagacgatagaaaaagacttaggagaggccattttgaactatgggactattcagtctgttgtgactgaaatcaagaagatttttaagcagcagcgttcagccgaatcgttgcatgttagtgatgctgagaaaactctgaaaaagtataatatttttagcaaggtacctgacgtgatatattctttaagtgagtttacgtattggtctaaaatatcagaaacgatagtaagaaatgttgctattacgcttcagcagttaaatagttgtcacacgttgtataagcaattacagaatgatgttagtctttatctttacggtgaagtctctgaagacttcttggctttgagtgaaaatttgctcacgcatgacgagcgcttgtacgttggctctatttatgtgtctccttcgaggttgatagatcttgtcactggtctgagcattaaaaatctcgaggaaagtccaatatttaaaagattggctgaggaagatgaggttcaacataaaattaagagtctgttgcatgacattcgggatccacagacgacagaaacaccgggaaggctgaacacgatcaattgcatgcttcaaactcataatcttcagcaggaagtcttggctcggaaaaaggcgtattttcaaaaggtttctgaatctggttataatagggtgatggcatgtattcgagagcaggaatcactcatcaataaggtagtgagtgtgaacgtgtatgggaattttatttttgaggctttatcgaagattatgaacggtttcgttctcagaaaaatgtacttggatggctctattcgtgtagatagctgtacatacgatgaacatctttatattaaaaataatctgatgccgaagaagctccctttggagcttttgccggatttaagtgagattatgtacacattgttaacgggtccgttatcggattttcataaatctgcctatccacttccggcgaatatctcaatggcgtatggttgcgaccacgcagaaatgttaccgcatatgaaggaagatttagcgagatgcatagagggcactattcatcccagtgtgtggatggtgtgcgaatataatgagttttttaacttttccggtgtaactgatgtaaatgacatgcagaaaaaaatgtggaatttcatcagagagttaacactttctgttgcactatataatgatgttttcggaaagcgattaaaaattgtacgtatagatgaggaggaggatttgaatggaaatgtcgttttgacatttaatcacgagtctcctctattatttcacaccggtggtggcatgacaaagtttaaagacgtgtattcgctgttatattgtgatttgcaagctcagttgtcgagggagactgtagacgtgccggaaggagtaagttactctgttcgaacgcctaatctactagatctcgttagggagaatgagcaagatgagagtattattcctggctgtctttttgatgaatag

SEQ ID NO: 11558 - DNA, 39 bp, unidentified; identical to SEQ ID NO: 2479
  misc_feature 1..39: note = Synthetic
  source 1..39: mol_type = other DNA

SEQ ID NO: 11559 - DNA, 2208 bp, unidentified
  source 1..2208: mol_type = other DNA
  misc_feature 1..2208: note = Synthetic
atggctgccgatggttatcttccagattggctcgaggacactctctctgaaggaataagacagtggtggaagctcaaacctggcccaccaccaccaaagcccgcagagcggcataaggacgacagcaggggtcttgtgcttcctgggtacaagtacctcggacccttcaacggactcgacaagggagagccggtcaacgaggcagacgccgcggccctcgagcacgacaaagcctacgaccggcagctcgacagcggagacaacccgtacctcaagtacaaccacgccgacgcggagtttcaggagcgccttaaagaagatacgtcttttgggggcaacctcggacgagcagtcttccaggcgaaaaagagggttcttgaacctctgggcctggttgaggaacctgttaagacggctccgggaaaaaagaggccggtagagcactctcctgtggagccagactcctcctcgggaaccggaaaggcgggccagcagcctgcaagaaaaagattgaattttggtcagactggagacgcagactcagtacctgacccccagcctctcggacagccaccagcagccccctctggtctgggaactaatacgatggctacaggcagtggcgcaccaatggcagacaataacgagggcgccgacggagtgggtaattcctcgggaaattggcattgcgattccacatggatgggcgacagagtcatcaccaccagcacccgaacctgggccctgcccacctacaacaaccacctctacaaacaaatttccagccaatcaggagcctcgaacgacaatcactactttggctacagcaccccttgggggtattttgacttcaacagattccactgccacttttcaccacgtgactggcaaagactcatcaacaacaactggggattccgacccaagagactcaacttcaagctctttaacattcaagtcaaagaggtcacgcagaatgacggtacgacgacgattgccaataaccttaccagcacggttcaggtgtttactgactcggagtaccagctcccgtacgtcctcggctcggcgcatcaaggatgcctcccgccgttcccagcagacgtcttcatggtgccacagtatggatacctcaccctgaacaacgggagtcaggcagtaggacgctcttcattttactgcctggagtactttccttctcagatgctgcgtaccggaaacaactttaccttcagctacacttttgaggacgttcctttccacagcagctacgctcacagccagagtctggaccgtctcatgaatcctctcatcgaccagtacctgtattacttgagcagaacaaacactccaagtggaaccaccacgcagtcaaggcttcagttttctcaggccggagcgagtgacattcgggaccagtctaggaactggcttcctggaccctgttaccgccagcagcgagtatcaaagacatctgcggataacaacaacagtgaatactcgtggactggagctaccaagtaccacctcaatggcagagactctctggtgaatccgggcccggccatggcaagccacaaggacgatgaagaaaagttttttcctcagagcggggttctcatctttgggaagcaaggctcagagaaaacaaatgtggacattgaaaaggtcatgattacagacgaagaggaaatcaggacaaccaatcccgtggctacggagcagtatggttctgtatctaccaacctccagagaggcaacagacaagcagctaccgcagatgtcaacacacaaggcgttcttccaggcatggtctggcaggacagagatgtgtaccttcaggggcccatctgggcaaagattccacacacggacggacattttcacccctctcccctcatgggtggattcggacttaaacaccctcctccacagattctcatcaagaacaccccggtacctgcgaatccttcgaccaccttcagtgcggcaaagtttgcttccttcatcacacagtactccacgggacaggtcagcgtggagatcgagtgggagctgcagaaggaaaacagcaaacgctggaatcccgaaattcagtacacttccaactacaacaagtctgttaatgtggactttactgtggacactaatggcgtgtattcagagcctcgccccattggcaccagatacctgactcgtaatctgtaa

SEQ ID NO: 11560 - DNA, 24 bp, unidentified
  misc_feature 1..24: note = Synthetic
  source 1..24: mol_type = other DNA
atggcacaaagcgtccaacactag

SEQ ID NO: 11561 - DNA, 27 bp, unidentified
  misc_feature 1..27: note = Synthetic
  source 1..27: mol_type = other DNA
atgtcctactgccagaagttcatctga

SEQ ID NO: 11562 - DNA, 111 bp, unidentified
  misc_feature 1..111: note = Synthetic
  source 1..111: mol_type = other DNA
atgtggtcctcagtctctacatccatgtcatcatctctatttactcacaaaagactgtctacggggccctgttatttaaatccaccagaaacaagcgctatgatgctgtag

SEQ ID NO: 11563 - DNA, 111 bp, unidentified; identical to SEQ ID NO: 11562
  misc_feature 1..111: note = Synthetic
  source 1..111: mol_type = other DNA

SEQ ID NO: 11564 - DNA, 111 bp, unidentified; identical to SEQ ID NO: 11562
  misc_feature 1..111: note = Synthetic
  source 1..111: mol_type = other DNA

SEQ ID NO: 11565 - DNA, 30 bp, unidentified; identical to SEQ ID NO: 2488
  source 1..30: mol_type = other DNA
  misc_feature 1..30: note = Synthetic

SEQ ID NO: 11566 - DNA, 21 bp, unidentified
  misc_feature 1..21: note = Synthetic
  source 1..21: mol_type = other DNA
atgttacaaacgataatatag

SEQ ID NO: 11567 - DNA, 219 bp, unidentified
  source 1..219: mol_type = other DNA
  misc_feature 1..219: note = Synthetic
gtgataaaaatataccaggaagaaatgaaagatttaatgaccaaaatagattcaacaacgatataccaaagcctaaaccaagactacagcctaatcagccaccgaaacaagataataaatgcagagaagagaatggagattttatcaatattagattgtgtgcctacgagaaggaatattgcaatgacggatatctatctcctgcctattatatgttaa

SEQ ID NO: 11568 - DNA, 30 bp, unidentified; identical to SEQ ID NO: 2488
  misc_feature 1..30: note = Synthetic
  source 1..30: mol_type = other DNA

SEQ ID NO: 11569 - DNA, 21 bp, unidentified
  source 1..21: mol_type = other DNA
  misc_feature 1..21: note = Synthetic
atgttacaaacgataatatag

SEQ ID NO: 11570 - DNA, 177 bp, unidentified
  source 1..177: mol_type = other DNA
  misc_feature 1..177: note = Synthetic
atgaaagatttaatgaccaaaatagattcaacaacgatagaccacagcctaatcagccaccgagacaagataataaatacagagaagagaatggagattttatcaatattagattgtgtgcctacgagaaggaatattgcaatgacggatatctatctcctgcctattatatgttaa

SEQ ID NO: 11571 - DNA, 30 bp, unidentified; identical to SEQ ID NO: 2488
  source 1..30: mol_type = other DNA
  misc_feature 1..30: note = Synthetic

SEQ ID NO: 11572 - DNA, 21 bp, unidentified
  misc_feature 1..21: note = Synthetic
  source 1..21: mol_type = other DNA
atgttacaaacgataatatag

SEQ ID NO: 11573 - DNA, 231 bp, unidentified
  misc_feature 1..231: note = Synthetic
  source 1..231: mol_type = other DNA
atccaaccaagcgaggtaataaaaatataccaggaagaaatgaaagatttaatgacagaaatagattcaacaacgatggtaataatagaccaagactacagcctagcccaccaccaagacaagataataaatgcagagaagagaatggagattttatcaatattcgattgtgtgcctacgagaaggaatattgcaatgacggatatctatctcctgcctattatatgttaa

SEQ ID NO: 11574 - DNA, 30 bp, unidentified; identical to SEQ ID NO: 2488
  source 1..30: mol_type = other DNA
  misc_feature 1..30: note = Synthetic

SEQ ID NO: 11575 - DNA, 261 bp, unidentified
  misc_feature 1..261: note = Synthetic
  source 1..261: mol_type = other DNA
atgttacaaacgataatatatacaaaaatccaaccaaacgaggtgatagaaatataccaggaagaaatgaaagatttaatgatcaaaatagattcaacaacgatagaccaaggcctaaaccaagaccacagcctaatcagccaccgagacaagataataaatgcagagaagagaatggagattttatcaatattagattgtgtgcctacgagaaggaatattgcaatgacggatatctatctcctgcctattatatgttaa

SEQ ID NO: 11576 - DNA, 27 bp, unidentified
  misc_feature 1..27: note = Synthetic
  source 1..27: mol_type = other DNA
atgatgaaaacacctcacttttattag

SEQ ID NO: 11577 - DNA, 1404 bp, unidentified
  source 1..1404: mol_type = other DNA
  misc_feature 1..1404: note = Synthetic
atgaatccaaatcaaaagataatagcacttggctctgtttctataactattgcgacaatatgtttactcatgcagattgccatcttagcaacgactatgacactacatttcaatgaatgtaccaacccatcgaacaatcaagcagtgccatgtgaaccaatcataatagaaaggaacataacagagatagtgcatttgaataatactaccatagagaaggaaagttgtcctaaagtagcagaatacaagaattggtcaaaaccgcaatgtcaaattacagggttcgcccctttctccaaggacaactcaattaggctttctgcaggcggggatatttgggtgacaagagaaccttatgtatcgtgcggtcttggtaaatgttaccaatttgcacttgggcagggaaccactttgaacaacaaacactcaaatggcacaatacatgataggagtccccatagaacccttttaatgaacgagttgggtgttccatttcatttgggaaccaaacaagtgtgcatagcatggtccagctcaagctgccatgatgggaaggcatggttacatgtttgtgtcactggggatgatagaaatgcgactgctagcatcatttatgatgggatgcttaccgacagtattggttcatggtctaagaacatcctcagaactcaggagtcagaatgcgtttgcatcaatggaacttgtacagtagtaatgactgatggaagtgcatcaggaagggctgatactaaaatactattcattagagaagggaaaattgtccacattggtccactgtcaggaagtgctcagcatgtggaggaatgctcctgttacccccggtatccagaagttagatgtgtttgcagagacaattggaagggctccaatagacccgtgctatatataaatgtggcagattatagtgttgattctagttatgtgtgctcaggacttgttggcgacacaccaagaaatgacgatagctccagcagcagtaactgcagggatcctaataacgagagagggggcccaggagtgaaagggtgggcctttgacaatggaaatgatgtttggatgggacgaacaatcaagaaagattcgcgctctggttatgagactttcagggtcgttggtggttggactacggctaattccaagtcacaaataaataggcaagtcatagttgacagtgataactggtctgggtattctggtatattctctgttgaaggaaaaacctgcatcaacaggtgtttttatgtggagttgataagagggagaccacaggagaccagagtatggtggacttcaaatagcatcattgtattttgtggaacttcaggtacctatggaacaggctcatggcctgatggagcgaatatcaatttcatgtctatataa

SEQ ID NO: 11578 - DNA, 1398 bp, unidentified
  misc_feature 1..1398: note = Synthetic
  source 1..1398: mol_type = other DNA
atgaatccaaatcagaagattctatgcacttcagccactgctatcataataggcgcaatcgcagtactcattggaatggcaaacctaggattgaacataggactgcatctaaaaccgggctgcaattgctcacactcacaacctgaaacaaccaacacaagccaaacaataataaacaactattataatgaaacaaacatcaccaayatccaaatggaagagagaacaagcaggaatttcaataacttaactaaagggctctgtactataaattcatggcacatatatgggaaagacaatgcagtaagaattggagagagctcggatgttttagtcacaagagaaccctatgtttcatgcgacccagatgaatgcaggttctatgctctcagccaaggaacaacaatcagagggaaacactcaaacggaacaatacacgataggtcccagtatcgcgccctgataagctggccactatcatcaccgcccacagtgtacaacagcagggtggaatgcattgggtggtcaagtactagttgccatgatggcaaatccaggatgtcaatatgtatatcaggaccaaacaacaatgcatctgcagtagtatggtacaacagaaggcctgttgcagaaattaacacatgggcccgaaacatactaagaacacaggaatctgaatgtgtatgccacaacggcgtatgcccagtagtgttcaccgatgggtctgccactggacctgcagacacaagaatatactattttaaagaggggaaaatattgaaatgggagtctctgactggaactgctaagcatattgaagaatgctcatgttacggggaacgaacaggaattacctgcacatgcagggacaattggcagggctcaaatagaccagtgattcagatagacccagtagcaatgacacacactagtcaatatatatgcagtcctgttcttacagacaatccccgaccgaatgacccaaatataggtaagtgtaatgacccttatccaggtaataataacaatggagtcaagggattctcatacctggatggggctaacacttggctagggaggacaataagcacagcctcgaggtctggatacgagatgttaaaagtgccaaatgcattgacagatgatagatcaaagcccattcaaggtcagacaattgtattaaacgctgactggagtggttacagtggatctttcatggactattgggctgaaggggactgctatcgagcgtgtttttatgtggagttgatacgtggaagacccaaggaggataaagtgtggtggaccagcaatagtatagtatcgatgtgttccagtacagaattcctgggacaatggaactggcctgatggggctaaaatagagtacttcctctaa

SEQ ID NO: 11579 - DNA, 168 bp, unidentified; identical to SEQ ID NO: 2502
  misc_feature 1..168: note = Synthetic
  source 1..168: mol_type = other DNA

SEQ ID NO: 11580 - DNA, 2313 bp, unidentified
  source 1..2313: mol_type = other DNA
  misc_feature 1..2313: note = Synthetic
atgacgttggctaaaattgaactactaaagcagctgttaagggacaatgaagccaaaacggtgttgagacagacaacggtagaccaatacaacataataagaaaattcaatacatcaagaattgaaaagaacccttcattaagaatgaagtgggccatgtgttccaattttcccttagctctgaccaagggtgatatggcaaatcgaatccccttggaatacaagggaatacaacttaaaacaaatgctgaagacataggaactaaaggacaaatgtgttcaatagcagcagttacctggtggaatacatatgggcccataggggatactgaagggtttgaaaaggtctacgaaagcttttttctcagaaagatgagacttgacaatgccacttggggccgaataacctttggccctgttgagagagtaagaaaaagagtactactaaacccgctcaccaaggaaatgcccccagatgaagcgagcaatgtaataatggaaatattattccctaaagaagcaggaataccaagagaatctacttggatacatagagaactgataaaagaaaaaagagaaaaattgaagggaacgatgataactcccattgtactggcatacatgcttgagagagaactagttgcccgaagaaggttcctgccagtagcaggagcaacatcagcagagttcatagaaatgctacattgcttacaaggtgaaaattggagacaaatatatcatccaggagggaataaactaactgaatctagatctcaatcaatgattgtagcttgcaggaagataatcagaagatcaatagttgcatcaaacccactagagctagctgtagagattgcaaataagactgtgatagacactgaacctttaaaatcatgtctggcagccctggatggaggtgatgtagcctgtgacataataagagctgcattaggattaaaaattagacaaagacaaagatttgggagacttgaactaaagagaatatcaggaagaggattcaaaaatgatgaagagatattaatcggaaacggaacaatacaaaagattggaatatgggacggagaagaggaattccatgtaagatgtggcgaatgcagggggatattgaaaaaaagccaaatgagaatggaaaaactactgataaattcagccaaaaaggaggacatgaaagatttaataatcttatgcatggtattttctcaagacactaggatgttccaaggagtgagaggagagataaattttcttaatcgagcaggccaacttttatcccccatgtaccaactccaacgatactttctgaataggagcaatgacctttttgatcaatggggatatgaggaatcacctaaagcaagtgagctacatgggataaatgaattaatgaatgcatctgactatacattgaaaggggttgtagtaacaaaaaatgtgattgatgattttagttctactgaaacagaaaaagtatctataacaaaaaatcttagtttaataaaaaggactggggaagttataatgggagccaatgacgtaagtgaattagaatcacaagcacagctaatgataacgtatgatacacccaagatgtgggaaatgggaacaaccaaagaactggtacaaaacacttaccaatgggtgcttaaaaatttagtaacattgaaggctcagtttcttttgggaaaagaagacatgttccaatgggatgcatttgaagcatttgaaagcataatccctcagaagatggctggtcagtacagtggatttgcaagagcagtgctcaaacaaatgagagaccaagaggttatgaaaactgaccaattcataaaattgttgcctttctgtttttcgccaccaaaattaaggagcaatggagagccttatcaatttttgaggcttatgctgaaaggaggaggggaaaatttcatcgaagtaaggaaagggtcccccttgttctcctacaatccacaaacggaaatcctaactatatgcggcagaatgatgtcattaaaaggaaaaattgaggatgaagaaagaaatagatcaatggggaatgcagtactggcaggctttcttgttagtggcaaatatgaccctgatcttggagatttcaaaaccattgaggaacttgaaagactaaaaccgggagaaaaagccaacatcttactttaccaaggaaagcccgttaaagtagttaaaaggaaaagatatagtgctttatccaatgatatttcacaagggattaagagacaaagaatgacagttgagtccatggggtgggccttgagctaa

SEQ ID NO: 11581 - DNA, 60 bp, unidentified; identical to SEQ ID NO: 2504
  source 1..60: mol_type = other DNA
  misc_feature 1..60: note = Synthetic

SEQ ID NO: 11582 - DNA, 63 bp, unidentified; identical to SEQ ID NO: 2505
  misc_feature 1..63: note = Synthetic
  source 1..63: mol_type = other DNA

SEQ ID NO: 11583 - DNA, 60 bp, unidentified; identical to SEQ ID NO: 2506
  misc_feature 1..60: note = Synthetic
  source 1..60: mol_type = other DNA

SEQ ID NO: 11584 - DNA, 81 bp, unidentified; identical to SEQ ID NO: 2508
  source 1..81: mol_type = other DNA
  misc_feature 1..81: note = Synthetic

SEQ ID NO: 11585 - DNA, 93 bp, unidentified; identical to SEQ ID NO: 2509
  source 1..93: mol_type = other DNA
  misc_feature 1..93: note = Synthetic

SEQ ID NO: 11586 - DNA, 18 bp, unidentified
  misc_feature 1..18: note = Synthetic
  source 1..18: mol_type = other DNA
atgtatgcctgttcgtag

SEQ ID NO: 11587 - DNA, 60 bp, unidentified; identical to SEQ ID NO: 2511
  source 1..60: mol_type = other DNA
  misc_feature 1..60: note = Synthetic

SEQ ID NO: 11588 - DNA, 810 bp, unidentified
  misc_feature 1..810: note = Synthetic
  source 1..810: mol_type = other DNA
atgagtaaggtaatcaaaaagagagttgaaacttcaccaagacctacagcatctagcgattctctacagacttgtgcgggtgttatagagtatgcaaaatcgattagtaaatctaatgcaaaatgtatcgaatacgtcacactaaatgcttctcaatacgctaattgttcatctatctctataaaacttactgatagtttatctagtcaaatgacttccacttttattatgttggaaggagagactaaactttataaaaataaatctaaacaagatagaagtgatggatactttctaaaaataaaagttaccgcggctagtcctatgttgtatcaacttctagaagctgtctatggaaacattaagcacaaggaacgcattccaaattctttgcatagtcttttggtggaaactattacagagaaaacatttaaggatgaatccatcttcattaacaaattaaacggagccatggtagaatatgtttcgactggagaattatccattctcagatctatagaaggtgaactagaatcactcagtaaaagagaaagacaattagccaaggcaattatcacacctgtagttttctatagatccggaactgaaacaaaaattacatttgcacttaagaaactaatcattgatagagaagtggtggctaacgttatcggactctctggagatagtgaacgtgtatcaatgactgaaaatgtagaagaagatttggctcgtaatttgggacttgttgatatcgatgatgaatatgatgaagatagtgataaagaaaagccaatattcaatgtataa

SEQ ID NO: 11589 - DNA, 21 bp, unidentified
  source 1..21: mol_type = other DNA
  misc_feature 1..21: note = Synthetic
atgattttgtttcgtcgctaa

SEQ ID NO: 11590 - DNA, 21 bp, unidentified
  source 1..21: mol_type = other DNA
  misc_feature 1..21: note = Synthetic
atgcacaatttagcctattaa

SEQ ID NO: 11591 - DNA, 18 bp, unidentified
  source 1..18: mol_type = other DNA
  misc_feature 1..18: note = Synthetic
atgcagcgattcaagtga

SEQ ID NO: 11592 - DNA, 759 bp, unidentified
  source 1..759: mol_type = other DNA
  misc_feature 1..759: note = Synthetic
atgagtcttctaaccgaggtcgaaacgtacgttctctctatcattccatcaggccccctcaaagccgagatcgcacagagacttgaggatgtttttgcagggaagaacgcagatctcgaggctctcatggagtggataaagacaagaccaatcctgtcacctctgactaaggggattttagggtttgtgttcacgctcaccgtgcccagtgagcgaggactgcagcgtagacggtttgtccaaaacgccctaaatgggaatggagacccaaacaacatggacaaggcggttaaattatacaagaaactgaagagggaaatgacatttcatggagcaaaggaagttgcactcagttactcaactggtgcgcttgccagctgcatgggtctcatatacaacagaatggggactgtgaccgcagaaggggctcttggactagtatgtgccacttgtgagcagattgctgacgcacaacatcggtcccacaggcagatggcgactactactaacccactaattaggcatgagaatagaatggtactagccagcactacggctaaggctatggagcagatggctggatcaagtgaacaggcagcggaagccatggaagttgcaagtcaggctaggcaaatggtgcaggctatgagaacagttgggactcaccctaactccagtacaggtctaaaagatgatcttattgaaaatttgcaggcctaccagaaccggatgggagtgcaactgcagcggttcaagtga

SEQ ID NO: 11593 - DNA, 78 bp, unidentified; identical to SEQ ID NO: 2519
  misc_feature 1..78: note = Synthetic
  source 1..78: mol_type = other DNA

SEQ ID NO: 11594 - DNA, 759 bp, unidentified
  source 1..759: mol_type = other DNA
  misc_feature 1..759: note = Synthetic
atgagtcttctaaccgaggtcgaaacgtacgttctttctatcatcccgtcaggccccctcaaagccgagatcgcgcagagactggaaagtgtctttgcaggaaagaacacagatcttgaggctctcatggaatggctaaagacaagaccaatcttgtcacctctgactaagggaattttaggatttgtgttcacgctcaccgtgcccagtgagcgaggactgcagcgtagacgctttgtccaaaatgccctaaatgggaatggggacccgaacaacatggatagagcagttaaactatacaagaagctcaaaagagaaataacgttccatggggccaaggaggtgtcactaagctattcaactggtgcacttgccagttgcatgggcctcatatacaacaggatgggaacagtgaccacagaagctgcttttggtctagtgtgtgccacttgtgaacagattgctgattcacagcatcggtctcacagacagatggctactaccaccaatccactaatcaggcatgaaaacagaatggtgctggctagcactacggcaaaggctatggaacagatggctggatcgagtgaacaggcagcggaggccatggaggttgctaatcagactaggcagatggtacatgcaatgagaactattgggactcatcctagctccagtgctggtctgaaagatgaccttcttgaaaatttgcaggcctaccagaagcgaatgggagtgcagatgcagcgattcaagtga

SEQ ID NO: 11595 - DNA, 24 bp, unidentified
  source 1..24: mol_type = other DNA
  misc_feature 1..24: note = Synthetic
ttgaggctctcatggaatggctaa

SEQ ID NO: 11596 - DNA, 1188 bp, unidentified
  source 1..1188: mol_type = other DNA
  misc_feature 1..1188: note = Synthetic
atgattccctgtttaataaaaaataagcacgaacacaagtccaatccaaccatagcagcaatggccggatcacagatcaaaattcctcttccaaagccccctgattcagactctcaaagactaaatgcattccctgtaatcatggctcaagaaggtaaaggacgactcctcagacagatcagacttaggaaaatattatcaggggatccgtctgatcagcaaattacatttgtgaatacatatggattcatccgtgccactccagaaacatccgagttcatctctgaatcatcacaacagaaggtgactcctgtagtgacggcgtgcatgctgtccttcggtgctggaccagtcctagaagacccacaacatatgctgaaagctcttgatcagacagacatcagggttcggaagacagcgagtgataaagagcagatcttattcgagatcaaccgcatccccaatctattcaggcatcatcaaatatctgcggaccatctgattcaggccagctccgataaatatgtcaagtcaccagcaaagttgattgcaggagtaaattacatctactgtgtcacatttttatctgtgacagtttgttctgcctcactcaagtttcgagttgcacgcccattacttgctgcacgatctagattagtaagagcagttcagatggaagttttgcttcgagtaacttgcaaaaaggattcccaaatggcaaagagcatgctaagtgaccctgatggagaagggtgcattgcatccgtgtggttccacctgtgtaatctgtgcaaaggcaggaataaacttagaagttacgatgaaaattattttgcatctaagtgccgtaagatgaacctgacagtcagcataggagacatgtggggaccaaccattctagtccatgcaggcggtcacattccgacaactgcaaaaccttttttcaactcaagaggctgggtctgccaccccatccaccaatcatcaccatcgttggcgaagaccctgtggtcatctgggtgtgaaatcaaggctgccagtgctatcctccagggctcagactatgcatcacttgcaaaaactgatgacataatatattcaaagataaaagtcgataaagatgcggccaactataaaggagtatcctggagtccattcaggaagtctgcctcaatgagcaacctatga

SEQ ID NO: 11597 - DNA, 135 bp, unidentified; identical to SEQ ID NO: 2523
  misc_feature 1..135: note = Synthetic
  source 1..135: mol_type = other DNA

SEQ ID NO: 11598 - DNA, 57 bp, unidentified; identical to SEQ ID NO: 2524
  source 1..57: mol_type = other DNA
  misc_feature 1..57: note = Synthetic

SEQ ID NO: 11599 - DNA, 27 bp, unidentified
  source 1..27: mol_type = other DNA
  misc_feature 1..27: note = Synthetic
acgatttataaaaaaataccgcaatag

SEQ ID NO: 11600 - DNA, 57 bp, unidentified; identical to SEQ ID NO: 2526
  misc_feature 1..57: note = Synthetic
  source 1..57: mol_type = other DNA

SEQ ID NO: 11601 - DNA, 27 bp, unidentified
  misc_feature 1..27: note = Synthetic
  source 1..27: mol_type = other DNA
acgatttataaaaaaataccgcaatag

SEQ ID NO: 11602 - DNA, 57 bp, unidentified; identical to SEQ ID NO: 2526
  source 1..57: mol_type = other DNA
  misc_feature 1..57: note = Synthetic

SEQ ID NO: 11603 - DNA, 27 bp, unidentified
  source 1..27: mol_type = other DNA
  misc_feature 1..27: note = Synthetic
acgatttataaaaaaataccgcaatag

SEQ ID NO: 11604 - DNA, 57 bp, unidentified; identical to SEQ ID NO: 2526
  misc_feature 1..57: note = Synthetic
  source 1..57: mol_type = other DNA

SEQ ID NO: 11605 - DNA, 27 bp, unidentified
  misc_feature 1..27: note = Synthetic
  source 1..27: mol_type = other DNA
acgatttataaaaaaataccgcaatag

SEQ ID NO: 11606 - DNA, 48 bp, unidentified; identical to SEQ ID NO: 2527
  misc_feature 1..48: note = Synthetic
  source 1..48: mol_type = other DNA

SEQ ID NO: 11607 - DNA, 42 bp, unidentified; identical to SEQ ID NO: 2528
  misc_feature 1..42: note = Synthetic
  source 1..42: mol_type = other DNA

SEQ ID NO: 11608 - DNA, 1032 bp, unidentified
  misc_feature 1..1032: note = Synthetic
  source 1..1032: mol_type = other DNA
atgagaatatcgaacagtataaaaccgaatcttttttacaataaattgaaatcaaaacatttattaaaccgcatcaagatgtgtacgaacgtcgttagagtttttgtaattttatatttgttggctgtatgcggatgtatcaaatacgacgtagacgataatgtacatatttgtacccacactgtcgtgtcacatattaattacactagttggtattataatgataaggttatagcgctagccacagaggataaaacttctggttatatatcatcattcataaaacgcgttaatatatcattaacttgtttaaatatatcgagtttgaggtacgaagattctggtacatacaaaggagtatcgcatctaaaagatggagtcatcgttacgactactatgaatatatctgtaaaggctaatatcattgacttgactggtagagtgcgttatctaaccagaaattattgcgaagttaaaatacgatgcgaaataacatctttcgcgcttaatggttctacaccaccgcatatgatattaggaacagtagataaatggaaatatcttccatttcctacagatgattatagatacgtaggggaactgaaaagatatatatctggaaacccatatccaacagagtcgctagcgttagaaattagctcgacgtttaatcggtttactatcgttaaaaatttgaacgatgacgagttttcttgttatctgttttcacaaaattatagtttccataaaacgttgaacgtgcgtaacatttgtgaatccgaatgggaggcgttaaataataatgataatgcatcttccgtgcccgcttcccacaacaatctcacaaatgatttatctagtatgatgtcacaattacaaaatgatgataacgattattcagcacccacgaatgtcgataatttaattatgatagtagtaataacaatgctatcaataatacttgtaattattgtagtgattgcggcgatagcgatatacaaaagatccaagtacagtcatacagataactga

SEQ ID NO: 11609 - DNA, 39 bp, unidentified; identical to SEQ ID NO: 2531
  source 1..39: mol_type = other DNA
  misc_feature 1..39: note = Synthetic

SEQ ID NO: 11610 - DNA, 366 bp, unidentified
  source 1..366: mol_type = other DNA
  misc_feature 1..366: note = Synthetic
atggactccaacaccatgtcaagctttcaggacatacttatgaggatgtcaaaaatgcagttggggtcctcatcggaggacttgaatggaatggtaacacggttcgagtctctgaaaatatacagagattcgcttggagaaactgtgatgagaatgggagaccttcactacctccagagcagaaatgaaaagtggcgagagcaattgggacagaaatttgaggaaataaggtggttaattgaagaaatgcggcacagattgaaagcgacagagaatagtttcgaacaaataacatttatgcaagccttacaactactgcttgaagtagaacaagagataagagctttctcgtttcagcttatttaa

SEQ ID NO: 11611 - DNA, 660 bp, unidentified
  misc_feature 1..660: note = Synthetic
  source 1..660: mol_type = other DNA
atggactccaacaccatgtcaagctttcaggtagactgtttcctttggcatatccgcaagcgatttgcagacaatggattgggtgatgccccattccttgatcggctccgccgagatcaaaagtccttaaaaggaagaggcaacacccttggcctcgatatcgaaacagccactcttgttgggaaacaaatcgtggaatggatcttgaaagaggaatccagcgagacacttagaatgacaattgcatctgtacctacttcgcgctacctttctgacatgaccctcgaggaaatgtcacgagactggttcatgctcatgcctaggcaaaagataataggccctctttgcgtgcgattggaccaggcgatcatggaaaagaacatagtactgaaagcgaacttcagtgtaatctttaaccgattagagaccttgatactactaagggctttcactgaggagggagcaatagttggagaaatttcaccattaccttctcttccaggacatacttatgaggatgtcaaaaatgcagttggggtcctcatcggaggacttgaatggaatggtaacacggttcgagtctctgaaaatatacagagattcgcttggagaaactgtgatgagaatgggagaccttcactacctccagagcagaaatga

SEQ ID NO: 11612 - DNA, 2271 bp, unidentified
  source 1..2271: mol_type = other DNA
  misc_feature 1..2271: note = Synthetic
ataaaagaactgagagatctaatgtcgcagtcccgcactcgcgagatactcactaagaccactgtggaccatatggccataatcaaaaagtacacatcaggaaggcaagagaagaaccccgcactcagaatgaagtggatgatggcaatgagatacccaattacagcagacaagagaataatggacatgattccagagaggaatgaacaaggacaaaccctctggagcaaaacaaacgatgctggatcagaccgagtgatggtatcacctctggccgtaacatggtggaataggaatggcccaacaacaagtacagttcattaccctaaggtatataaaacttatttcgaaaaggtcgaaaggttgaaacatggtaccttcggccctgtccacttcagaaatcaagttaaaataaggaggagagttgatacaaaccctggccatgcagatctcagtgccaaggaggcacaggatgtgattatggaagttgttttcccaaatgaagtgggggcaagaatactgacatcagagtcacagctggcaataacaaaagagaagaaagaagagctccaggattgtaaaattgctcccttgatggtggcgtacatgctagaaagagaattggtccgtaaaacaaggtttctcccagtagccggcggaacaggcagtgtttatattgaagtgttgcacttaacccaagggacgtgctgggagcagatgtacactccaggaggagaagtgagaaatgatgatgttgaccaaagtttgattatcgctgctagaaacatagtaagaagagcagcagtgtcagcagacccattagcatctctcttggaaatgtgccacagcacacagattggaggagtaaggatggtggacatccttagacagaatccaactgaggaacaagccgtagacatatgcaaggcagcaatagggttgaggattagctcatctttcagttttggtgggttcactttcaaaaggacaagcggatcatcagtcaagaaagaagaagaagtgctaacgggcaacctccaaacactgaaaataagagtacatgaagggtatgaagaattcacaatggttgggagaagagcaacagctattctcagaaaggcaaccaggagattgatccagttgatagtaagcgggagagacgagcagtcaattgctgaggcaataattgtggccatggtattctcacaggaggattgcatgatcaaggcagttaggggcgatctgaactttgtcaatagggcaaaccagcgactgaaccccatgcaccaactcttgaggcatttccaaaaagatgcaaaagtgcttttccagaactggggaattgaatccatcgacaatgtgatgggaatgatcggaatactgcccgacatgaccccaagcacggagatgtcgctgagagggataagagtcagcaaaatgggagtagatgaatactccagcacggagagagtggtagtgagtattgaccgatttttaagggttagagatcaaagagggaacgtactattgtctcccgaagaagtcagtgaaacgcaaggaactgagaagttgacaataacttattcgtcatcaatgatgtgggagatcaatggccctgagtcagtgctagtcaacacttatcaatggataatcaggaactgggaaattgtgaaaattcaatggtcacaagatcccacaatgttatacaacaaaatggaatttgaaccatttcagtctcttgtccctaaggcaaccagaagccggtacagtggattcgtaaggacactgttccagcaaatgcgggatgtgcttgggacatttgacactgtccaaataataaaacttctcccctttgctgctgccccaccagaacagagtaggatgcaattttcctcattgactgtgaatgtgagaggatcagggttgaggatactggtaagaggcaattctccagtattcaattacaacaaggcaaccaaacgacttacagttcttggaaaggatgcaggtgcattgactgaagatccagatgaaggcacatctggggtggagtctgctgtcctgagaggatttctcattttgggcaaagaagacaagagatatggcccagcattaagcatcaatgaactgagcaatcttgcaaaaggagagaaggctaatgtgctaattgggcaaggggacgtagtgttggtaatgaaacgaaaacgggactctagcatacttactgacagccagacagcgaccaaaagaattcggatggccatcaattag

SEQ ID NO: 11613 - DNA, 1329 bp, unidentified
  source 1..1329: mol_type = other DNA
  misc_feature 1..1329: note = Synthetic
aagatcaacaatcaattggtgtctgttaagccggaggtgatagtagatcagtatgaatataagtaccctgcaatcaaagatcagaggaagcctagcattactcttggaaaggccccagatttaaataaagcgtacaagtctatattatctggcatgaacgccgcgaagttggacccggacgatgtttgctcctacctagctgcagctatggagttatttgaggggatctgcccagaggactggacaagttacgggattttgattgccagaaaaggagacaaaatcacaccggctactttagttgacataaggagaacagatattcagggcagctgggctctggcaggggggcaggactttaccagagaccctacaatcgcagagcatgcatctctggtgggtcttcttctgagcctctacagattgagcaaaatttcaggtcaaaacacgggaaactacaaaaccaacatcgcagacaggattgagcagatttttgagaccgccccctttgcaaagatcgtagaacatcacacattaatgaccacccacaaaatgtgtgcgaattggagcacaattccaaactttagatttctggctgggacttatgatatgttcttttctcgagttgaacatttatactccgcaattcgggtaggcacggtagtaacggcttatgaagactgttccggacttgtctcgttcacaggattcatcaagcaaataaacctcactgctagggaagcgatactttacttcttccataagaactttgaggaggaaatcaggagaatgtttgagcccggacaagaaactgccgttcctcactcttatttcatccacttcagatcccttgggctcagtggaaagtctccatactcctccaatgcagtcggccatgtgtttaatctcattcattttgtgggatgttacatggggcagataagatctttaaatgccactgttatatctacttgcgcacctcacgagatgtcagtcttggggggttacctaggggaagagttcttcgggaaagggacattcgagagaagattcttcagagacgagaaagaacttcaggattatgaagcagcagaggccatgaagatagacctcgcactggcggacgatggaactgtcaattcgtatgatgaggattatctctcaggggagacgaggagcccggaggcagtttatacgagaataatgatgaatggaggccgactcaagaagtcacacatcaggaggtacatctcagtgagttctaaccatcagtctcggccgaactcgtttgctgaattcctaaacaagacatactcgagtgattcttaa

SEQ ID NO: 11614 - DNA, 72 bp, unidentified; identical to SEQ ID NO: 2536
  source 1..72: mol_type = other DNA
  misc_feature 1..72: note = Synthetic

SEQ ID NO: 11615 - DNA, 15 bp, unidentified
  misc_feature 1..15: note = Synthetic
  source 1..15: mol_type = other DNA
atgctacccacataa

SEQ ID NO: 11616 - DNA, 264 bp, unidentified
  source 1..264: mol_type = other DNA
  misc_feature 1..264: note = Synthetic
ttgtccagcacttttaccatgcgcccgacaagtaagattgcagacgctgaaatcatttcaagagaacatgattatatcgcaagcaaaacacaggcggattcaaaaaaaaaattatcgtccctgtctgtgatttttgacaaaactgtcctgtttgaattttacggtataggagacaacaacgaaaaagctatcgtctaccctatcgatccagatttcttattatgtgattcggaaaataattgcaccctatcacctttcttataa

SEQ ID NO: 11617 - DNA, 210 bp, unidentified; identical to SEQ ID NO: 10344
  source 1..210: mol_type = other DNA
  misc_feature 1..210: note = Synthetic

SEQ ID NO: 11618 - DNA, 39 bp, unidentified; identical to SEQ ID NO: 2544
  source 1..39: mol_type = other DNA
  misc_feature 1..39: note = Synthetic

SEQ ID NO: 11619 - DNA, 24 bp, unidentified
  misc_feature 1..24: note = Synthetic
  source 1..24: mol_type = other DNA
atgttaggtaggaggagcctataa

SEQ ID NO: 11620 - DNA, 1227 bp, unidentified
  source 1..1227: mol_type = other DNA
  misc_feature 1..1227: note = Synthetic
atgcatgcgcgcgcgcggacgcgggcgcgtagccgagcggcgcgttttcgcggccttaaaatgggaaacctcacctctgcgcggcccgcgggctgcaagattgtagagacgctgccggcaacgctgccgctggcgctacctaccggcagcatgctcacgtacgactgctttgacacgctcatctcgcagacgcagcgcgagctgtgcattgcgtcttactgctgcaatctgcgctccacgcccgagggcgggcacgtgctgctgcggctgctggagctagcgcgcgccgacgtgcgcgtgacgattatcgtggacgagcagagccgggacgcggatgccacgcagctggcgggcgtgcccaacctacgctacctgaagctggacgtgggcgaactgcccggcggcaagcccggaagcttgctcagcagcttctgggtatcggacaagcgccgcttttacctgggcagcgcctcgcttaccgggggctccatttcgaccatcaagagcctgggcgtgtactccgagtgcgagccgctggcgcgtgacctgcgtcgccgcttccgcgactacgagcgcctgtgcgcgcgccgctgcgtgcgctgcctctcgcttagcacgcgcttccatttgcgccgccactgcgaaaacgccttcttttccgacgcgccggaaagtcttatcggcagcacacgcacctttgatgccgacgctgtgctcgcgcacgtgcaggccgctcgcagtactatcgacatggagctactctcgctggtgccactggtgcgcgacgaggactctgtacagtactggccgcgcatgcacgacgcgttggtgcgcgcggcactggaacgcaacgtgcgcgtgcgcctgctggtagggctgtggcaccgcagcgacgtgttctcgctggccgccgtcaaggggctgcacgagctgggcgtgggccacgccgacattagcgtgcgcgtcttcgcgatcccgggagctaagggcgacgccgtcaataacaccaagctcctcgtggtggacgacgagtacgtgcatgtgaccagcgccgacatggacggcacgcactacgcgcggcacgccttcgtcagctttaactgcgcggagcgcgcattcgcgcgagcgcttggtgcgctcttcgagcgcgactggcagtcgtccttcagctcgccgcttcctcgggcaccgccaccggagcccgccacgctgctacccgtgaactga

SEQ ID NO: 11621 - DNA, 2280 bp, unidentified
  misc_feature 1..2280: note = Synthetic
  source 1..2280: mol_type = other DNA
atggaaagaataaaagaactaagagatttgatgtcacagtctcgcactcgcgagatactgacaaaaacaactgtggaccatatggccataatcaagaaatatacatcaggaagacaggagaagaatcctgcccttaggatgaagtggatgatggcaatgaaatatccaattacggcagacaaaaggataatggagatgatcccggaaagaaatgagcaaggtcagaccctttggagcaagacaaatgatgctggatcagacagagtgatggtgtcacctctggctgtgacgtggtggaacagaaatggaccaacgacaagcacagtccattatccaaaggtctataaaacctattttgaaaaggtcgaaaggctaaaacatggaaccttcggccccgttcacttcagaaaccaggttaaaatacgccgcagggtcgacataaacccgggccatgcagatcttagtgctaaagaagcacaggatgtcatcatggaggtcgtattcccaaacgaagttggagccagaatattgacatcagagtcacagttaacgattaccaaggaaaagaagaaggagcttcaggactgcaaaattgcccctttaatggtggcttacatgttggagagagaactggttcgcaaaacaagattcctaccagtagctggagggacaagcagcgtgtatatcgaggtgttgcatttgacccaagggacctgctgggagcaaatgtacacaccgggaggggaagtgagaaatgatgatgttgatcagagtttaattattgctgctagaaatattgttagaagagcaacagtatcagcagacccgttggcttcgcttttggagatgtgccatagtacacagattggcgggattaggatggttgacatccttagacaaaacccaacagaagaacaggctgtggatatatgtaaggcagcaatgggtctaaggatcagttcatccttcagctttggaggtttcactttcaaaaggacaagtgggtcatctgtcaaaagggaagaagaagtgctcacaggcaacctccaaacattgaaaataagagtacatgaaggatatgaggaattcacaatggtcgggcgaagagcaacagccattctaaggaaagcaaccagaagactgatccaactgatagtgagtgggaaagacgagcaatcaatcgccgaggcaatcatagtggcaatggtattctcacaagaggattgtatgataaaggcagtgagaggtgatttgaactttgtcaacagagcaaaccagcggctaaatcccatgcatcaactcctgaggcatttccaaaaggatgcaaaggtcctgtttcaaaactggggaattgaacccattgacaatgtaatggggatgatcggaatattgcctgacatgacccccagcacagagatgtcattgagaggagtgagagttagtaaaatgggagtagatgaatattccagcactgagagagtggtcgtgagtattgatcgtttcttgagggtccgagaccagaggggaaacgtactcctgtctcctgaagaggttagtgaaacacagggaacagaaaagctgactataacatattcatcgtccatgatgtgggagatcaatggtccggaatcagtgctagttaacacatatcaatggatcattagaaattgggaaaatgtaaagattcaatggtcccaagatcctacaatgctatacaataagatggaatttgaaccctttcaatccctagtgcctaaagctgccaggggccaatatagtgggttcgtgagggttctattccaacagatgcgtgacgtactgggaacatttgacactgtccaaataataaagctattaccatttgcagcagccccgccgaagcagagtaggatgcagttctcttctctaactgtgaatgtgaggggttccggaatgagaatagttgtgagaggcaattctcctgtgttcaactacaacaaggcaaccaagaggcttacggtgcttggaaaggatgcaggtgcattgatggaagaccccgatgagggaacagcaggagtggaatctgcggtattgaggggatttctgattctgggcaaagaagacaaaagatatgggccagcattgagcatcaacgaattgagcaatcttgcgaaaggagagaaggctaatgtgttgatagggcaaggagacgttgtgttggtgatgaaacggaaacgggactctagcatacttactgacagtcagacagcgaccaaaaggattcggatggccatcaattaa

SEQ ID NO: 11622 - DNA, 2151 bp, unidentified
  misc_feature 1..2151: note = Synthetic
  source 1..2151: mol_type = other DNA
atggaagactttgtgcgacagtgcttcaatccaatgatcgtcgagcttgcggaaaaggcaatgaaagaatatggggaagatccgaaaatcgaaacaaacaaattcgcatcaatatgcacacacttagaagtctgcttcatgtactctgatttccacttcatcgacgaacgaggcgaatcaactataatagaatctggcgatccaaatgcgctgctgaaacaccgatttgaaataatcgaagggagagaccgaacaatggcctggacagtggtgaatagtatctgcaacaccacaggagccgaaaaacccaaatttctcccggatctgtatgactacaaggaaaaccgtttcattgaaattggagtgacgaggagggaagtccacatatattacctagagaaagccaataaaataaaatccgagaagacacacatccatattttttcattcactggagaagagatggccaccaaagcagattacactcttgacgaagaaagcagggcaagaatcaaaaccaggctgttcaccataaggcaggaaatggccagcaggggtctatgggattcctttcgtcagtctgaaagaggcgaagaaacaattgaagaaagatttgaaatcacaggaaccatgcgcaggcttgccgaccaaagtctcccaccgaacttctccagccttgaaaactttagagcctatgtggatggattcgaaccgaacggctgcattgagggcaagctttctcagatgtcaaaagaagtgaacgccagaattgagccatttctaagaacaacaccacgccctctcagattgcctaatgggcctccctgctctcagcggtcgaaattcttgctgatggatgctctgaaattaagcattgaggacccgagccacgaaggggaggggataccgctatatgatgcgatcaaatgcatgaaaacgttcttcgggtggaaagagcccaacattatcaaaccacatgagaaaggcataaaccccaattatctcctgacttggaagcaggtgctagcagaacttcaggacattgaaaatgaagagaagattccaaggacaaagaacatgaagaaaacaagccaattaaagtgggcactcggtgagaacatggcaccggagaaggtggactttgaggattgcaaagatgtcaacgacttgaaacagtacaacagtgatgagccagagcccagatcactagcatgttggatccagaatgaattcaacaaggcgtgtgaactgactgactcaagctgggtagaacttgatgaaataggggaagatgttgccccaatcgaacacattgcaagcatgagacggaactattttacagcagaggtgtcccactgcagggctactgaatatataatgaagggagtgtacataaatacagctttgctcaatgcatcttgtgcagccatggatgactttcaactgattccaatgataagtaaatgtagaaccaaagaaggaagacggaaaacaaacctgtatggattcattataaaaggaagatctcatttgaggaatgataccgacgtggtaaactttgtaagtatggaattttcccttaccgacccaaggttggaaccacataaatgggaaaagtattgtgttcttgaaataggggacatgctcctgcgaactgcagtaggccaagtgtcaagacccatgtttctgtatgtgagaaccaatgggacctccaagatcaagatgaaatggggtatggaaatgagacgctgccttcttcaatctctccaacagattgagagcatgattgaagctgaatcctccgtcaaagagaaagacctgaccaaagaattctttgaaaacaaatcagaaacatggccaattggagagtcacctaaaggagtggaggaaggttccatcgggaaggtgtgcagaaccttactagcaaaatctgtattcaacagcctatatgcatctccgcaactcgaggggttctcagctgaatcgagaaaactgctactcattgttcaggcgcttagggataacctggaacctggaacctttgatcttgaagggctatatgaagcaatcgaggagtgcctgattaatgatccctgggttttgcttaatgcatcttggttcaactccttcctcacacatgcactaagatag

SEQ ID NO: 11623 - DNA, 759 bp, unidentified
  source 1..759: mol_type = other DNA
  misc_feature 1..759: note = Synthetic
atggaagactttgtgcgacagtgcttcaatccaatgatcgtcgagcttgcggaaaaggcaatgaaagaatatggggaagatccgaaaatcgaaacaaacaaattcgcatcaatatgcacacacttagaagtctgcttcatgtactctgatttccacttcatcgacgaacgaggcgaatcaactataatagaatctggcgatccaaatgcgctgctgaaacaccgatttgaaataatcgaagggagagaccgaacaatggcctggacagtggtgaatagtatctgcaacaccacaggagccgaaaaacccaaatttctcccggatctgtatgactacaaggaaaaccgtttcattgaaattggagtgacgaggagggaagtccacatatattacctagagaaagccaataaaataaaatccgagaagacacacatccatattttttcattcactggagaagagatggccaccaaagcagattacactcttgacgaagaaagcagggcaagaatcaaaaccaggctgttcaccataaggcaggaaatggccagcaggggtctatgggattccttcgtcagtctgaaagaggcgaagaaacaattgaagaaagatttgaaatcacaggaaccatgcgcaggcttgccgaccaaagtctcccaccgaacttctccagccttgaaaactttagagcctatgtggatggattcgaaccgaacggctgcattgagggcaagctttctcagatgtcaaaagaagtga

SEQ ID NO: 11624 - DNA, 63 bp, unidentified; identical to SEQ ID NO: 2555
  source 1..63: mol_type = other DNA
  misc_feature 1..63: note = Synthetic

SEQ ID NO: 11625 - DNA, 63 bp, unidentified; identical to SEQ ID NO: 2555
  source 1..63: mol_type = other DNA
  misc_feature 1..63: note = Synthetic

SEQ ID NO: 11626 - DNA, 2274 bp, unidentified
  misc_feature 1..2274: note = Synthetic
  source 1..2274: mol_type = other DNA
atggatgtcaatccgactctacttttcctaaaaattccagcgcaaaatgccataagcaccacattcccttatactggagatcctccatacagccatggaacaggaacaggatacaccatggacacagtaaacagaacacaccaatactcagaaaagggaaagtggacgacaaacacagagactggtgcaccccagctcaacccgattgatggaccactacctgaggataatgaaccaagtgggtatgcacaaacagactgtgttctagaggctatggctttccttgaagaatcccacccaggaatatttgagaattcatgccttgaaacaatggaagttgttcaacaaacaagggtagataaactaactcaaggtcgccagacttatgattggacattaaacagaaatcaaccggcagcaactgcattggccaacaccatagaagtctttagatcgaatggcctaacagctaatgagtcaggaaggctaatagatttcttaaaggatgtaatggaatcaatgaacaaagaggaaatagagataacaacccactttcaaagaaaaaggagagtaagagacaacatgaccaagaagatggtcacgcaaagaacaatagggaagaaaaaacaaagactgaataagagaggctatctaataagagcactgacattaaatacgatgaccaaagatgcagagagaggcaagttaaaaagaagggctatcgcaacacctgggatgcagattagaggtttcgtatactttgttgaaactttagctaggagcatttgcgaaaagcttgaacagtctgggctcccagtagggggcaatgaaaagaaggccaaactggcaaatgttgtgagaaagatgatgactaattcacaagacacagagatttctttcacaatcactggggacaacactaagtggaatgaaaatcaaaatcctcgaatgttcctggcgatgattacatatatcaccagaaatcaacccgagtggttcagaaacatcctgagcatggcacccataatgttctcaaacaaaatggcaagactagggaaagggtacatgttcgagagtaaaagaatgaagattcgaacacaaataccagcagaaatgctagcaagcattgacctgaagtacttcaatgaatcaacaaagaagaaaattgagaaaataaggcctcttctaatagatggcacagcatcactgagtcctgggatgatgatgggcatgttcaacatgctaagtacggtcttgggagtctcgatactgaatcttggacaaaagaaatacaccaagacaatatactggtgggatgggctccaatcatccgacgattttgctctcatagtgaatgcaccaaaccatgagggaatacaagcaggagtggacagattctacaggacctgcaagttagtgggaatcaacatgagcaaaaagaagtcctatataaataagacagggacatttgaattcacaagctttttttatcgctatggatttgtggctaattttagcatggagctacccagctttggagtgtctggagtaaatgaatcagctgacatgagtattggagtaacagtgataaagaacaacatgataaacaatgaccttggacctgcaacggcccagatggctcttcaattgttcatcaaagactacagatacacatataggtgccataggggagacacacaaattcagacgagaagatcatttgagttaaagaagctgtgggatcaaacccaatcaaaggtagggctattagtatcagatggaggaccaaacttatacaatatacggaatcttcacattcctgaagtctgcttaaaatgggagctaatggatgatgattatcggggaagactttgtaatcccctgaatccctttgtcagtcataaagagattgattctgtaaacaatgctgtggtaatgccagcccatggtccagccaaaagcatggaatatgatgccgttgcaactacacattcctggattcccaagaggaatcgttctattctcaacacaagccaaaggggaattcttgaggatgaacagatgtaccagaagtgctgcaatctattcgagaaatttttccctagcagttcatataggagaccggttggaatttctagcatggtggaggccatggtgtctagggcccggattgatgccagggtcgacttcgagtctggacggatcaagaaagaagagttctctgagatcatgaagatctgttccaccattgaagaactcagacggcaaaaataa

SEQ ID NO: 11627 - DNA, 57 bp, unidentified; identical to SEQ ID NO: 2557
  source 1..57: mol_type = other DNA
  misc_feature 1..57: note = Synthetic

SEQ ID NO: 11628 - DNA, 294 bp, unidentified
  source 1..294: mol_type = other DNA
  misc_feature 1..294: note = Synthetic
ctggagaccctccatacagccatggaacaggaacaggatacaccatggacacagtcaacagaacacataaatactcagaaaaaggaaagtggacaacgaacacagagactggagcaccccaactcaatccaattgatggaccattacctgaggacaacgagccgagtgggtatgcacaaacggattgtgtattggaagcaatggctttccttgaagaatctcacccagggatctttgaaaactcgtgtctcgaaacgatggaaattgttcagcaaacaagagtggataaactga

SEQ ID NO: 11629 - DNA, 294 bp, unidentified; identical to SEQ ID NO: 11628
  misc_feature 1..294: note = Synthetic
  source 1..294: mol_type = other DNA

SEQ ID NO: 11630 - DNA, 366 bp, unidentified
  misc_feature 1..366: note = Synthetic
  source 1..366: mol_type = other DNA
atggattccaatactgtgtcaagcttccaggacatactgacaaggatgtcaaaaatgcaattgagatcctcatcggaggatttgaatggaatgataacacagttcgagtctctgaaactctacagagattcgcttggagaagcagcgatgaggatgggagatctccactctctacaaagtagaaacgggaaatggagagaacagttaagccagaagttcgaagaaataagatggttgattgaagaagtacgacatagattaaaaattacggagaatagctttgagcaaataacttttatgcaagccttacaactattgcttgaagtggagcaagagataagaactttctcgtttcagcttatttaa

SEQ ID NO: 11631 - DNA, 654 bp, unidentified
  source 1..654: mol_type = other DNA
  misc_feature 1..654: note = Synthetic
atggattccaatactgtgtcaagcttccaggtagactgctttctttggcatgtccgcaaacgatttgcagaccaagaaatgggtgatgccccatttctagaccggcttcgccgagatcagaagtccctgagaggaagaagcagcactcttggtctggacatcagaactgccacgcgtgaaggaaagcatatagtggagcggattttagaggaagagtcagatgaagcatttaaaatgagtattgcttcagtgccagctccacgctatctaactgacatgactcttgaagaaatgtcaagagattggttaatgctcattcccaaacagaaaataacagggtccctatgcattagaatggaccaagcaatagtggacaaaaacatcacattgaaagcaaatttcagtgtgattttcaatcggcttgaagccctgatactacttagagcttttacggaagaaggagcaattgtaggcgaaatctcaccattaccttctcttccaggacatactgacaaggatgtcaaaaatgcaattgagatcctcatcggaggatttgaatggaatgataacacagttcgagtctctgaaactctacagagattcgcttggagaagcagcgatgaggatgggagatctccactctctacaaagtag

SEQ ID NO: 11632 - DNA, 366 bp, unidentified
  misc_feature 1..366: note = Synthetic
  source 1..366: mol_type = other DNA
atggattctaacactgtgtcaagttttcaggacatactattgaggatgtcaaaaatgcaattggggtcctcatcggaggacttgaatggaatgataacacagttcgagtctctaaaactctacagagattcgcttggagaagcagtaatgagaatgggagacctccactcactccaaaacagaaacggaaaatggcgagaacaattaggtcaaaagttcgaagagataagatggctgattgaagaagtgagacacagattgaagataacagagaatagttttgagcaaataacatttatgcaagccttacagctactatttgaagtggaacaagagataagaactttctcgtttcagcttatttaa

SEQ ID NO: 11633 - DNA, 27 bp, unidentified
  source 1..27: mol_type = other DNA
  misc_feature 1..27: note = Synthetic
atgccatctgcgcgatctacaatttga

SEQ ID NO: 11634 - DNA, 51 bp, unidentified; identical to SEQ ID NO: 2563
  misc_feature 1..51: note = Synthetic
  source 1..51: mol_type = other DNA

SEQ ID NO: 11635 - DNA, 27 bp, unidentified
  misc_feature 1..27: note = Synthetic
  source 1..27: mol_type = other DNA
atgccatctgcgcgatctacaatttga

SEQ ID NO: 11636 - DNA, 51 bp, unidentified; identical to SEQ ID NO: 2564
  source 1..51: mol_type = other DNA
  misc_feature 1..51: note = Synthetic

SEQ ID NO: 11637 - DNA, 210 bp, unidentified
  source 1..210: mol_type = other DNA
  misc_feature 1..210: note = Synthetic
atcggtataactgtattaatgcttttgatggtaatttctggcaccgccatgatagtcaaggagttaaatcctaatgatatattcacaatgcaatcattaaagtttaatcgagccgtaacgattttcaaatatataggactctttatctatataccaggaacgataattttgtacgctacgtacatcaaatccctattaatgaaaagttaa

SEQ ID NO: 11638 - DNA, 84 bp, unidentified; identical to SEQ ID NO: 2566
  misc_feature 1..84: note = Synthetic
  source 1..84: mol_type = other DNA

SEQ ID NO: 11639 - DNA, 84 bp, unidentified; identical to SEQ ID NO: 2566
  misc_feature 1..84: note = Synthetic
  source 1..84: mol_type = other DNA

SEQ ID NO: 11640 - DNA, 66 bp, unidentified; identical to SEQ ID NO: 2567
  source 1..66: mol_type = other DNA
  misc_feature 1..66: note = Synthetic

SEQ ID NO: 11641 - DNA, 66 bp, unidentified; identical to SEQ ID NO: 2567
  source 1..66: mol_type = other DNA
  misc_feature 1..66: note = Synthetic

SEQ ID NO: 11642 - DNA, 234 bp, unidentified
  misc_feature 1..234: note = Synthetic
  source 1..234: mol_type = other DNA
attaatgcctggaccctcaccagaggcatgttgctgagcgagctcgtcgatcccggggtagagcatctgcaccggctgctgcgacatctggcgcgtgcgcctcgtgagggaaataaccaggatcaccacccccgccaccaggaccagaatgagcatgccgccgaaggggtttttgaagaaggagatgaaaccagagaccaggctgctaaacaaaccccccaccgtgctgactag

SEQ ID NO: 11643 - DNA, 234 bp, unidentified
  source 1..234: mol_type = other DNA
  misc_feature 1..234: note = Synthetic
attaatgcctggaccctcaccagaggcatgttgctgagcgagctcgtcgatcccggggtagagcatctgcaccggctgctgcgacatctggcgcgtgcgcctcgtgagggaaataaccaggatcaccacccccaccaccaggaccagaatgagcatgccgccgaaggggtttttgaagaaggagatgaaacccgagaccaggctgctaaacaaaccccccaccgtgctgactag

SEQ ID NO: 11644 - DNA, 21 bp, unidentified
  source 1..21: mol_type = other DNA
  misc_feature 1..21: note = Synthetic
attacgtggaatttaaagtag

SEQ ID NO: 11645 - DNA, 639 bp, unidentified
  misc_feature 1..639: note = Synthetic
  source 1..639: mol_type = other DNA
atgctcgcagatttggaactagtggagaatgggaagtgcgttttaacggggaaactatctttgctcctgttaccagctcctcgccgtcctcatacgaagaggtcagagaacgggctgagccccccgacgtccccgaggtcggaaccgcccctgactccggcaccctacagactgggagacctggaaccgaaaccgccaaagggcgaaggtacggacgaaaagaatctagtcctacagttgcctccctcagggtcaggcaaaaagtatcacgatctactacacggaaagccgaagaacgacggtcccggagtccatcgtcagggacagagcaagccggtgcacggggacggggacaacggggaaccagggcccgttccagaaccagaagcaggagcaggcgccggagcaggagcagcagcagagccagaagcaggagggcaagggaacactcagaatcgaggggagggagaggtagaggggcgtacgccacaagatccagaagtagatctgcagagtgcagatctattgaccagtgtggcattccagcttcacaagtgggaaggtcagttcaatcagttggtagaaacaattcttcgagacttaagagattactggatgaagctctcgaccccccagtga

SEQ ID NO: 11646 - DNA, 18 bp, unidentified
  source 1..18: mol_type = other DNA
  misc_feature 1..18: note = Synthetic
atgggaagtgcgttttaa

SEQ ID NO: 11647 - DNA, 2088 bp, unidentified
  source 1..2088: mol_type = other DNA
  misc_feature 1..2088: note = Synthetic
atggataaagttcttaacagggaagaatccatggagctcatggaccttttaggccttgaaagagctgcctggggaaatcttcccttaatgagaaaagcttatttaaggaagtgtaaggaatttcaccctgacaaagggggcgacgaggataaaatgaagagaatgaatactttgtataaaaaaatggagcaggatgtaaaggtagctcatcagcctgattttggaacctggagtagctcagaggtgccaacctatggaacagaagagtgggagtcctggtggagttcctttaatgaaaaatgggatgaagatttattttgccatgaagatatgtttgccagtgatgaagaagcaacagcagattctcaacactcaacaccacccaaaaaaaaaagaaaggtagaagaccctaaagactttccctctgatctacaccagtttcttagtcaagctgtatttagtaatagaacccttgcctgctttgctgtgtatactactaaagaaaaagctcaaattctgtataaaaaacttatggaaaaatattctgtaacttttattagtagacacatgtgtgctgggcataatattatattctttttaactccacatagacatagagtttctgcaattaataatttctgtcaaaagctgtgtacctttagttttttaatttgtaagggtgttaataaggaatacttactatatagtgccttaactagagatccataccatactatagaagaaagcattcaagggggcttaaaggagcatgattttagcccagaagagcctgaagaaacaaagcaggtgtcttggaaattaattactgagtatgcagtagagacaaagtgtgaggatgtgtttttattattaggtatgtatttagaatttcaatacaatgtagaggagtgtaaaaagtgtcagaaaaaagaccagccttatcactttaagtatcatgaaaagcactttgcaaatgctattatttttgcagaaagtaaaaatcaaaaaagtatttgtcagcaagcagtagatacagttttagctaaaaaaagagtagatacccttcatatgaccagggaagaaatgctaacagaaagattcaatcatatattagataaaatggatttaatatttggagctcatggaaatgctgtactagaacaatatatggcaggtgttgcttggctgcactgtttgctacctaaaatggattctgtaatatttgattttttgcactgtattgttttcaatgtacctaaaagaagatactggttatttaaaggtcccattgatagtggaaaaacaacactagctgcagggttattagatttgtgtggtggtaaagccttaaatgtaaacctacccatggaaaggctaacctttgagctaggtgtagctatagatcagtacatggttgtttttgaagatgtaaaagggacaggagctgaatcaaaggatttgccttcaggacatggaataaacaatttagacagtttgagagattatttagatggaagtgttaaggtaaatttagaaaagaaacatttaaacaaaagaacccaaatatttccaccaggcttggttacaatgaatgagtatcctgtccctaaaaccctgcaagctagatttgtaagacaaatagattttaggcccaaaatatatttaagaaaatccttacaaaactcagagttcttacttgaaaaaagaattttacaaagtggaatgaccttgttgctactgctaatttggtttaggcctgtagctgattttgcaactgatatacaatctagaattgttgaatggaaggaaaggctggattctgagataagtatgtatactttttcaaggatgaaatataatatatgcatggggaaatgtattcttgatattacaagagaagaggattcagaaactgaagactctggacatggatcaagcactgaatcccaatcacaatgctcttcccaagtctcagatacttcagcccctgctgaagattcccaaaggtcagacccccatagtcaagagttgcatttgtgtaaaggctttcagtgttttaaaaggcctaaaacaccacccccaaaataa

SEQ ID NO: 11648 - DNA, 519 bp, unidentified
  misc_feature 1..519: note = Synthetic
  source 1..519: mol_type = other DNA
atggataaagttcttaacagggaagaatccatggagctcatggaccttttaggccttgaaagagctgcctggggaaatcttcccttaatgagaaaagcttatttaaggaagtgtaaggaatttcaccctgacaaagggggcgacgaggataaaatgaagagaatgaatactttgtataaaaaaatggagcaggatgtaaaggtagctcatcagcctgattttggaacctggagtagctcagaggtttgtgctgattttcctctttgcccagataccctgtactgcaaggaatggcctatttgttccaaaaagccttctgtgcactgcccttgcatgctatgtcagcttagattaaggcatttaaatagaaaatttttaagaaaagagcccttggtttggatagattgctactgcattgactgcttcacacagtggtttggcttagacctaactgaagaaactctgcaatggtgggtccaaataattggagaaactcccttcagagatctaaagctttaa

SEQ ID NO: 11649 - DNA, 2181 bp, unidentified
  misc_feature 1..2181: note = Synthetic
  source 1..2181: mol_type = other DNA
atggatacttttattacaaagaatttccagactacaataatacaaaaggccaaaaacacaatggcagaatttagtgaagatcctgaattacagccagcagtactattcaacatctgcgtccatctggaggtctgctatgtaataagtgatatgaactttcttgatgaggaaggaaagacatatacagcattagaaggacaaggaaaagagcaaaatttgagaccacagtatgaagtgattgagggaatgccaagaaacatagcatggatggttcaaagatccttagcccaagagcatggaatagagactccaaggtatctggctgatttatttgattataaaaccaagaggtttatcgaagtcggaataacaaagggattggctgatgattacttttggaaaaagaaagaaaagttggggaatagcatggaactgatgatattcagctacaatcaagactactcgttaagtgatgaatcttcattggatgaggaaggaaaagggagagtgctaagcagactcacagaacttcaggctgagttaagtttgaaaaacctatggcaagttctaataggggaagaagaaattgaaaaaggaattgacttcaaacttggacaaacaatatctaaactgaggaatatatctgttccagctggtttctccaattttgaagggatgagaagttacatagacaacatagaccctaaaggagcaatagagagaaatctagcaaggatgtctcccttagtatcagttacacccaaaaagttgaaatgggaggacctgagacccatagggcctcacatttacaaccatgagctaccagaagttccatataatgcctttctcctcatgtctgatgagttggggctggccaatatgactgaaggaaagtccaagaaaccgaagaccttagctaaggaatgtctagaaaggtattcaacactacgtgatcaaactgacccaatattgataatgaaaagcgaaaaagctaacgaaaacttcttatggaggttatggagggactgtgtaaatacaataagcaatgaggaaacaggcaacgaattacagaaaaccaattatgccaagtgggccacaggagatggactaacataccaaaaaataatgaaagaagtagcaatagatgacgaaacgatgtaccaagaagaacccaaaatacccaataaatgtagagtggctgcttgggttcaggcagagatgaatctactgagtactctgacaagtaaaagggccctggatctgccagaaatagggccagatgtagcacccgtggagcatgtagggagtgaaagaaggaaatactttgttaatgaaatcaactactgtaaagcctctacagttatgatgaagtatgtactttttcacacttcattattaaatgaaagcaatgctagtatgggaaaatataaagtaataccaatcaccaacagagtggtaaatgaaaaaggggaaagctttgacatgctttatggtctggcggttaaggggcaatctcatttgcggggggacacggatgttgtaacagttgtgactttcgagtttagtagtacagatcctagagtggactcaggaaagtggccaaaatatactgtctttaaaattggctccctatttgtgagtggaagagaaaaacctgtgtacctatattgccgagtgaatggtacaaacaaaatccaaatgaaatggggaatggaagctagaagatgtctgcttcaatcaatgcaacaaatggaggcaattgttgatcaagaatcatcgatacaagggtatgatatgaccaaagcttgtttcaagggagacagagtgaataatcccaaaactttcagtattgggactcaggaaggcaaactagtaaaagggtcctttgggaaagcactaagagtaatattcaccaaatgtttgatgcattatgtatttggaaatgctcaattggaggggtttagtgccgaatctaggagacttctactgttaattcaggcattaaaagacaggaagggcccttgggtatttgacttggagggaatgtactttggagtagaggaatgtattagtaacaatccttgggtaatacagagtgcatactggtttaatgaatggttgggcattgaaaaagaaggaagtaaagtgttagaatcaatagatgaaataatggatgaatga

SEQ ID NO: 11650 - DNA, 1368 bp, unidentified
  source 1..1368: mol_type = other DNA
  misc_feature 1..1368: note = Synthetic
atggatcctcgcttacgtgaagaagtagtgcgattaataattgcattgacgggcgataatggaacatcattgtcaaaagggcttgaatcaaggattgcagcgctcgaaaagacgtcccaaatacactctgatactctcctcaggatcacccaaggactcgatgatgcaaataaacgaatcatcgctcttgaacaaagtagggacgacctggttgcatcagtcagtgatgcacaacttgcaatctccagattggaaaactctgtcggagccctccaaacagctatcaatggacttgattcgagtgttacccagctgggtggtcgagtgggacagcttgagacaggacttgcaggattacgcgctgaccacgacaatctcgctacgagagtggatactgcggaacgtaacattggatcattgaccactgagctatctacacttacattacgtgtgacctccatacaatcggatttcgaatctcgaatagccacattagagcgtacagcggtcactagcgcagcggcacctctctcgattagcaataatcgtatgactatgggcttgaatgacggattaacattgtcgggaaataatcttgccattcgactgccaggaaacacaggtctgaatattcagaatggtggacttcaatttcggtttaatactgaccagttccagatagttaacaataacttgactctcaagacaactatctttgatccaatcaactccagaataagtacgattgaacaaagttacgtggtatcagcagtgactcccttgaggcttaatagcagtaccaaggtgttggacatgctcatagatagctcgactcttgaaattaactctagcggacaattagccgtgaagtcgacatcgcctaacttaagatatccaattgctgatgttagtggtagtataggagtgagccctaactataggttcaggcagagcatgtggataggaatagtttcatactctggtagtgggttgagttggaggatacaggtgaattctgacatcttcattgctgatgattatatacacatatgtcttccagcttttgatggtttcacaatagccgacggtggagatctatcgttaaactttgtcacaggattgttgccaccgctactcaccggggatactgagccggctttccataatgatgtagttacgtatggggcacggactatagctatagggttgtcgtcaggtggtacgcctcagtatataagtaagaacttgtgggtggagcagtggcaggatggagtactacggttgcgtgttgaaggagggggcttgatcacgcattcgaatagtaaatggcctgccatgaccatttcttatccacgcagtttcacgtga

SEQ ID NO: 11651 - DNA, 621 bp, unidentified
  misc_feature 1..621: note = Synthetic
  source 1..621: mol_type = other DNA
atggatcctcgcttacgtgaagaagtagtgcgattaataattgcattgacgggcgataatggaacatcattgtcaaaagggcttgaatcaaggattgcagcgctcgaaaagacgtcccaaatacactctgatactctcctcaggatcacccaaggactcgatgatgcaaataaacgaatcatcgctcttgaacaaagtagggacgacctggttgcatcagtcagtgatgcacaacttgcaatctccagattggaaaactctgtcggagccctccaaacagctatcaatggacttgattcgagtgttacccagctgggtggtcgagtgggacagcttgagacaggacttgcaggattacgcgctgaccacgacaatctcgctacgagagtggatactgcggaacgtaacattggatcattgaccactgagctatctacacttacattacgtgtgacctccatacaatcggatttcgaatctcgaatagccacattagagcgtacagcggtcactagcgcagcggcacctctctcgattagcaataatcgtatgactatgggcttgaatgacggattaacattgtcgggaaataatcttgccattcgactgccaggaaacaca

SEQ ID NO: 11652 - DNA, 363 bp, unidentified
  misc_feature 1..363: note = Synthetic
  source 1..363: mol_type = other DNA
atggaacatcattgtcaaaagggcttgaatcaaggattgcagcgctcgaaaagacgtcccaaatacactctgatactctcctcaggatcacccaaggactcgatgatgcaaataaacgaatcatcgctcttgaacaaagtagggacgacctggttgcatcagtcagtgatgcacaacttgcaatctccagattggaaaactctgtcggagccctccaaacagctatcaatggacttgattcgagtgttacccagctgggtggtcgagtgggacagcttgagacaggacttgcaggattacgcgctgaccacgacaatctcgctacgagagtggatactgcggaacgtaacattggatcattga

SEQ ID NO: 11653 - DNA, 363 bp, unidentified; identical to SEQ ID NO: 11652
  source 1..363: mol_type = other DNA
  misc_feature 1..363: note = Synthetic

SEQ ID NO: 11654 - DNA, 27 bp, unidentified
  source 1..27: mol_type = other DNA
  misc_feature 1..27: note = Synthetic
atgctaatgtcaagtttattccaatag

SEQ ID NO: 11655 - DNA, 42 bp, unidentified; identical to SEQ ID NO: 2581
  source 1..42: mol_type = other DNA
  misc_feature 1..42: note = Synthetic

SEQ ID NO: 11656 - DNA, 2298 bp, unidentified
  misc_feature 1..2298: note = Synthetic
  source 1..2298: mol_type = other DNA
atggaattgaacaccctttggagcaaattccagcaaaatatccacaagctcagaagtgacttctctatgtttgatgaggttgacgaggcccctatatatgggaccactaaattcaaagaatggtggagatcaggaggattcagcttcgggaaggcatacgaatatgggcccaatccacacgggaccaactcaagatccagaaagccttcctccaatgcatccaggggagcccccagtggaagctcaccaccccacagccagagctcttcctctgggtatgggtccttctcagcgtcccaggcttcagactcccagtccagaggacccgatatacctcccgaacaccatgaggaacccacctcatcctctggatccagtagcagagaggagaccaccaattcaggaagagaatccagcacacccaatggaaccagtgtacctagaaattcttccagaacggatggcacctgggaggatctcttctgcgatgaatcactttcctcccctgagcctccctcgtcctctgaggagcctgaggagcccccctcctcaagaagctcgccccggcagcccccgtcttcctctgccgaggaggcctcgtcatctcagtttacagatgaggaatacagatcctcctccttcaccaccccgaagacccctcctccattctcaagaaagcgaaaatttggggggtcccgaagctctgcaagctctgctagttcagcaagttttacaagcactccaccaaagccaaaaaagaacagagaaactcctgttcctactgattttcctattgatctttctgattatcttagccatgctgtatatagtaataaaacagtaagttgttttgccatttatactacttctgataaagctatagagttatatgataagattgagaaatttaaagttgattttaaaagcaggcatgcctgtgaattaggatgtattttattgtttataactttatcaaagcatagagtatctgctattaagaatttttgctctaccttctgcactataagctttttaatttgtaaaggagtgaataagatgcctgaaatgtataataatttatgcaagcccccttacaaattactgcaagagaataagccactgctcaattatgaatttcaagaaaaagaaaaagaggccagctgtaattggaatttagttgctgaatttgcttgtgaatatgagctagacgaccactttattatcttagcccattatctagactttgcaaaaccatttccttgccaaaagtgtgaaaacagatctcgcctcaaacctcacaaggctcatgaggctcatcattctaatgctaagctattttatgaatctaaatctcagaaaaccatttgccaacaagccgcagacactgttctagccaaaaggaggttagagatgctggaaatgaccaggacagaaatgctatgtaagaagtttaagaagcacctagagagattaagagatttagatacaatagatctactgtattatatgggtggtgtggcctggtactgctgcttatttgaagagtttgaaaagaagctgcagaaaattattcaattattaacagagaatatacctaagtatagaaacatttggtttaaagggcctattaacagtggaaaaacaagctttgctgcagccttaatagatttgctagaagggaaggccttgaatataaactgtccatctgataaactgccttttgaactaggatgtgctttggataaatttatggttgtttttgaggatgtgaaagggcaaaatagcctaaataaagatctgcaaccagggcaaggaataaataaccttgataacttaagagatcatctagatggtgctgtagctgtaagcttagagaagaagcatgtgaataaaaagcatcagatttttcctccttgtattgttactgctaatgattattttattcccaaaacattaatagcaagatttagttatactttacacttttccccaaaggcaaatctaagagattccctggatcagaacatggaaataagaaaaagaagaattcttcaaagtggaaccactttattgctttgtcttatttggtgcttgcctgatacaacctttaagccttgcttacaagaagaaattaaaaactggaagcaaattttacagagtgaaatatcatatggtaaattttgtcaaatgatagaaaatgtagaagctggtcaggaccctctgctcaatattcttattgaggaagagggccctgaggaaactgaagaaacccaagattctggtactttttctcaataa

SEQ ID NO: 11657 - DNA, 405 bp, unidentified
  misc_feature 1..405: note = Synthetic
  source 1..405: mol_type = other DNA
atggaattgaacaccctttggagcaaattccagcaaaatatccacaagctcagaagtgacttctctatgtttgatgaggtcagtacaaaatttccttgggaagaatatggaactttaaaggattatatgcaaagtggatataatgctagattttgcagaggtcctgggtgcatgcttaagcaacttagagattctaagtgcgcttgtattagctgtaagttgtctcgccagcattgtagtctaaaaactttaaagcaaaaaaactgtctgacgtggggagagtgtttttgctatcagtgctttattctttggtttggatttcctcctacttgggaaagttttgactggtggcaaaaaactttagaagaaactgactactgcttactgcatctgcaccttttctag

SEQ ID NO: 11658 - DNA, 24 bp, unidentified
  misc_feature 1..24: note = Synthetic
  source 1..24: mol_type = other DNA
atgataaaggcaaatttgttttag

SEQ ID NO: 11659 - DNA, 4296 bp, unidentified
  source 1..4296: mol_type = other DNA
  misc_feature 1..4296: note = Synthetic
atggcactcggtgagccatactatagttccaaacctgacaaagacttcaattttggaagcacaatggcacgtaggcaaatgacaactactatgatcacaaaacttccaaaatttgttaggaattctccacaagcctatgattggatcgtaagaggtttaatctttcccaccactggaaaaacttatttccaacgagttgttgttgttactggtgggcttgaggatggaacatatggttcattcgcatttgatggtagagaatgggtagagatctacccaatagagcatctgaatctcatgtcatctttgaaactgatacacaaagccaatgctcttcaggaaagactacgtctctcccaagaagagaaagccacccttgctcttgatgtgcaattccttcagcatgaaaatgtgcgactgaaggagttgattccaaaaccagagccacggaaaatacagatgaagtggataatagtgggagcagtgcttacatttttatctctaatacctgggggctatgcgcaaagtcagaccaacaacactatatttacagacatgatagctgcctgcaggtattcaactgagacattaacagagaaccttgaccttagaattaagctcgcactagcaaacataaccattaatgataagctagacgctgtgaggcaaattcttaattttgcctttgtacctagagctcattggttaagaactgtcttctattacatccattattatgagatgtggaatatatttatgtttgttcttgcaattggcactgttatgaggagcgcccgccccggcacagacttgattacacttgcaacgtcccatttgtctggttttaggatggctgttttacccacaattccattccacaccactatgactttgtgggtcatgaacacacttatggtttgttactactttgataatctgctagcaataacaatagcaatcctagcaccaattcttggcatcatcttcttgtgtttcatggaagactccaattatgtgagccagatacgtggtcttattgctacaacagcattaattgctggtgggcatgcctgcttgacactcacaggcacaaccacgtcattatttgttgtcatactaacttgtaggttcatacgtatggcaacggttttcattggcactagatttgagatccgtgatgttaatgggaaggttgtggccacagtaccaaccaggatcaaaaatgttgcatttgacttcttccagaagctgaagcaatcaggggtgagagttggagtcaatgactttgtcgttataaaaccaggtgcattatgcattatagacacccctgaagggaaagggacaggcttcttttctggtaacgacatagtaacagcagcacatgtcgttggtaacaacacttttgtgagtgtgtgttatgagggcttggtgtacgaagctaaggttcggtacatgcccgaaaaggacatagcattcataacttgtcctggtgacttgcatccaacagcaagattaaagttatcaaagaatccagactacagtagtgtcacagtaatggcttatgtgaatgaagatcttgtggtttcaactgcagcagctattgtgcatggtaacaccctctcatatgcagttcgcacccaagacgggatgtcgggtgcaccagtttgtgacaaatatggtcgagtattggcagttcatcaaactaatactggatacactggaggtgctgtcataatagatccagcagacttccatccagtgaaagccccatcccaagtggaattgctcaaagaggaaatagaacggcttaaagctcaattgaattccgctactgagaacccagtgactgtcattacacaacaacctattgctacactagagcagaaaagtgttagcgatagtgaagtgattgaccttgtcagaactgcaatggagcgtgagatgaaggtgctgctggatgaaatcaatggggtacttgcaccattcctacaaaagaagaaaggcaagaccaaacatggtcggggtagagtcagacgcaaccttaggaaaggtgtgaaacttcttactgaggaagagtatcgagaactcttagaaaaaggtctagatcgtgaaacattccttgatctcatagaccgcattattggtgagaggtctggctatcctgactatgatgatgaggattattatgatgaagatgatgatggatggggaatggttggtgatgatgtagaatttgattatactgaagtaattaattttgaccaaacaaaaccaactcctgcccccagaacaaccaaatccgtgccaacctcttcagagaagttaccaaagccttgccccgagccagaagctgaagcacaaccactcgatttgtctcagaagaaaactgttgagaacccagagaaacaaccggagtatgagagacaagtggtgaagcctaagcctcagaagagtgagccacaaccatactcacagacctatggtaaggcaccaatctgggaatcttatgattttgactgggatgaggatgatgccaagtttatcctgccagcgccacaccggctaactaaagcagatgaaatagttcttggatcaaaaattgttaaacttagaacaattattgaaacagccataaagacccagacctatagtgcactacctgaagctgtgtttgagctggataaagcagcttatgaagcaggtttagagggcttcctccagagggttaaatcaaaaaataaggccccaaaactaccactcattagaagggccccagaagaccaacgggcccaaacctaccactcattagatgcatggaaatggttgttagtacctccgcgggagcgtaggtgcgtgcctgctaattttccattattaggacatttgccaattaatagacccatttttgatgacaaaaaacctaaagatgatctccttggcctacttccagaaccaacttggcacgcttttgaggaatatggaccaaccacatggggcccacaagcttttattaaatcttttgataaatttttctatgcagaaccaattgattttttctcagaatatccgcagttgtgtgttttcgctgattgggcaacctatcgcgagttccggtacctagaggatactagggtaatacatataactgcaactgaaaagaacactgattcaacacctgcatatcctaaaatgaattattttgatactgaggaagattatttggaagcacatgggtgggcaccatatataagagaattcactagggtctttaaaggagacaaacctgaagtactttggtacctgttcctcaagaaagagatcattaaggaggaaaaaattaggaattctgatatccggcagatagtgtgtgccgaccccatttacaccaggataggggcgtgcttagaggcacatcagaatgctttgatgaagcagcataccgacacttcagttggtcaatgtgggtggtcaccaatggaaggcggatttaaaaaaaccatgcagcgcctagttaataaagggaataaacattttattgaatttgactggacccgctatgatggaactataccaccagcactttttaaacacatcaaagaaattaggtggaacttcatcaataaagaccaacgtgaaaagtacagacatgtgcatgaatggtatgttgataacctccttaatcgccatgtacttctaccatctggtgaagttaccttgcagacacgaggtaatccatctggccagttttcaacaacaatggacaacaacatggttaacttttggttacaggcttttgagtttgcttatttcaatggtccagacaaagatctctggaagacttatgatactgtggtttatggagatgataggctttcaacaacaccttcggtgcctgataattatgaggagagagtgattaccatgtatagagacatttttggcatgtgggttaagcctgggaaggtcatctgtagagacagtatagttggattatccttctgtggctttactgttaatgaaaaccttgaacccgtgccaacctctccagaaaagttgatggcatcactgttaaagccttacaaaatcttacctgacctcgaatcactccatgggaagctcctatgctatcagttgcttgctgcgttcatggcagaagatcacccttttaaggtgtatgtagaacactgcctatcacggactgcaaagcagcttcgtgactctggcctcccggccagactcacagaagagcaactccatcgcatttggaggggaggaccaaagaagtgtgatggctag

SEQ ID NO: 11660 - DNA, 10251 bp, unidentified
  source 1..10251: mol_type = other DNA
  misc_feature 1..10251: note = Synthetic
atggccaaaggagccgtccttaaaggaaaggggggcggtccccctaggcgagtgccgaaagagaccgcaaaaaagacgcgtcaaggaccaggccgattgccaaacggactggtattgatgcgcatgatgggagtgctgtggcatatggtcgctggaacggccaggaatccgatcctcaagcgattctgggcgactgttccggtacggcaggccattgcagcgctccgtaaaatccgaaagacagttggactgctattggactctttaaataaaagaagagggaagagaaggtcaaccaccggattgctcacgccaatcttgctagcttgcctggcgaccctggtgttctctgcgacagttcgcagagagagaacagggaacatggtgatcagggcagaaggaaaggacgcagccacgcaagtggaagtcatgaatggaacatgcaccattcttgccacagacatggggagttggtgtgatgattcaatcatgtacgagtgtgtcaccattgactcgggagaagaaccagttgatgtggattgcttctgcaaaggcgttgagcgagtgtcactggaatacggaaggtgtgggaaaccagctggcggtagaaacaggaggtcagtgtcgattccggtgcatgctcatagtgatctcaccggaagagggcacaagtggcttaaaggggactcagtcaagacacatctgacacgtgtggaaggctgggtttggaaaaacaagttcctgacagcggccttttgtgcagttgtgtggatggtaacggacagcctgccgacaaggttcattgtcataacggtggccctttgcctggctcctacatatgccacacgatgcacacacctgcagaaccgggactttgtctcagggacccaagggacgactagagtttcattggtgttggaattaggcggctgtgtcaccctcacagctgaaggcaagccatcagtggatgtttggctcgacgacatacaccaggagaacccggccaagacacgagagtattgtcttcatgccaagctggcaaactccaaggtggccgcacgttgtccagccatgggtccagcgacactgccagaggagcaccaggcgagcacagtctgtagacgagaccagagtgacagaggctggggtaaccattgtggactgttcgggaagggcagcattgtggcttgtgccaagtttagctgtgaggccaaaaagaaggcaactggatatgtgtacgatgtcaacaaaatcacatatgtggtgaaggtggaacctcacacgggtgactatctagcggccaacgagtcgcacagcaaccggaagacagcatctttcacaacgcagtccgagaagaccatcttgacactgggagattatggagacatctccctcacgtgccgggtgactagtggagtggatcctgcccagactgtggtattggaactggacaagacagcggaacacttgcccaaggcttggcaggtacaccgagactggtttgaggacctctccttgccatggcgacacgggggtgcccaggaatggaaccatgctgaccggctcgtggaatttggtgaaccgcacgctgtgaaaatggacatttttaaccttggggaccagacgggtatcctgttgaagtctctggctggagtgcccgtggctaacatagagggcagcaagtaccatctccagagtggtcatgtcacctgcgatgtgggccttgaaaaacttaagatgaaagggatgacatacacggtttgtgagggatcaaaatttgcttggaaaaggccgccaaccgacagtggacatgataccgtagtcatggaggtgacttacaccgggagcaagccatgcagaataccagtgagagccgtggcccatggagaacccaatgttaacgtggcaagtctaataaccccaaacccatccatggaaacaactggaggagggttcgttgagctacagctaccaccaggagacaacatcatctatgttggtgagctgagccaccagtggtttcagaagggcagcacaattggccgtgttctggaaaagaccaggaggggcatagagagactcacagttgtgggagagcacgcctgggacttcggttcggtaggcggcatgctatcatcagtggggaaggctctacacacggcttttggcgcagcatttaataccatttttggaggggtgggattcctcccacgcattctgctgggggtagctctggcttggctggggctcaactcacggaaccccaccctttcagtcggctttttgattactggtggacttgtgttgacaatgacactgggggttggtgctgatatgggctgtgcaattgatgctaacaggatggagctacgatgtggtgagggccttgttgtgtggagagaggtcaccgactggtatgatggttacgcattccacccagaatcgccctctgtccttgcggcatctctaaaagaagcatatgaggaaggaatttgtggtattgtgccccagaaccggcttgagatggccatgtggaggcgtgtggaggctgtgctcaacttggccctcgcagagagtgatgctaatctaacggtggttgtggacaaaagagatcccagtgactacaggggaggcaaagtgggaaccctaaggcgttcaggcaaggaaatgaagacgtcatggaagggatggagccaatcctttgtgtggagtgtcccagaagcgccacggcgttttatggttggggttgagggggctggagagtgtcctcttgacaaacgccgaacaggagtcttcacagtggcagagtttgggatgggaatgaggaccaaggtcttcttggacctacgtgagactgcctcctcagactgtgataccggagtcatgggggctgcagtcaaaagcggtcatgccgtccacaccgaccaaagtctttggatgaggtcgcacaggaatgcaacgggagtgttcatatctgagttgatagtgaccgacctacggaactgcacatggccagccagccacaccttggacaacgccggtgtcgtggactcaaaactcttccttccagcaggcctggctggaccacggtcgcactacaatcacattcctgggtacgcagaacaggttaaggggccatggagccaaacgcccctacgggtggtaagggaaccctgccctgggactgcggttaagattgaccagagttgtgacaaaaggggggcgtcgctgcgtagcacgacggaaagcgggaaggccataccagaatggtgttgccgcacatgtgagctgcccccagtcacattccgtagtgggactgattgctggtatgccatggaaattagaccagtccaccaacagggtggtctggtgaggtcgatggtgctggctgacaacggagccatgctaagtgaaggtggagtccctggcattgtggctgtgttcgtggtcctggagctggtcatcaggagacgcccaacaactggcacctcagtggtgtggtgtgggatggttgtccttggccttgttgtgactgggctagtcaccattgagggcctatgccgctatgtggtggccgtcggcatcttgatgagcatggagctcggaccagagattgtggcactagttctgctacaggcagtgtttgacatgaggactggcctcctggtggcttttgcagtcaaaagggcctacacaactagagaggctgtggcaacctatttcttgctcctcgtgctggaacttgggtttccggaggcctcactgagtaacatctggaagtgggccgactccttggcaatgggagcactgattctccaggcgtgtggtcaggagggtagaactcgagtgggctatctcctggcagctatgatgacccaaaaggacatggtaataatccacacaggcttgaccatttttctatcagctgccacggcaatggcggtctggagcatgatcaagggtcaacgggaccagaagggactttcctgggccacaccacttgcaggcctccttggaggcgagggagtgggtcttagattgctggcgtttcgaaagcttgccgagcgaaggaacagacggtctttcagtgaaccactgacggtggtgggagtcatgctcactgtggcaagtgggatggtgagacacacatcccaggaagcactgtgcgctcttgtagctggggcctttctcctcctcatgatggtactgggaacacggaagatgcagctcaccgcagagtggtgcggtgaagtggaatggaacccagacctagtgaacgagggaggagaggttaatctgaaagtgaggcaggacgccatggggaatctccatctcactgaggtggagaaggaagaacgtgcgatggcgttatggcttcttgcagggttggtggcttcagccttccactgggcaggcattctaatagtattggctgtgtggacactttttgagatgctgggctcggggcgaaggtctgaacttgtcttctctggacaggagacccggaccgaaaggaatcggccctttgagatcaaggatggagcctatcgcatctacagccctggcttgctttggggacaccgccaaattggagtggggtatggagccaagggagttctgcacaccatgtggcacgtcactaggggggcagccctggttgtggatgaggcaatctctggaccctattgggctgacgtcagggaagacgttgtgtgctatggtggagcatggagtcttgagagccggtggaggggtgagaccgttcaggtgcacgcgtttccaccagggagaccccaagagacacaccagtgccagccgggtgaactcatcctggagaatggcaggaaacttggagcagtccctattgacctgagcaaaggcacctcgggaagtcctatcattaacgcccagggagaggtggtgggtctttatgggaacggcctgaagaccaatgaagcctacgtcagcagcatagcacaaggagaagccgagaaaagcagaccggaaatcccgttgagtgtgcaaggaacaggctggatgtcaaaaggtcaaatcacggtgctggacatgcatccggggtcagggaagacacatcgagtcctcccggagcttgtgaggcagtgtgcagaccgagggatgaggactctagttcttgcccccacccgggtggtcctgaaggagatggagagagcgcttgctggcaagaaggtccgattccactcacccgcggtggaagggcagaccacagcgggggccattgttgacgtcatgtgccatgccacgtacgtccacagaaggctgctgccccaagggagacaaaattgggaagtcgccataatggatgaggcccattggactgatccgcacagtatcgcggcaagagggcatctttattcgctcgccaaagagaacaggtgcgccttggtgctcatgacagcaactccacccggccggggagatcctttcccggagtccaatggagccattatgagtgaggaaagggccattccggacggagagtggagagtgggctttgactggataacagagtatgagggtcgaacagcatggttcgttccatccatatcaaaaggtggggcggttgcaagaaccctgcgccagagaggcaaaagtgtgatctgtctcaacagtaaaacctttgagaaggattacctgagggtcagggaagagaagccagattttgtggtgacaacagatatctctgagatgggtgccaacctggatgtcagccgagttattgatggtagaacaaacataaagccagaggaggtggatggaaaggtagagttgactggaaccaggaaggtcacgacagcatcggcggctcagcgccggggcagggtgggaaggacatctggacgcactgatgagtacatatactctggacagtgtgatgatgacgacaccagcctcgttcaatggaaggaggcgcagatactcctggacaatatcaccacactgaggggtccggtcgcaactttttatggacccgagcaggtgaagatgccagaagtggctggccactacaggctgaatgaggagaaaaggaaacacttccggcacttgatgactcaatgtgacttcactccctggctggcgtggcatgtcgccaccaacaccagcaatgtgttggatcggagctggacctggcaggggccggaggaaaatgccattgacggggccgacggagatctggtgcggtttaaaacgcctggcggctcagaacgtgtcttgcagccggtgtggaaggactgcagaatgttccgtgagggacgggacgtcaaagacttcatactgtacgcctccgggcgtcgcagtgttggtgatgttttgggtggtctggcgggggtccccggtctcttgaggcacaggtgcgccagcgcgcttgacgtagtttacacccttctcaatgagaatccgggcagcagggcaatgcgcatggctgagagagatgcaccagaggcatttctgactattgttgaggttgctgttttaggagtggccactcttggcatactctggtgctttgtggcaagaacttcggtcagccgcatgttcctgggcacggttgtgctctttgctgccctctttctgctgtggattggtggagtggactatggacacatggcagggatagccctgatattttacaccctcctcactgtgctgcagccagagccgggaaaacagcgaagtagcgatgacaacagactggcatacttcctcctggggctttttagtttggctggactcgtgacggccaacgaaatgggcatgttggacaagacaaaggctgaccttgcagggctggtgtggcgcggagagcagaggcatccagcctgggaggagtggacaaatgtggacatccaaccagcacgatcttggggggcgtatgtgctgatcgtctctctgttcactccctacatgctgcaccagcttcagacaaaaatacaacaactggtgaacagttcagtggcaagtggtgctcaggctatgagagatcttgggggtgggacaccattcttcggggtggccggccatgtgattgccttgggcgtcacgtcactcgtgggtgccactcccatgtccttgggcttgggggtggctttggctgctttccacttggccatcgtcgcctcgggattggaagcagagctgacgcagagggcgcacagggtattcttctcggcaatggttaaaaacccaatggtggatggagacgtcatcaatcccttccccgatggagagacaaagccagcgctatacgagagaaggatgagtttaatcctggccattgccttgtgcatgggttcagtggtcctcaaccgaaccgcggcctcaatgaccgaggctggggctgttggcctagcagcgctgggtcagctggtccatcccgagactgagacactctggacaatgccaatggcgtgtggtatggcggggctcgtgcgggggagcttctggggcctgttgcccatgggacaccgactgtggcttaggacaactggaacacgcagaggaggtgccgagggagagactcttggggacatctggaagaggcggctgaatggttgctctagggaggagttttttcagtaccggcgaagtggagtcatggagacggaacgtgacaaggctcgagagcttctgaagagaggtgagacaaacatgggactggctgtctctcgagggacggctaagctggcatggctagaagaacggggctatgcgaccttgaaaggtgaggttgttgatctcggctgtggcagaggcgggtggtcatactacgctgcttccaggccagctgtcatgggagtgaaggcctacacgataggagggaaaggccatgaggtcccaagactgatcacaagcctcggatggaacctcatcaagtttaggaccggaatggatgtgtactccctagaggcacacagggctgacaccatcctttgtgacattggtgagagtagtccggatcccctggcggaaggagagaggagccgccgtgtcatcctcctcatggagaaatggaaactccgcaaccctgacgcgtcctgcgtgttcaaggttttggctccgtacagaccagaggtgcttgaggctctccacagattccagcttcaatggggcggggggttggtccgcgtccctttctcccgcaattccacgcatgagatgtacttctccactgcgatcagtggtaacattatcaactcagtgaacactcagtccaggaagttgttggccagatttggggatcagcggggacccaccaaggtccccgaggtggatctgggaactggcacacgctgtgtggtactggcagaagacaaggtcagggaagctgatgtggccgaaagaatagctgccctcaagacccaatatggtgattcttggcatgtggacaaagaacatccatacagaacatggcaatattggggaagctacaagacagaggccacaggttcggctgcctctctgatcaacggagtggtgaaactcctcagttggccctggaatgctagggaggatgtggtgcgcatggcaatgacggacacaacggcctttggccagcagagggtttttaaggaaaaggtggacaccaaagcgcaggagccgcaggtgggaaccaagatcatcatgagggccgttaacgactggatctttgaaagacttgcgggaaagaaaacaccacgactgtgcacgcgagaggaattcatcgcaaaggtgcgctcaaacgctgcgctcggagcctggtcagatgaacaaaatcgctggccaaacgcccgagaagcagtggaggaccccgagttttggaggctcgttgatgaggaaagagagagacatcttggaggacggtgtgcccagtgtgtgtacaacatgatgggtaagagagagaagaaactcggtgagttcggtgtcgccaaggggagccgtgccatctggtacatgtggttggggagccggtatctggaatttgaggcactgggtttcctcaatgaagaccactgggcttccagggacctcagtggagcgggggttgaggggaccagtcttaactacctgggatggcatttgaagaagctgtccgaactcgaaggagggcttttctatgccgacgacaccgccggctgggacacaagaatcaccaatgcagaccttgaggatgaggagcaaattctgcgttatctggaaggcgaacaccgaaccctcgcaaagacaatcttggaaaaagcttaccatgccaaagtggtcaaagtggcgcgcccctccagctcgggaggctgcgtcatggacatcataaccagaagagaccaacgtggttcaggccaggtggtgacctacgctctaaacaccctcacgaacatcaaggtgcagcttatccgcatgatggagggagagggcgtgatcgggccatctgactcacaggacccgcgactcctacgtgtggaagcctggctgaaagagcatggagaggagcgcctgacccgcatgctggtcagtggggatgattgcgttgtgagaccaattgacgaccgcttcgggaaggccctctacttcctaaatgacatggccaaggtgagaaaggacattggagagtgggagccctcagaaggttactccagctgggaggaggtccccttttgttcccaccatttccatgagttgacgatgaaggatggcagggtcataatcgtcccatgcagagaccaagatgagttggtggggcgggcaagagtgtcacctgggtgtggctggagcgttagggaaacagcatgtctctcaaaggcctatggacagatgtggctgctgagctacttccacaggagggacctgaggacgctcggcctggcaatctgctcagctgtgcccattgattgggtcccgcagggacgaaccacatggagcatccacgcgagtggagcgtggatgaccacagaggacatgctggaagtgtggaaccgggtctggattcttgacaaccccttcatgggggacaaagggaaagtgagagaatggagggacatcccgtacctccctaagtcccaggatgggctgtgctcttccctggtgggacgccgagaacgggcggaatgggcaaagaacatctggggatcagtggagaaagtgaggagaatgatcggccccgagaggtatgctgattatctctcctgcatggacaggcatgagctccactgggacctgaagttggaaagcaatatcatctaa

SEQ ID NO: 11661 - DNA, 144 bp, unidentified
  source 1..144: mol_type = other DNA
  misc_feature 1..144: note = Synthetic
atcaagatcttgcaagtttttctcttaaacatcttagtttggtatttagagattctcagtattatgcttgttgtcgcaattgttgtcgcgtgtctgcgaggtttgagtttgagaatcattaccaatgctctgttcaatctgtaa

SEQ ID NO: 11662 - DNA, 1908 bp, unidentified
  misc_feature 1..1908: note = Synthetic
  source 1..1908: mol_type = other DNA
ttgaccgcgaaatttgaacgagcagcagccatgccgggcttctacgagatcgtgatcaaggtgccgagcgacctggacgagcacctgccgggcatttctgactcgtttgtgaactgggtggccgagaaggaatgggagctgcccccggattctgacatggatcggaatctgatcgagcaggcacccctgaccgtggccgagaagctgcagcgcgacttcctggtccaatggcgccgcgtgagtaaggccccggaggccctcttctttgttcagttcgagaagggcgagagctactttcacctgcacgttctggtcgagaccacgggggtcaagtccatggtgctaggccgcttcctgagtcagattcgggaaaagcttggtccagaccatctacccgcggggtcgagccccaccttgcccaactggttcgcggtgaccaaagacgcggtaatggcgccggcgggggggaacaaggtggtggacgagtgctacatccccaactacctcctgcccaagactcagcccgagctgcagtgggcgtggactaacatggaggagtatataagcgcgtgcttgaacctggccgagcgcaaacggctcgtggcgcagcacctgacccacgtcagccagacgcaggagcagaacaaggagaatctgaaccccaattctgacgcgcccgtgatcaggtcaaaaacctccgcgcgctatatggagctggtcgggtggctggtggaccggggcatcacctccgagaagcagtggatccaggaggaccaggcctcgtacatctccttcaacgccgcctccaactcgcggtcccagatcaaggccgcgctggacaatgccggcaagatcatggcgctgaccaaatccgcgcccgactacctggtggggccctcgctgcccgcggacattacccagaaccgcatctaccgcatcctcgctctcaacggctacgaccctgcctacgccggctccgtctttctcggctgggctcagaaaaagttcgggaaacgcaacaccatctggctgtttggacccgccaccaccggcaagaccaacattgcggaagccatcgcccacgccgtgcccttctacggctgcgtcaactggaccaatgagaactttcccttcaatgattgcgtcgacaagatggtgatctggtgggaggagggcaagatgacggccaaggtcgtggagtccgccaaggccattctcggcggcagcaaggtgcgcgtggaccaaaagtgcaagtcgtccgcccagatcgaccccacccccgtgatcgtcacctccaacaccaacatgtgcgccgtgattgacgggaacagcaccaccttcgagcaccagcagcctctccaggaccggatgtttaagttcgaactcacccgccgtctggagcacgactttggcaaggtgacaaagcaggaagtcaaagagttcttccgctgggccagtgatcacgtgaccgaggtggcgcatgagttttacgtcagaaagggcggagccagcaaaagacccgcccccgatgacgcggataaaagcgagcccaagcgggcctgcccctcagtcgcggatccatcgacgtcagacgcggaaggagctccggtggactttgccgacaggtaccaaaacaaatgttctcgtcacgcgggcatgcttcagatgctgtttccctgcaaaacgtgcgagagaatgaatcagaatttcaacatttgcttcacacacggggtcagagactgctcagagtgtttccccggcgtgtcagaatctcaaccggtcgtcagaaagaggacgtatcggaaactctgtgcgattcatcatctgctggggcgggctcccgagattgcttgctcggcctgcgatctggtcaacgtggacctggatgactgtgtttctgagcaataa

SEQ ID NO: 11663 - DNA, 1902 bp, unidentified
  misc_feature 1..1902: note = Synthetic
  source 1..1902: mol_type = other DNA
ttgaccgcgaaatttgaacgagcagcagccatgccgggcttctacgagatcgtgatcaaggtgccgagcgacctggacgagcacctgccgggcatttctgactcgtttgtgagctgggtggccgagaaggaatgggagctgcccccggattctgacatggatctgaatctgattgagcaggcacccctgaccgtggccgagaagctgcagcgcgacttcctggtccaatggcgccgcgtgagtaaggccccggaggccctcttctttgttcagttcgagaagggcgagtcctacttccacctccatattctggtggagaccacgggggtcaaatccatggtgctgggccgcttcctgagtcagattagggacaagctggtgcagaccatctaccgcgggatcgagccgaccctgcccaactggttcgcggtgaccaagacgcgtaatggcgccggaggggggaacaaggtggtggacgagtgctacatccccaactacctcctgcccaagactcagcccgagctgcagtgggcgtggactaacatggaggagtatataagcgcctgtttgaacctggccgagcgcaaacggctcgtggcgcagcacctgacccacgtcagccagacccaggagcagaacaaggagaatctgaaccccaattctgacgcgcctgtcatccggtcaaaaacctccgcgcgctacatggagctggtcgggtggctggtggaccggggcatcacctccgagaagcagtggatccaggaggaccaggcctcgtacatctccttcaacgccgcttccaactcgcggtcccagatcaaggccgctctggacaatgccggcaagatcatggcgctgaccaaatccgcgcccgactacctggtaggccccgctccgcccgcggacattaaaaccaaccgcatctaccgcatcctggagctgaacggctacgaacctgcctacgccggctccgtctttctcggctgggcccagaaaaggttcgggaagcgcaacaccatctggctgtttgggccggccaccacgggcaagaccaacatcgcggaagccatcgcccacgccgtgcccttctacggctgcgtcaactggaccaatgagaactttcccttcaatgattgcgtcgacaagatggtgatctggtgggaggagggcaagatgacggccaaggtcgtggagtccgccaaggccattctcggcggcagcaaggtgcgcgtggaccaaaagtgcaagtcgtccgcccagatcgaccccacccccgtgatcgtcacctccaacaccaacatgtgcgccgtgattgacgggaacagcaccaccttcgagcaccagcagccgttgcaggaccggatgttcaaatttgaactcacccgccgtctggagcatgactttggcaaggtgacaaagcaggaagtcaaagagttcttccgctgggcgcaggatcacgtgaccgaggtggcgcatgagttctacgtcagaaagggtggagccaacaaaagacccgcccccgatgacgcggataaaagcgagcccaagcgggcctgcccctcagtcgcggatccatcgacgtcagacgcggaaggagctccggtggactttgccgacaggtaccaaaacaaatgttctcgtcacgcgggcatgcttcagatgctgtttccctgcaagacatgcgagagaatgaatcagaatttcaacatttgcttcacgcacgggacgagagactgttcagagtgcttccccggcgtgtcagaatctcaaccggtcgtcagaaagaggacgtatcggaaactctgtgccattcatcatctgctggggcgggctcccgagattgcttgctcggcctgcgatctggtcaacgtggacctggatgactgtgtttctgagcaataa

SEQ ID NO: 11664 - DNA, 5460 bp, unidentified; identical to SEQ ID NO: 10784
  misc_feature 1..5460: note = Synthetic
  source 1..5460: mol_type = other DNA

SEQ ID NO: 11665 - DNA, 5460 bp, unidentified; identical to SEQ ID NO: 10784
  misc_feature 1..5460: note = Synthetic
  source 1..5460: mol_type = other DNA

SEQ ID NO: 11666 - DNA, 30 bp, unidentified; identical to SEQ ID NO: 1446
  misc_feature 1..30: note = Synthetic
  source 1..30: mol_type = other DNA

SEQ ID NO: 11667 - DNA, 30 bp, unidentified; identical to SEQ ID NO: 1446
  misc_feature 1..30: note = Synthetic
  source 1..30: mol_type = other DNA

SEQ ID NO: 11668 - DNA, 1497 bp, unidentified
  source 1..1497: mol_type = other DNA
  misc_feature 1..1497: note = Synthetic
atggcgtcccaaggcaccaaacggtcttatgaacagatggaaactgatggggaacgccagaatgcaactgagatcagagcatccgtcgggaagatgattgatggaattggacgattctacatccaaatgtgcaccgaacttaaactcagtgattatgaggggcgactgatccagaacagcttaacaatagagagaatggtgctctctgcttttgacgagagaaggaataaatatctggaagaacatcccagcgcggggaaggatcctaagaaaactggaggacccatatacaagagagtagatggaaagtggatgagggaactcgtcctttatgacaaagaagaaataaggcgaatctggcgccaagccaataatggtgatgatgcaacagctgggctgactcacatgatgatctggcattccaatttgaatgatacaacataccagaggacaagagctcttgttcgcaccggaatggatcccaggatgtgctctttgatgcagggttcgactctccctaggaggtctggagctgcaggcgctgcagtcaaaggagttgggacaatggtgatggagttgatcaggatgatcaaacgtgggatcaatgatcggaacttctggagaggtgagaatggacggaaaacaaggagtgcttacgagagaatgtgcaacattctcaaaggaaaatttcaaacagctgcacaaagagcaatgatggatcaagtgagagaaagccggaacccaggaaatgctgagatcgaagatctaatctttctggcacggtctgcactcatattgagagggtcagttgctcacaaatcttgtctgcccgcctgtgtgtatggacctgccatagccagtgggtacaacttcgaaaaagagggatactctctagtgggaatagaccctttcaaactgcttcaaaacagccaagtatacagcctaatcagaccgaacgagaatccagcacacaagagtcagctggtgtggatggcatgcaattctgctgcatttgaagatctaagagtattaagcttcatcagagggaccaaagtatccccaagggggaaactttccactagaggagtacaaattgcttcaaatgaaaacatggatactatggaatcaagtactcttgaactaagaagcaggtactgggccataaggaccagaagtggaggaaacactaatcaacagagggcctctgcaggtcaaatcagtgtacaacctgcattttctgtgcaaagaaacctcccatttgacaaaccaaccatcatggcagcattcactgggaatacagagggaagaacatcagacatgagggcagaaatcataaggatgatggaaggtgcaaaaccagaagaaatgtccttccaggggcggggagtcttcgagctctcggacgaaaaggcaacgaacccgatcgtgccctcttttgacatgagtaatgaaggatcttatttcttcggagacaatgcagaggagtacgacaattaa

SEQ ID NO: 11669 - DNA, 1497 bp, unidentified
  misc_feature 1..1497: note = Synthetic
  source 1..1497: mol_type = other DNA
atggcgtctcaaggcaccaaacgatcatatgaacaaatggagactggtggggagcgccaggatgccacagaaatcagagcatctgtcggaagaatgattggtggaatcgggagattctacatccaaatgtgcactgaactcaaactcagtgattatgatggacgactaatccagaatagcataacaatagagaggatggtgctttctgcttttgatgagagaagaaataaatacctagaagagcatcccagtgctgggaaggaccctaagaaaacaggaggacccatatatagaagagtagacggaaagtggatgagagaactcatcctttatgacaaagragaaataaggagagtttggcgcctagcaaacaatggcgaagatgcaacagcaggtcttactcatatcatgatttggcattccaacctgaatgatgccacatatcagagaacaagagcgcttgttcgcaccggaatggatcccagaatgtgctctctaatgcaaggttcaacacttcccagaaggtctggtgccgcaggtgctgcggtgaaaggagttggaacaatagcaatggagttaatcagaatgatcaaacgtggaatcaatgaccgaaatttctggaggggtgaaaatggacgaaggacaagggttgcttatgaaagaatgtgcaatatcctcaaaggaaaatttcaaacagctgcccagagggcaatgatggatcaagtaagagaaagtcgaaacccaggaaacgctgagattgaagacctcattttcctggcacggtcagcactcattctgaggggatcagttgcacataaatcctgcctgcctgcttgtgtgtatgggcttgcagtagcaagtgggcatgactttgaaagggaagggtactcactggtcgggatagacccattcaaattactccaaaacagccaagtggtcagcctgatgagaccaaatgaaaacccagctcacaagagtcaattggtgtggatggcatgccactctgctgcatttgaagatttaagagtatcaagtttcataagaggaaagaaagtgattccaagaggaaagctttccacaagaggggtccagattgcttcaaatgagaatgtggaaaccatggactccaataccctggaactgagaagcagatactgggccataaggaccaggagtggaggaaataccaatcaacaaaaggcatccgcaggccagatcagtgtgcagcctacattctcagtgcagcggaatctcccttttgaaagagcaaccgttatggcagcattcagcgggaacaatgaaggacggacatccgacatgcgaacagaagttataagaatgatggaaagtgcaaagccagaagatttgtccttccaggggcggggagtcttcgagctctcggacgaaaaggcaacgaacccgatcgtgccttcctttgacatgagtaatgaagggtcttatttcttcggagacaatgcagaggagtatgacagttga

SEQ ID NO: 11670 - DNA, 1497 bp, unidentified
  source 1..1497: mol_type = other DNA
  misc_feature 1..1497: note = Synthetic
atggcgtctcaaggcaccaaacgatcctatgaacagatggaaactggtggggaacgccagaatgctactgagatcagggcatctgttggaagaatggttagcggcattgggagattctacatacagatgtgtacagaactcaaactcagtgacaatgaagggaggctgattcagaacagtataacaatagagagaatggtactctctgcatttgatgaaagaaggaacagatacctggaagagcaccccagtgcaggaaaggaccctaagaaaactggaggtccaatttacaggagaagagacggaaaatgggtgagagagctgatcctgtatgacaaagaggaaatcaggagaatttggcgacaagcgaacaatggagaggatgcaactgctggtcttacccatctgatgatatggcattccaacctgaatgatgctacctatcagagaacgagagctctcgtgcgtactggaatggatccccggatgtgctctctgatgcaaggatcaactctcccgaggagatctggagctgcaggtgcagcagtgaaggggatagggacaatggtgatggaactgattcggatgataaaacgagggatcaacgaccggaatttctggagaggcgaaaatggaagaaggacaagaattgcatatgagagaatgtgcaacatcctcaaagggaaattccaaacagcagcacaaagggcaatgatggatcaagtgcgagagagcagaaatcctgggaatgctgaaatagaagatctcatttttctggcaaggtctgcactcatcctgagaggatcagtggctcataaatcctgcttgcctgcttgtgtgtacggacttgcagtggctagtggatatgactttgagagagaagggtactccttggttggaatagatcctttccgtctgcttcaaaacagccaggtctttagtctcattagaccaaatgagaacccagcacataagagccaactagtgtggatggcatgccactctgcagcgtttgaggaccttagggtctcaagtttcattagagggacaagaatggtcccaagaggacagctatccactagaggggttcaaattgcttcaaatgagaacatggaagcaatggactccaatactcttgaactgagaagtagatattgggctataagaaccagaagcggagggaacaccaaccaacagagggcatctgcaggacaggtcagcgttcaacccactttctcagtacagagaaaccttcctttcgaaagagcaaccattatggcagcatttacaggaaatactgagggtagaacgtctgacatgaggactgaaatcataagaatgatggaaagtgccagaccagaagatgtgtcattccaggggcggggagtcttcgagctctcggacgaaaaggcaacgaacccgatcgtgccttcctttgacatgaataatgaaggatcttatttcttcggagacaatgcagaggagtatgacaattga

SEQ ID NO: 11671 - DNA, 141 bp, unidentified; identical to SEQ ID NO: 2596
  source 1..141: mol_type = other DNA
  misc_feature 1..141: note = Synthetic

SEQ ID NO: 11672 - DNA, 12 bp, unidentified
  source 1..12: mol_type = other DNA
  misc_feature 1..12: note = Synthetic
gtgctttcttga

SEQ ID NO: 11673 - DNA, 1902 bp, unidentified
  misc_feature 1..1902: note = Synthetic
  source 1..1902: mol_type = other DNA
ttgaccgcgaaatttgaacgagcagcagccatgccgggtttctacgagatcgtgatcaaggtgccgagcgacctggacgagcacctgccgggcatttctgactcgtttgtgaactgggtggccgagaaggaatgggagctgcccccggattctgacatggatctgaatctgatcgagcaggcacccctgaccgtggccgagaagctgcagcgcgacttcctggtccaatggcgccgcgtgagtaaggccccggaggccctgttctttgttcagttcgagaagggcgagagctacttccaccttcacgttctggtggagaccacgggggtcaagtccatggtgctaggccgcttcctgagtcagattcgggagaagctggtccagaccatctaccgcggggtcgagcccacgctgcccaactggttcgcggtgaccaagacgcgtaatggcgccggcggggggaacaaggtggtggacgagtgctacatccccaactacctcctgcccaagacccagcccgagctgcagtgggcgtggactaacatggaggagtatataagcgcgtgtttgaacctggccgaacgcaaacggctcgtggcgcagcacctgacccacgtcagccagacgcaggagcagaacaaggagaatctgaaccccaattctgacgcgcccgtgatcaggtcaaaaacctccgcgcgctacatggagctggtcgggtggctggtggaccggggcatcacctccgagaagcagtggatccaggaggaccaggcctcgtacatctccttcaacgccgcctccaactcgcggtcccagatcaaggccgcgctggacaatgccggcaagatcatggcgctgaccaaatccgcgcccgactacctggtggggccctcgctgcccgcggacattaaaaccaaccgcatctaccgcatcctggagctgaacgggtacgatcctgcctacgccggctccgtctttctcggctgggcccagaaaaagttcgggaagcgcaacaccatctggctgtttgggcccgccaccaccggcaagaccaacattgcggaagccatcgcccacgccgtgcccttctacggctgcgtcaactggaccaatgagaactttcccttcaacgattgcgtcgacaagatggtgatctggtgggaggagggcaagatgacggccaaggtcgtggagtccgccaaggccattctcggcggcagcaaggtgcgcgtggaccaaaagtgcaagtcgtccgcccagatcgaccccacccccgtgatcgtcacctccaacaccaacatgtgcgccgtgattgacgggaacagcaccaccttcgagcaccagcagccgttgcaggaccggatgttcaaatttgaactcacccgccgtctggagcacgactttggcaaggtgacgaagcaggaagtcaaagagttcttccgctgggccagtgatcacgtgaccgaggtggcgcatgagttctacgtcagaaagggcggagccagcaaaagacccgcccccgatgacgcggatataagcgagcccaagcgggcctgcccctcagtcgcggatccatcgacgtcagacgcggaaggagctccggtggactttgccgacaggtaccaaaacaaatgttctcgtcacgcgggcatgattcagatgctgtttccctgcaaaacgtgcgagagaatgaatcagaatttcaacatttgcttcacacacggggtcagagactgtttagagtgtttccccggcgtgtcagaatctcaaccggtcgtcagaaaaaagacgtatcggaaactctgcgcgattcatcatctgctggggcgggcgcccgagattgcttgctcggcctgcgacctggtcaacgtggacctggacgactgcgtttctgagcaataa

SEQ ID NO: 11674 - DNA, 72 bp, unidentified; identical to SEQ ID NO: 2602
  source 1..72: mol_type = other DNA
  misc_feature 1..72: note = Synthetic

SEQ ID NO: 11675 - DNA, 60 bp, unidentified; identical to SEQ ID NO: 2603
  misc_feature 1..60: note = Synthetic
  source 1..60: mol_type = other DNA

SEQ ID NO: 11676 - DNA, 63 bp, unidentified
  misc_feature 1..63: note = Synthetic
  source 1..63: mol_type = other DNA
atggaaaaaaggtgtttgctatgctgcatgtgtgagatgtgttgcacgcacagctgcgtatga

SEQ ID NO: 11677 - DNA, 96 bp, unidentified; identical to SEQ ID NO: 2605
  misc_feature 1..96: note = Synthetic
  source 1..96: mol_type = other DNA

SEQ ID NO: 11678 - DNA, 15 bp, unidentified
  misc_feature 1..15: note = Synthetic
  source 1..15: mol_type = other DNA
atggcggatgtgtga

SEQ ID NO: 11679 - DNA, 7296 bp, unidentified
  source 1..7296: mol_type = other DNA
  misc_feature 1..7296: note = Synthetic
atggccgccaaagtgcatgttgatattgaggctgacagcccattcatcaagtctttgcagaaggcatttccgtcgttcgaggtggagtcattgcaggtcacaccaaatgaccatgcaaatgccagagcattttcgcacctggctaccaaattgatcgagcaggagactgacaaagacacactcatcttggatatcggcagtgcgccttccaggagaatgatgtctacgcacaaataccactgcgtatgccctatgcgcagcgcagaagaccccgaaaggctcgatagctacgcaaagaaactggcagcggcctccgggaaggtgctggatagagagatcgcaggaaaaatcaccgacctgcagaccgtcatggctacgccagacgctgaatctcctaccttttgcctgcatacagacgtcacgtgtcgtacggcagccgaagtggccgtataccaggacgtgtatgctgtacatgcaccaacatcgctgtaccatcaggcgatgaaaggtgtcagaacggcgtattggattgggtttgacaccaccccgtttatgtttgacgcgctagcaggcgcgtatccaacctacgccacaaactgggccgacgagcaggtgttacaggccaggaacataggactgtgtgcagcatccttgactgagggaagactcggcaaactgtccattctccgcaagaagcaattgaaaccttgcgacacagtcatgttctcggtaggatctacattgtacactgagagcagaaagctactgaggagctggcacttaccctccgtattccacctgaaaggtaaacaatcctttacctgtaggtgcgataccatcgtatcatgtgaagggtacgtagttaagaaaatcactatgtgccccggcctgtacggtaaaacggtagggtacgccgtgacgtatcacgcggagggattcctagtgtgcaagaccacagacactgtcaaaggagaaagagtctcattccctgtatgcacctacgtcccctcaaccatctgtgatcaaatgactggcatactagcgaccgacgtcacaccggaggacgcacagaagttgttagtgggattgaatcagaggatagttgtgaacggaagaacacagcgaaacactaacacgatgaagaactatctgcttccgattgtggccgtcgcatttagcaagtgggcgagggaatacaaggcagaccttgatgatgaaaaacctctgggtgtccgagagaggtcacttacttgctgctgcttgtgggcatttaaaacgaggaagatgcacaccatgtacaagaaaccagacacccagacaatagtgaaggtgccttcagagtttaactcgttcgtcatcccgagcctatggtctacaggcctcgcaatcccagtcagatcacgcattaagatgcttttggccaagaagaccaagcgagagttaatacctgttctcgacgcgtcgtcagccagggatgctgaacaagaggagaaggagaggttggaggccgagctgactagagaagccttaccacccctcgtccccatcgcgccggcggagacgggagtcgtcgacgtcgacgttgaagaactagagtatcacgcaggtgcaggggtcgtggaaacacctcgcagcgcgttgaaagtcaccgcacagccgaacgacgtactactaggaaattacgtagttctgtccccgcagaccgtgctcaagagctccaagttggcccccgtgcaccctctagcagagcaggtgaaaataataacacataacgggagggccggcggttaccaggtcgacggatatgacggcagggtcctactaccatgtggatcggccattccggtccctgagtttcaagctttgagcgagagcgccactatggtgtacaacgaaagggagttcgtcaacaggaaactataccatattgccgttcacggaccgtcgctgaacaccgacgaggagaactacgagaaagtcagagctgaaagaactgacgccgagtacgtgttcgacgtagataaaaaatgctgcgtcaagagagaggaagcgtcgggtttggtgttggtgggagagctaaccaaccccccgttccatgaattcgcctacgaagggctgaagatcaggccgtcggcaccatataagactacagtagtaggagtctttggggttccgggatcaggcaagtctgctattattaagagcctcgtgaccaaacacgatctggtcaccagcggcaagaaggagaactgccaggaaatagttaacgacgtgaagaagcaccgcgggaaggggacaagtagggaaaacagtgactccatcctgctaaacgggtgtcgtcgtgccgtggacatcctatatgtggacgaggctttcgcttgccattccggtactctgctggccctaattgctcttgttaaacctcggagcaaagtggtgttatgcggagaccccaagcaatgcggattcttcaatatgatgcagcttaaggtgaacttcaaccacaacatctgcactgaagtatgtcataaaagtatatccagacgttgcacgcgtccagtcacggccatcgtgtctacgttgcactacggaggcaagatgcgcacgaccaacccgtgcaacaaacccataatcatagacaccacaggacagaccaagcccaagccaggagacatcgtgttaacatgcttccgaggctgggcaaagcagctgcagttggactaccgtggacacgaagtcatgacagcagcagcatctcagggcctcacccgcaaaggggtatacgccgtaaggcagaaggtgaatgaaaatcccttgtatgcccctgcgtcggagcacgtgaatgtactgctgacgcgcactgaggataggctggtgtggaaaacgctggccggcgatccctggattaaggtcctatcaaacattccacagggtaactttacggccacattggaagaatggcaagaagaacacgacaaaataatgaaggtgattgaaggaccggctgcgcctgtggacgcgttccagaacaaagcgaacgtgtgttgggcgaaaagcctggtgcctgtcctggacactgccggaatcagattgacagcagaggagtggagcaccataattacagcatttaaggaggacagagcttactctccagtggtggccttgaatgaaatttgcaccaagtactatggagttgacctggacagtggcctgttttctgccccgaaggtgtccctgtattacgagaacaaccactgggataacagacctggtggaaggatgtatggattcaatgccgcaacagctgccaggctggaagctagacataccttcctgaaggggcagtggcatacgggcaagcaggcagttatcgcagaaagaaaaatccaaccgctttctgtgctggacaatgtaattcctatcaaccgcaggctgccgcacgccctggtggctgagtacaagacggttaaaggcagtagggttgagtggctggtcaataaagtaagagggtaccacgtcctgctggtgagtgagtacaacctggctttgcctcgacgcagggtcacttggttgtcaccgctgaatgtcacaggcgccgataggtgctacgacctaagtttaggactgccggctgacgccggcaggttcgacttggtctttgtgaacattcacacggaattcagaatccaccactaccagcagtgtgtcgaccacgccatgaagctgcagatgcttgggggagatgcgctacgactgctaaaacccggcggcatcttgatgagagcttacggatacgccgataaaatcagcgaagccgttgtttcctccttaagcagaaagttctcgtctgcaagagtgttgcgcccggattgtgtcaccagcaatacagaagtgttcttgctgttctccaactttgacaacggaaagagaccctctacgctacaccagatgaataccaagctgagtgccgtgtatgccggagaagccatgcacacggccgggtgtgcaccatcctacagagttaagagagcagacatagccacgtgcacagaagcggctgtggttaacgcagctaacgcccgtggaactgtaggggatggcgtatgcagggccgtggcgaagaaatggccgtcagcctttaagggagcagcaacaccagtgggcacaattaaaacagtcatgtgcggctcgtaccccgtcatccacgctgtagcgcctaatttctctgccacgactgaagcggaaggggaccgcgaattggccgctgtctaccgggcagtggccgccgaagtaaacagactgtcactgagcagcgtagccatcccgctgctgtccacaggagtgttcagcggcggaagagataggctgcagcaatccctcaaccatctattcacagcaatggacgccacggacgctgacgtgaccatctactgcagagacaaaagttgggagaagaaaatccaggaagccattgacatgaggacggctgtggagttgctcaatgatgacgtggagctgaccacagacttggtgagagtgcacccggacagcagcctggtgggtcgtaagggctacagtaccactgacgggtcgctgtactcgtactttgaaggtacgaaattcaaccaggctgctattgatatggcagagatactgacgttgtggcccagactgcaggaggcaaacgaacggatatgcctatacgcgctgggcgaaacaatggacaacatcggatccaaatgtccggtgaacgattccgattcatcaacacctcccaggacagtgccctgcctgtgccgctacgcaatgacagcagaacggatcgcccgccttaggtcacaccaagttaaaagcatggtggtttgctcatcttttcccctcccgaaataccatgtagatggggtgcagaaggtaaagtgcgagaaggttctcctgttcgacccgacggtaccttcagtggttagtccgcggaagtatgccgcatctacgacggaccactcagatcggtcgttacgagggtttgacttggactggaccaccgactcgtcttccactgccagcgataccatgtcgctacccagtttgcagtcgtgtgacatcgactcgatctacgagccaatggctcccatagtagtgacggctgacgtacaccctgaacccgcaggcatcgcggacctggcggcagatgtgcaccctgaacccgcagaccatgtggacctcgagaacccgattcctccaccgcgcccgaagagagctgcataccttgcctcccgcgcggcggagcgaccggtgccggcgccgagaaagccgacgcctgccccaaggactgcgtttaggaacaagctgcctttgacgttcggcgactttgacgagcacgaggtcgatgcgttggcctccgggattactttcggagacttcgacgacgtcctgcgactaggccgcgcgggtgcatatattttctcctcggacactggcagcggacatttacaacaaaaatccgttaggcagcacaatctccagtgcgcacaactggatgcggtccaggaggagaaaatgtacccgccaaaattggatactgagagggagaagctgttgctgctgaaaatgcagatgcacccatcggaggctaataagagtcgataccagtctcgcaaagtggagaacatgaaagccacggtggtggacaggctcacatcgggggccagattgtacacgggagcggacgtaggccgcataccaacatacgcggttcggtacccccgccccgtgtactcccctaccgtgatcgaaagattctcaagccccgatgtagcaatcgcagcgtgcaacgaatacctatccagaaattacccaacagtggcgtcgtaccagataacagatgaatacgacgcatacttggacatggttgacgggtcggatagttgcttggacagagcgacattctgcccggcgaagctccggtgctacccgaaacatcatgcgtaccaccagccgactgtacgcagtgccgtcccgtcaccctttcagaacacactacagaacgtgctagcggccgccaccaagagaaactgcaacgtcacgcaaatgcgagaactacccaccatggactcggcagtgttcaacgtggagtgcttcaagcgctatgcctgctccggagaatattgggaagaatatgctaaacaacctatccggataaccactgagaacatcactacctatgtgaccaaattgaaaggcccgaaagctgctgccttgttcgctaagacccacaacttggttccgctgcaggaggttcccatggacagattcacggtcgacatgaaacgagatgtcaaagtcactccagggacgaaacacacagaggaaagacccaaagtccaggtaattcaagcagcggagccattggcgaccgcttacctgtgcggcatccacagggaattagtaaggagactaaatgctgtgttacgccctaacgtgcacacattgtttgatatgtcggccgaagactttgacgcgatcatcgcctctcacttccacccaggagacccggttctagagacggacattgcatcattcgacaaaagccaggacgactccttggctcttacaggtttaatgatcctcgaagatctaggggtggatcagtacctgctggacttgatcgaggcagcctttggggaaatatccagctgtcacctaccaactggcacgcgcttcaagttcggagctatgatgaaatcgggcatgtttctgactttgtttattaacactgttttgaacatcaccatagcaagcagggtactggagcagagactcactgactccgcctgtgcggccttcatcggcgacgacaacatcgttcacggagtgatctccgacaagctgatggcggagaggtgcgcgtcgtgggtcaacatggaggtgaagatcattgacgctgtcatgggcgaaaaacccccatatttttgtgggggattcatagtttttgacagcgtcacacagaccgcctgccgtgtttcagacccacttaagcgcctgttcaagttgggtaagccgctaacagctgaagacaagcaggacgaagacaggcgacgagcactgagtgacgaggttagcaagtggttccggacaggcttgggggccgaactggaggtggcactaacatctaggtatgaggtagagggctgcaaaagtatcctcatagccatgaccaccttggcgagggacattaaggcgtttaagaaattgagaggacctgttatacacctctacggcggtcctagattggtgcgttaa

SEQ ID NO: 11680 - DNA, 39 bp, unidentified; identical to SEQ ID NO: 2609
  misc_feature 1..39: note = Synthetic
  source 1..39: mol_type = other DNA

SEQ ID NO: 11681 - DNA, 39 bp, unidentified; identical to SEQ ID NO: 2609
  source 1..39: mol_type = other DNA
  misc_feature 1..39: note = Synthetic

SEQ ID NO: 11682 - DNA, 1593 bp, unidentified
  misc_feature 1..1593: note = Synthetic
  source 1..1593: mol_type = other DNA
atggctaaaagatatgcatcaagaaagagagtttatcgtcgaaaagcgcggaaacctattaaaaggtttcgtcgatatcgtgttaaagcacgttcgacagctaaacgttattacaggcttaagagggctgctaggaattattcgaaagtcaagaagattagaagggctaaaaggcaatataaaacgatttctggcaaaggtgttaagaataaattggctaagctcacaatatcagaatttattcaattgccttattatgatcttattagacttgcttctatggtttgtagtaaagttactccagttggttaccatcttcctgagaatgatgttaaaaatttccacgatttttatatgtccaagtttctttacaaactgggtgctatattacctgagaagctttttactgcttctaatccttttattgttggatctgataatcctcttcctccttatttgtatggctataatcccatacttacgccggttacctgcggtcaaaaaatgcaaatttatgcgtcactttattccaaatttaaatatgttggtatcaaagtttcatggcatccaaggaatagagcagtttcatcatatcttccttctgaattcaaattaaagtatgatggtgatgttttgtctatggcttctcttacaacagacccaacttcagatggtgtaccatcaacaattgcacagggaaatgcaatgtttactcctaaggaacgtttaaatcagacagtagagttgactaaaacagaagctaatgtatcaggaaattattacatgcatgtttattttggaaaacagattgaatcatcaaagacatgggatttaccgtatttccaatggattaaacaacaaaatcaaggatattatcaacgggttagccatatggataatgattctaataaaggaagggttaaagctgctccttattatgattataatacacttcttccatgtattgaaagcaattcaaagttacataaagtatatgatatgtcaaagcctttttcattctttgttaggccaatggttattgattcatctacagtgaaggaggctaatgagggtgctgcatctaatattgaagttgtaagtaatgttcataagtttgaaacattaactaaagggcttaaacatcttggttatcgttcatttgatcatgcattagtaccaccaacagtagaaataccacaagataatcaacaacttgatgatgctatgatgaatagatgggctattaattcagatgatgataactttttcaatcctactatgttttggtattgttttacaacatcagatactccaccagatagtagttattctaattctacaccatatcaagcattacatttcccatattataatgcacaaataccttcaaatgctccaaatgcaagagctagagcagagttgtcagcacattttggaacgtataatgatgctcttaatcaatatggttattttgatgtaacattctataccaaatggaagggagagaggcctttggtctcgaaatcttcctatactggtatagtaccatcagaaacaggtgtcactggtttatccaccatcatttctaattaa

SEQ ID NO: 11683 - DNA, 816 bp, unidentified
  source 1..816: mol_type = other DNA
  misc_feature 1..816: note = Synthetic
atggctaaaagatatgcatcaagaaagagagtttatcgtcgaaaagcgcggaaacctattaaaaggtttcgtcgatatcgtgttaaagcacgttcgacagctaaacgttattacaggcttaagagggctgctaggaattattcgaaagtcaagaagattagaagggctaaaaggcaatataaaacgatttctggcaaaggtgttaagaataaattggctaagctcacaatatcagaatttattcaattgccttattatgatcttattagacttgcttctatggtttgtagtaaagttactccagttggttaccatcttcctgagaatgatgttaaaaatttccacgatttttatatgtccaagtttctttacaaactgggtgctatattacctgagaagctttttactgcttctaatccttttattgttggatctgataatcctcttcctccttatttgtatggctataatcccatacttacgccggttacctgcggtcaaaaaatgcaaatttatgcgtcactttattccaaatttaaatatgttggtatcaaagtttcatggcatccaaggaatagagcagtttcatcatatcttccttctgaattcaaattaaagtatgatggtgatgttttgtctatggcttctcttacaacagacccaacttcagatggtgtaccatcaacaattgcacagggaaatgcaatgtttactcctaaggaacgtttaaatcagacagtagagttgactaaaacagaagctaatgtatcaggaaattattacatgcatgtttattttggaaaacagattgaatca

SEQ ID NO: 11684 - DNA, 507 bp, unidentified
  source 1..507: mol_type = other DNA
  misc_feature 1..507: note = Synthetic
attacaggcttaagagggctgctaggaattattcgaaagtcaagaagattagaagggctaaaaggcaatataaaacgatttctggcaaaggtgttaagaataaattggctaagctcacaatatcagaatttattcaattgccttattatgatcttattagacttgcttctatggtttgtagtaaagttactccagttggttaccatcttcctgagaatgatgttaaaaatttccacgatttttatatgtccaagtttctttacaaactgggtgctatattacctgagaagctttttactgcttctaatccttttattgttggatctgataatcctcttcctccttatttgtatggctataatcccatacttacgccggttacctgcggtcaaaaaatgcaaatttatgcgtcactttattccaaatttaaatatgttggtatcaaagtttcatggcatccaaggaatagagcagtttcatcatatcttccttctgaattcaaattaa

SEQ ID NO: 11685 - DNA, 507 bp, unidentified; identical to SEQ ID NO: 11684
  source 1..507: mol_type = other DNA
  misc_feature 1..507: note = Synthetic

SEQ ID NO: 11686 - DNA, 1593 bp, unidentified
  source 1..1593: mol_type = other DNA
  misc_feature 1..1593: note = Synthetic
atggctaagagatatgcatcaagaaagagagtttatcgtcgaaaaacgcggaaaccttttagaagggttcgtcgatatcgtgttaaagcacgttcgacagctaaacgttattacaggcttaagagggctgctaggaattattcgaaagtcaagaagattagaagggctaaaaggcaatataaaacgatttctggcaaaggtgttaagaataaattggctaagctcacaatatcagaatttattcaattgccttattatgatcttattagacttgcttctatggtttgtagtaaagttactccagttggttaccctcttcctgagcaagatgtacgaaatttccacgatttttatatgtccaagtttctttacaaactgggtgctatattacctgagaagctttttactgcttctaatccttttattgttggatctgataatcctcttcctccttatttgtatggctataatcccatacttacgccggttacctgcggtcaaaaaatgcaaatttatgcgtcactttattccaaatttaaatatgttggtatcaaagtttcatggcatccaaggaataaagcggtctcatcatatgtacctgctgaatttactataaaacctactcaggatgtagtaacagaggctggtttagttgtacgaccaggtacagcaccagttccatcaacaatagcacagggaaatgtaatgattacttctaaggatcgtttaaatcagatagtagagttgactaaaacagaagccaatgtatcaggaaattattacatgcatgtttattttggaaaacagattgaatcatcaaagacatgggatttaccgtatttccaatgggtgaaagaacaacaacaaggatattatcaacgggttagcaatatggatattgattctaataaaggaagggttaaagctgctccttattatgattataatacacttcttccatgtattgaaagcaattcaaagttacataaagtatatgatatgtcaaagcctttttcattctttgttaggccaatggttattgattcatctacagtgaaggaggctaatgagggtgctgcatctaatattgaagttgtaagtaatgttcataagtttgaaacattaactaaagggcttaaacatcttggttatcgttcatttgatcatgcattagtaccaccatcagtagaaatacctcaagataatcaacaacttgatgaagttatgaaaaatagatgggctattaattcagatgatgataactttttcaatcctactatgttttggtattgttttacaacatcagattctccaccagatagtagttatactaattctacaccatatcaagcattacctttctcattttataattcacagatatcttcaaatactccaaatgcaaaagctagagcagagttgtcagcacattttggaacgtataatgatgctcttaatcaatatggttattttgatgtaacattctataccaaatggaagggagagaggcctttggtctcgaaatcttcctatactggtatagtaccttcagaaacaggtgttactggtttatcaacaattatttctaattaa

SEQ ID NO: 11687 - DNA, 816 bp, unidentified
  misc_feature 1..816: note = Synthetic
  source 1..816: mol_type = other DNA
atggctaagagatatgcatcaagaaagagagtttatcgtcgaaaaacgcggaaaccttttagaagggttcgtcgatatcgtgttaaagcacgttcgacagctaaacgttattacaggcttaagagggctgctaggaattattcgaaagtcaagaagattagaagggctaaaaggcaatataaaacgatttctggcaaaggtgttaagaataaattggctaagctcacaatatcagaatttattcaattgccttattatgatcttattagacttgcttctatggtttgtagtaaagttactccagttggttaccctcttcctgagcaagatgtacgaaatttccacgatttttatatgtccaagtttctttacaaactgggtgctatattacctgagaagctttttactgcttctaatccttttattgttggatctgataatcctcttcctccttatttgtatggctataatcccatacttacgccggttacctgcggtcaaaaaatgcaaatttatgcgtcactttattccaaatttaaatatgttggtatcaaagtttcatggcatccaaggaataaagcggtctcatcatatgtacctgctgaatttactataaaacctactcaggatgtagtaacagaggctggtttagttgtacgaccaggtacagcaccagttccatcaacaatagcacagggaaatgtaatgattacttctaaggatcgtttaaatcagatagtagagttgactaaaacagaagccaatgtatcaggaaattattacatgcatgtttattttggaaaacagattgaatca

SEQ ID NO: 11688 - DNA, 507 bp, unidentified
  misc_feature 1..507: note = Synthetic
  source 1..507: mol_type = other DNA
attacaggcttaagagggctgctaggaattattcgaaagtcaagaagattagaagggctaaaaggcaatataaaacgatttctggcaaaggtgttaagaataaattggctaagctcacaatatcagaatttattcaattgccttattatgatcttattagacttgcttctatggtttgtagtaaagttactccagttggttaccctcttcctgagcaagatgtacgaaatttccacgatttttatatgtccaagtttctttacaaactgggtgctatattacctgagaagctttttactgcttctaatccttttattgttggatctgataatcctcttcctccttatttgtatggctataatcccatacttacgccggttacctgcggtcaaaaaatgcaaatttatgcgtcactttattccaaatttaaatatgttggtatcaaagtttcatggcatccaaggaataaagcggtctcatcatatgtacctgctgaatttactataa

SEQ ID NO: 11689 - DNA, 507 bp, unidentified; identical to SEQ ID NO: 11688
  source 1..507: mol_type = other DNA
  misc_feature 1..507: note = Synthetic

SEQ ID NO: 11690 - DNA, 1593 bp, unidentified
  misc_feature 1..1593: note = Synthetic
  source 1..1593: mol_type = other DNA
atggctaagagatatgcatcaagaaagagagtttatcgtcgaaaaacgcggaaaccttttagaagggttcgtcgatatcgtgttaaagcacgttcgacagctaaacgttattacaggcttaagagggctgctaggaattattcgaaagttaagaagattagaagggctaaaaggcaatataaaacgatttctggcaaaggtgttaagaataaattggctaagctcacaatatcagaatttattcaattgccttattatgatcttattagacttgcttctatggtttgtagtaaagttactccagttggttaccctattcctgagcaagatgtacgaaatttccacgatttttatatgtccaagtttctttacaaactgggtgctatattacctgagaagctttttactgcttctaatccttttattgttggatctgataatcctcttcctccttatttgtatggctataatcccatacttacgccggttacctgcggtcaaaaaatgcaaatttatgcgtcactttattccaaatttaaatatgttggtatcaaagtttcatggcatccaaggaatagagcagtttcatcatatcttccttctgaattcaaattaaagtatgatggtgatgttttgtctatggctgctcttacaccaaatccagctgaagatggtgtaccatcaacaattgcacagggaaatgcaatgtatactcctaaggaacgtttaaatcagacagtagagttgactaaaacagaagctaatgtatcaggaaattattacatgcatgtttattttggaaaacagattgaatcatcaaagacatgggatttaccgtatttccaatgggtgaaacaacaaaataatgattattatcaacgggttagcaatatggataataattctaataaaggaagggttaaagctgctccttattatgattataatacacttcttccatgtattgaaagcaattcaaagttacataaagtatatgatatgtcaaagcctttttcattctttgttaggccaatggttattgattcatctacagtgaaggaggctaatgagggtgctgcatctaatattgaagttgtaagtaatgttcataagtttgaaacattaactaaagggcttaaacatcttggttatcgttcatttgatcatgcattagtaccatcaacagtagaaataccacaagataatcaacaacttgatgaatttatgaaaaatagatgggctattaattcagatgatgataactttttcaatcctactatgttttggtattgttttacaacatcagatactccaccagatagtagttattctaattctacaccatatcaagcattacatttcccatattataatgcacaaataccttcaaatgctccaaatgcaagagctagagcagagttgtcagcacattttggaacgtataatgatgctcttaatcaatatggttattttgatgtaacattctataccaaatggaagggagagaggcctttggtctcgaaatcttcctatactggtatagtaccatcagaaacaggtgtcactggtttatcaacaattatttctaattaa

SEQ ID NO: 11691 - DNA, 816 bp, unidentified
  source 1..816: mol_type = other DNA
  misc_feature 1..816: note = Synthetic
atggctaagagatatgcatcaagaaagagagtttatcgtcgaaaaacgcggaaaccttttagaagggttcgtcgatatcgtgttaaagcacgttcgacagctaaacgttattacaggcttaagagggctgctaggaattattcgaaagttaagaagattagaagggctaaaaggcaatataaaacgatttctggcaaaggtgttaagaataaattggctaagctcacaatatcagaatttattcaattgccttattatgatcttattagacttgcttctatggtttgtagtaaagttactccagttggttaccctattcctgagcaagatgtacgaaatttccacgatttttatatgtccaagtttctttacaaactgggtgctatattacctgagaagctttttactgcttctaatccttttattgttggatctgataatcctcttcctccttatttgtatggctataatcccatacttacgccggttacctgcggtcaaaaaatgcaaatttatgcgtcactttattccaaatttaaatatgttggtatcaaagtttcatggcatccaaggaatagagcagtttcatcatatcttccttctgaattcaaattaaagtatgatggtgatgttttgtctatggctgctcttacaccaaatccagctgaagatggtgtaccatcaacaattgcacagggaaatgcaatgtatactcctaaggaacgtttaaatcagacagtagagttgactaaaacagaagctaatgtatcaggaaattattacatgcatgtttattttggaaaacagattgaatca

SEQ ID NO: 11692 - DNA, 603 bp, unidentified
  misc_feature 1..603: note = Synthetic
  source 1..603: mol_type = other DNA
atgcatcaagaaagagagtttatcgtcgaaaaacgcggaaaccttttagaagggttcgtcgatatcgtgttaaagcacgttcgacagctaaacgttattacaggcttaagagggctgctaggaattattcgaaagttaagaagattagaagggctaaaaggcaatataaaacgatttctggcaaaggtgttaagaataaattggctaagctcacaatatcagaatttattcaattgccttattatgatcttattagacttgcttctatggtttgtagtaaagttactccagttggttaccctattcctgagcaagatgtacgaaatttccacgatttttatatgtccaagtttctttacaaactgggtgctatattacctgagaagctttttactgcttctaatccttttattgttggatctgataatcctcttcctccttatttgtatggctataatcccatacttacgccggttacctgcggtcaaaaaatgcaaatttatgcgtcactttattccaaatttaaatatgttggtatcaaagtttcatggcatccaaggaatagagcagtttcatcatatcttccttctgaattcaaattaa

SEQ ID NO: 11693 - DNA, 603 bp, unidentified; identical to SEQ ID NO: 11692
  misc_feature 1..603: note = Synthetic
  source 1..603: mol_type = other DNA

SEQ ID NO: 11694 - DNA, 1593 bp, unidentified
  source 1..1593: mol_type = other DNA
  misc_feature 1..1593: note = Synthetic
atggctaagagatatgcatcaagaaagagagtttatcgtcgaaaaacgcggaaaccttttagaagggttcgtcgatatcgtgttaaggcacgttcgacagctaaacgttattacaggcttaagagggctgctaggaattattcgaaagtcaagaagattagaagggctaagaggcaatataagacaatgtctggcaaaggtgttaagaataaattggctaagctcacaatatcagaatttattcaattgccttattatgatcttattagacttgcttctatggtttgcagtagaattactccaactggttatcctcttaataacgaacagatggaatcttttgttaaggaatatttacccggctttctttacaaaatgggtgctatactacctgagaagctttttactgcttctaatccttttattgttggatatgataaggctcttcctccttatttgtatggctataatcccatacttacgccggttacctgcggtcaaaaaatgcaaatttatgcgtcactttattccaaatttaaatatgttggtatcaaagtttcatggcatccaaggaataaagcagtttcaacatatgtaccttctgaatacaaagtaacgtatgataaagatcctattgcattggctgctcttgcagcaactccaatagcagaaccagttccatcaacaatagcacagggaaatgcaatgtatactcctaaggatcgtttggatcataaggtacagttgactaaaacagaggcttctgtatcaggaaattattacatgcacgtttattttggaaaacagattgaatcatcaaagacatgggatttaccgtattttaaatgggctcagggtgaaaaccttttatatcttcaacaggttagtaatgataatagtaattctaataaaggaagggttaaagctgctccttattatgattataatacattacttccatgtattgaaggtaattcaaagttacataaagtatatgatatgtcaaagcctttttcattctttgttagaccaatggttattgatacatctacagtgaaggaggctaatgagaatgctgcagctaatattgaagttgtaactaatcaacataagtttgaaacattaactaaagggcttaaacatcttggttatcgttcatttgatcatgcattagtaccaccaacagtagaaataccacaagataatcaacaacttgatgaagttatgaaaaatagatgggagattaattcagatgatgataactttttcaatcctactatgttttggtattgttttacaacatcagataatccacctgaagcgagttatactaatcctacaccatatcaagcattacctttctcatattctaattcacagatatctccaaatacaccaaatgtaaaggctagaacagagttatcagcacattttggaacgtataatgatgctcttaatcaatatggttattttgatgtaacattctataccaaatggaagggagagaggcctttggtctcgaaatcttcctatactggtatagtaccatcagaaacaggtgtcactggtttatccaccatcatttctaattaa

SEQ ID NO: 11695 - DNA, 816 bp, unidentified
  source 1..816: mol_type = other DNA
  misc_feature 1..816: note = Synthetic
atggctaagagatatgcatcaagaaagagagtttatcgtcgaaaaacgcggaaaccttttagaagggttcgtcgatatcgtgttaaggcacgttcgacagctaaacgttattacaggcttaagagggctgctaggaattattcgaaagtcaagaagattagaagggctaagaggcaatataagacaatgtctggcaaaggtgttaagaataaattggctaagctcacaatatcagaatttattcaattgccttattatgatcttattagacttgcttctatggtttgcagtagaattactccaactggttatcctcttaataacgaacagatggaatcttttgttaaggaatatttacccggctttctttacaaaatgggtgctatactacctgagaagctttttactgcttctaatccttttattgttggatatgataaggctcttcctccttatttgtatggctataatcccatacttacgccggttacctgcggtcaaaaaatgcaaatttatgcgtcactttattccaaatttaaatatgttggtatcaaagtttcatggcatccaaggaataaagcagtttcaacatatgtaccttctgaatacaaagtaacgtatgataaagatcctattgcattggctgctcttgcagcaactccaatagcagaaccagttccatcaacaatagcacagggaaatgcaatgtatactcctaaggatcgtttggatcataaggtacagttgactaaaacagaggcttctgtatcaggaaattattacatgcacgtttattttggaaaacagattgaatca

SEQ ID NO: 11696 - DNA, 1593 bp, unidentified
  source 1..1593: mol_type = other DNA
  misc_feature 1..1593: note = Synthetic
atggctaagagatatgcatcaagaaagagagtttatcgtcgaaaagcgcggaaacctattaaaaggtttcgtcgatatcgtgttaaagcacgttcgacagctaaacgttattacaggcttaagagggctgctaggaattattcgaaagtcaagaagattagaagggctaaaaggcaatataaaacgatttctggcaaaggtgttaagaataaattggctaagctcacaatatcagaatttattcaattgccttattatgatcttattagacttgcttctatggtttgtagtaaagttactccagttggttaccatcttcctgagcaagatgttaaaaatttccacgatttttatatgttcaagtttctttacaaactgggtgctatattacctgagaagctttttactgcttctaatccttttgttgttggatctgataatccttttcctccttatttgtatggctataatcccatacttacgccggttacctgcggtcaaaaaatgcaaatttatgcgtcactttattccaaatttaaatatgttggtatcaaagtttcatggcatccaaggaatagagcagtttcatcatatcttccttctgaattcaaattaaagtatgatggtgatgttttgtctatggcttctcttacaacagacccaacttcagatggtgtaccatcaacaatagcacagggaaatgcaatgtttactcctaaggaacgtttaaatcagacagtagagttgactaaaacagaagccagtgtatcaggaaattattacatgcatgtttattttggaaaacagattgaatcatcaaagacatgggatttaccgtatttccaatggattaaacaacaaaatcaaggatattatcaacgggttagcaatatggataatgattctaataaaggaagggttaaagctgctccttattatgattataatacacttcttccatgtattgaaagcaattcaaagttacataaagtatatgatatgtcaaagcctttttcattctttgttaggccaatggttattgattcatctacagtgaaggaggctaatgagggtgctgcatctaatattgaagttgtaagtaatgttcataagtttgaaacattaactaaagggcttaaacatcttggttatcgttcatttgatcatgcattagtaccaccaacagtagaaataccacaagataatcaacaacttgatgatgctatgatgaatagatgggctattaattcagatgatgataactttttcaatcctactatgttttggtattgttttacaacatcagattcaccaccaaatagtagttattctaataatacaccatatcaatcattaccttattcattttataattcacagatatctccaaatactccaaatgcaaaagctagagcagagttgtcagcacattttggaacgtataatgatgctcttaatcaatatggttattttgatgtaacgttctataccaaatggaagggagagaggcctttggtctcgaaatcttcctatactggtatagtaccatcagaaacaggtgttactggtttatcaacaattatttctaattaa

SEQ ID NO: 11697 - DNA, 816 bp, unidentified
  misc_feature 1..816: note = Synthetic
  source 1..816: mol_type = other DNA
atggctaagagatatgcatcaagaaagagagtttatcgtcgaaaagcgcggaaacctattaaaaggtttcgtcgatatcgtgttaaagcacgttcgacagctaaacgttattacaggcttaagagggctgctaggaattattcgaaagtcaagaagattagaagggctaaaaggcaatataaaacgatttctggcaaaggtgttaagaataaattggctaagctcacaatatcagaatttattcaattgccttattatgatcttattagacttgcttctatggtttgtagtaaagttactccagttggttaccatcttcctgagcaagatgttaaaaatttccacgatttttatatgttcaagtttctttacaaactgggtgctatattacctgagaagctttttactgcttctaatccttttgttgttggatctgataatccttttcctccttatttgtatggctataatcccatacttacgccggttacctgcggtcaaaaaatgcaaatttatgcgtcactttattccaaatttaaatatgttggtatcaaagtttcatggcatccaaggaatagagcagtttcatcatatcttccttctgaattcaaattaaagtatgatggtgatgttttgtctatggcttctcttacaacagacccaacttcagatggtgtaccatcaacaatagcacagggaaatgcaatgtttactcctaaggaacgtttaaatcagacagtagagttgactaaaacagaagccagtgtatcaggaaattattacatgcatgtttattttggaaaacagattgaatca

SEQ ID NO: 11698 - DNA, 507 bp, unidentified
  source 1..507: mol_type = other DNA
  misc_feature 1..507: note = Synthetic
attacaggcttaagagggctgctaggaattattcgaaagtcaagaagattagaagggctaaaaggcaatataaaacgatttctggcaaaggtgttaagaataaattggctaagctcacaatatcagaatttattcaattgccttattatgatcttattagacttgcttctatggtttgtagtaaagttactccagttggttaccatcttcctgagcaagatgttaaaaatttccacgatttttatatgttcaagtttctttacaaactgggtgctatattacctgagaagctttttactgcttctaatccttttgttgttggatctgataatccttttcctccttatttgtatggctataatcccatacttacgccggttacctgcggtcaaaaaatgcaaatttatgcgtcactttattccaaatttaaatatgttggtatcaaagtttcatggcatccaaggaatagagcagtttcatcatatcttccttctgaattcaaattaa

SEQ ID NO: 11699 - DNA, 507 bp, unidentified; identical to SEQ ID NO: 11698
  misc_feature 1..507: note = Synthetic
  source 1..507: mol_type = other DNA

SEQ ID NO: 11700 - DNA, 1593 bp, unidentified
  misc_feature 1..1593: note = Synthetic
  source 1..1593: mol_type = other DNA
atggctaagagatatgcatcaagaaagagagtttatcgtcgaaaagcgcggaaaccttttagaagggttcgtcgatatcgtgttaaagcacgttcgacagctaaacgttattacaggcttaagagggctgctaggaattattcgaaagtcaagaagattagaagggctaaaaggcaatataaaacgatttctggcaaaggtgttaagaataaattggctaagctttcaatatcagaatttattcaattgccttattatgaccttattagacttgcttctatggtttgtagtaaagttactccagttggttaccttcttcctgagaatgatgttaaaaatttccacgatttttatatgtacaagtttctttacaaactgggtgctatattacctgagaagctttttactgcttctaatccttttattgttggatctgataatccttttcctccttatttgtatggctataatcccatacttacgccggttacctgcggtcaaaaaatgcaaatttatgcgtcactttattccaaatttaaatatgttggtatcaaagtttcatggcatccaaggaatagagcagtttcatcatatcttccttctgaattcaaattaaagtatgatggtgatgttttgtctatggcttctcttacaacagacccaacttcagatggtgtaccatcaacaatagcacagggaaatgcaatgtttactcctaaggaacgtttaaatcagacagtagagttgactaaaacagaagccagtgtatcaggaaattattacatgcatgtttattttggaaaacagattgaatcatcaaagacatgggatttaccgtatttccaatgggtgaaacaacaacaacaaggattttatcaacgggttagcaatatggatagtgattctaataaaggaagggttaaagctgctccttattatgattataatacacttcttccatgtattgaaagcaattcaaagttacataaagtatatgatatgtcaaagcctttttcattctttgttaggccaatggttattgattcatctacagtgaaggaggctaatgagggtgctgcatctaatattgaagttgtaagtaatgttcataagtttgaaacattaactaaagggcttaaacatcttggttatcgttcatttgatcatgcattagtaccaccaacagtagaaataccacaagataatcaacaacttgatgatgctatgagaaatagatgggctattaattcagatgatgataactttttcaatcctactatgttttggtattgttttacaacatcagattcaccaccaaatagtagttattctaataatacaccatatcaatcattaccttattcattttataattcacagatatctccaaatactccaaatgcaaaagctagagcagagttgtcagcacattttggaacgtataatgatgctcttaatcagtatggttattttgatgtaacattctataccaaatggaagggagagaggcctttggtctcgaaatcttcctatactggtatagtaccatcagaaacaggtgtcactggtttatccaccatcatttctaattaa

SEQ ID NO: 11701 - DNA, 816 bp, unidentified
  source 1..816: mol_type = other DNA
  misc_feature 1..816: note = Synthetic
atggctaagagatatgcatcaagaaagagagtttatcgtcgaaaagcgcggaaaccttttagaagggttcgtcgatatcgtgttaaagcacgttcgacagctaaacgttattacaggcttaagagggctgctaggaattattcgaaagtcaagaagattagaagggctaaaaggcaatataaaacgatttctggcaaaggtgttaagaataaattggctaagctttcaatatcagaatttattcaattgccttattatgaccttattagacttgcttctatggtttgtagtaaagttactccagttggttaccttcttcctgagaatgatgttaaaaatttccacgatttttatatgtacaagtttctttacaaactgggtgctatattacctgagaagctttttactgcttctaatccttttattgttggatctgataatccttttcctccttatttgtatggctataatcccatacttacgccggttacctgcggtcaaaaaatgcaaatttatgcgtcactttattccaaatttaaatatgttggtatcaaagtttcatggcatccaaggaatagagcagtttcatcatatcttccttctgaattcaaattaaagtatgatggtgatgttttgtctatggcttctcttacaacagacccaacttcagatggtgtaccatcaacaatagcacagggaaatgcaatgtttactcctaaggaacgtttaaatcagacagtagagttgactaaaacagaagccagtgtatcaggaaattattacatgcatgtttattttggaaaacagattgaatca

SEQ ID NO: 11702 - DNA, 507 bp, unidentified
  source 1..507: mol_type = other DNA
  misc_feature 1..507: note = Synthetic
attacaggcttaagagggctgctaggaattattcgaaagtcaagaagattagaagggctaaaaggcaatataaaacgatttctggcaaaggtgttaagaataaattggctaagctttcaatatcagaatttattcaattgccttattatgaccttattagacttgcttctatggtttgtagtaaagttactccagttggttaccttcttcctgagaatgatgttaaaaatttccacgatttttatatgtacaagtttctttacaaactgggtgctatattacctgagaagctttttactgcttctaatccttttattgttggatctgataatccttttcctccttatttgtatggctataatcccatacttacgccggttacctgcggtcaaaaaatgcaaatttatgcgtcactttattccaaatttaaatatgttggtatcaaagtttcatggcatccaaggaatagagcagtttcatcatatcttccttctgaattcaaattaa

SEQ ID NO: 11703 - DNA, 507 bp, unidentified; identical to SEQ ID NO: 11702
  source 1..507: mol_type = other DNA
  misc_feature 1..507: note = Synthetic

SEQ ID NO: 11704 - DNA, 1593 bp, unidentified
  source 1..1593: mol_type = other DNA
  misc_feature 1..1593: note = Synthetic
atggctaagagatatgcatcaagaaagagagtttatcgtcgaaaagcgcgtaaaccttttagaagggttcgtcgatatcgtgttaaagcacgttcgacagctaaacgttattacaggcttaagagggctgctaggaattattcgaaagtcaagaagattagaagggctaaaaggcaatataaaacgatttctggcaaaggtgttaagaataaattggctaagctcacaatatcagaatttattcaattgccttattatgatcttattagacttgcttctatggtttgtagtaaagttactccagttggttatcctcttcctgagcaagatgttaaaaatttccacgatttttatatgttcaagtttctttacaaactgggtgctatattacctgagaagctttttactgcttctaatccttttattgttggatctgataatcctcttcctccttatttgtatggctataatcccatacttacgccggttacctgcggtcaaaaaatgcaaatttatgcgtcactttattccaaatttaaatatgttggtatcaaagtttcatggcatccaaggaatagagcagtttcatcatatcttccttctgaattcaaattaaagtatgatggtgatgttttgtctatggcttctcttacaacagacccaacttcagatggtgtaccatcaacaatagcacagggaaatgcaatgtatactcctaaggaacgtttaaatcagacagtagagttgactaaaacagaagctaatgtatcaggaaattattacatgcatgtttattttggaaaacagattgaatcatcaaagacatgggatttaccgtatttccaatgggtgaaacaacaaaatcaaggattttatcaacgggttagcaatatggataatgattctaataaaggaagggttaaagctgctccttattatgattataatacacttcttccatgtattgaaagcaattcaaagttacataaagtatatgatatgtcaaagcctttttcattctttgttaggccaatggttattgattcatctacagtgaaggaggctaatgagggtgctgcatctaatattgaagttgtaagtaatgttcataagtttgaaacattaactaaagggcttaaacatcttggttatcgttcatttgatcatgcattagtaccaccaacagtagaaataccacaagataatcaacaacttgatgatgctatgaaaaatagatgggctattaattcagatgatgataactttttcaatcctactatgttttggtattgttttacaacatcagattctccaccagatagtagttatactaattctacaccatatcaagcattacctttctcattttataattcacagatatcttcaaatactccaaatgcaaaagctagagcagagttgtcagcacattttggaacgtataatgatgctcttaatcaatatggttattttgatgtaacattctataccaaatggaagggagagaggcctttggtctcgaaatcttcctatactggtatagtaccatcagaaacaggtgttactggtttatccaccatcatttctaattaa

SEQ ID NO: 11705 - DNA, 816 bp, unidentified
  misc_feature 1..816: note = Synthetic
  source 1..816: mol_type = other DNA
atggctaagagatatgcatcaagaaagagagtttatcgtcgaaaagcgcgtaaaccttttagaagggttcgtcgatatcgtgttaaagcacgttcgacagctaaacgttattacaggcttaagagggctgctaggaattattcgaaagtcaagaagattagaagggctaaaaggcaatataaaacgatttctggcaaaggtgttaagaataaattggctaagctcacaatatcagaatttattcaattgccttattatgatcttattagacttgcttctatggtttgtagtaaagttactccagttggttatcctcttcctgagcaagatgttaaaaatttccacgatttttatatgttcaagtttctttacaaactgggtgctatattacctgagaagctttttactgcttctaatccttttattgttggatctgataatcctcttcctccttatttgtatggctataatcccatacttacgccggttacctgcggtcaaaaaatgcaaatttatgcgtcactttattccaaatttaaatatgttggtatcaaagtttcatggcatccaaggaatagagcagtttcatcatatcttccttctgaattcaaattaaagtatgatggtgatgttttgtctatggcttctcttacaacagacccaacttcagatggtgtaccatcaacaatagcacagggaaatgcaatgtatactcctaaggaacgtttaaatcagacagtagagttgactaaaacagaagctaatgtatcaggaaattattacatgcatgtttattttggaaaacagattgaatca

SEQ ID NO: 11706 - DNA, 507 bp, unidentified
  source 1..507: mol_type = other DNA
  misc_feature 1..507: note = Synthetic
attacaggcttaagagggctgctaggaattattcgaaagtcaagaagattagaagggctaaaaggcaatataaaacgatttctggcaaaggtgttaagaataaattggctaagctcacaatatcagaatttattcaattgccttattatgatcttattagacttgcttctatggtttgtagtaaagttactccagttggttatcctcttcctgagcaagatgttaaaaatttccacgatttttatatgttcaagtttctttacaaactgggtgctatattacctgagaagctttttactgcttctaatccttttattgttggatctgataatcctcttcctccttatttgtatggctataatcccatacttacgccggttacctgcggtcaaaaaatgcaaatttatgcgtcactttattccaaatttaaatatgttggtatcaaagtttcatggcatccaaggaatagagcagtttcatcatatcttccttctgaattcaaattaa

SEQ ID NO: 11707 - DNA, 507 bp, unidentified; identical to SEQ ID NO: 11706
  misc_feature 1..507: note = Synthetic
  source 1..507: mol_type = other DNA

SEQ ID NO: 11708 - DNA, 1350 bp, unidentified
  source 1..1350: mol_type = other DNA
  misc_feature 1..1350: note = Synthetic
atggctaagagatatgcatcaagaaagagagtttatcgtcgaaaagctcgtaaacctattaaaaggtttcgtcgatatcgtgttaaagcacgttcgacagctaaacgttattacaggcttaagagggctgctaggaattattcgaaagtcaagaagattagaagggctaaaaggcaatataaaacgatttctggcaaaggtgttaagaataaattggctaagctcacaatatcagaatttattcaattgccttattatgatcttattagacttgcttctatggtttgtagtaaagttactccagttggttaccctattcctgagcaagatgtacgaaatttccacgatttttatatgtccaagtttctttacaaactgggtgctatattacctgagaagctttttactgcttctaatccttttattgttggatctgataatcctcttcctccttatttgtatggctataatcccatacttacgccggttacctgcggtcaaaaaatgcagatttacgcatcactttattccaaatttaaatatgttggtatcaaagtttcatggcatccaaggaatagagcagtttcatcatatcttccttctgaattcaaattaaagtatgatggtgatgttttgtctatggcttctcttacaacagacccaacttcagatggtgtaccatcaacaatagcacagggaaatgcaatgtttactcctaaggaacgtttaaatcagacagtagagttgactaaaacagaagctaatgtatcaggaaattattacatgcatgtttattttggaaaacagattgaatcatcaaagacatgggatttaccgtatttccaatgggtgaaacaacaacaacaaggattttatcaacgggttagcaatatggatagtgattctaataaaggaagggttaaagctgctccttattatgattataatacgcttcttccatgtattgaaagcaattcaaagttacataaagtatatgatatgtcaaagcctttttcattttttgttaggccaatggttattgattcatctacagtgaaggaggctaatgagggtgctgcatttaatattgaagttgtaagtaatgttcataagtttgaaacattaactaaagggcttaaacattttggttattgtttatttgattatgcattagtaccattaacagtagaaataccacaagataatcaacaacttgatgaatttatgaaaaatagatgggctattaattcagatgatgataacttttttaattttactatgttttggtattgttttacaacatcagatactccaccagatagtagttattctaattctacaccatattaa

SEQ ID NO: 11709 - DNA, 816 bp, unidentified
  source 1..816: mol_type = other DNA
  misc_feature 1..816: note = Synthetic
atggctaagagatatgcatcaagaaagagagtttatcgtcgaaaagctcgtaaacctattaaaaggtttcgtcgatatcgtgttaaagcacgttcgacagctaaacgttattacaggcttaagagggctgctaggaattattcgaaagtcaagaagattagaagggctaaaaggcaatataaaacgatttctggcaaaggtgttaagaataaattggctaagctcacaatatcagaatttattcaattgccttattatgatcttattagacttgcttctatggtttgtagtaaagttactccagttggttaccctattcctgagcaagatgtacgaaatttccacgatttttatatgtccaagtttctttacaaactgggtgctatattacctgagaagctttttactgcttctaatccttttattgttggatctgataatcctcttcctccttatttgtatggctataatcccatacttacgccggttacctgcggtcaaaaaatgcagatttacgcatcactttattccaaatttaaatatgttggtatcaaagtttcatggcatccaaggaatagagcagtttcatcatatcttccttctgaattcaaattaaagtatgatggtgatgttttgtctatggcttctcttacaacagacccaacttcagatggtgtaccatcaacaatagcacagggaaatgcaatgtttactcctaaggaacgtttaaatcagacagtagagttgactaaaacagaagctaatgtatcaggaaattattacatgcatgtttattttggaaaacagattgaatca

SEQ ID NO: 11710 - DNA, 1593 bp, unidentified
  misc_feature 1..1593: note = Synthetic
  source 1..1593: mol_type = other DNA
atggctaagagatatgcatcaagaaagagagtttatcgtcgaaaagctcgtaaacctattaaaaggtttcgtcgatatcgtgttaaagcacgttcgacagctaaacgttattacaggcttaagagggctgctaggaattattcgaaagtcaagaagattagaagggctaaaaggcaatataaaacgatttctggcaaaggtgttaagaataaattggctaagctcacaatatcagaatttattcaattgccttattatgatcttattagacttgcttctatggtttgtagtaaagttactccagttggttaccctattcctgagcaagatgtacgaaatttccacgatttttatatgtccaagtttctttacaaactgggtgctatattacctgagaagctttttactgcttctaatccttttattgttggatctgataatcctcttcctccttatttgtatggctataatcccatacttacgccggttacctgcggtcaaaaaatgcaaatttatgcgtcactttattccaaatttaaatatgttggtatcaaagtttcatggcatccaaggaatagagcagtttcatcatatcttccttctgaattcaaattaaagtatgatggtgatgttttgtctatggcttctcttacaacagacccaacttcagatggtgtaccatcaacaatagcacagggaaatgcaatgtttactcctaaggaacgtttaaatcagacagtagagttgactaaaacagaagctaatgtatcaggaaattattacatgcatgtttattttggaaaacagattgaatcatcaaagacatgggatttaccgtatttccaatggataaaacaacaaaataatgattattatcaacgggttagccatatggataatgattctaataaaggaagggttaaagctgctccttattatgattataatacacttcttccatgtattgaaagcaattcaaagttacataaagtatatgatatgtcaaagcctttttcattctttgttaggccaatggttattgattcatctacagtgaaggaggctaatgagggtgctgcatctaatattgaagttgtaagtaatgttcataagtttgaaacattaactaaagggcttaaacatcttggttatcgttcatttgatcatgcattagtaccaccaacagtagaaataccacaagataatcaacaacttgatgttaatatgaaaaatagatgggctattaattcagatgatgataactttttcaatcctactatgttttggtattgttttacaacatcagattcaccaccaaatagtagttatactaattctacaccatatcaagcattaccttattcattttataattcacagatatctccaaatactccaaatgcaagagctagagcagagttgtcagcacattttggaacgtataatgatgctcttaatcagtatggttattttgatgtaacattctataccaaatggaagggagagaggcctttggtctcgaaatcttcctatactggtatagtaccatcagaaacaggtgtcactggtttatccaccatcatttctaattaa

SEQ ID NO: 11711 - DNA, 816 bp, unidentified
  source 1..816: mol_type = other DNA
  misc_feature 1..816: note = Synthetic
atggctaagagatatgcatcaagaaagagagtttatcgtcgaaaagctcgtaaacctattaaaaggtttcgtcgatatcgtgttaaagcacgttcgacagctaaacgttattacaggcttaagagggctgctaggaattattcgaaagtcaagaagattagaagggctaaaaggcaatataaaacgatttctggcaaaggtgttaagaataaattggctaagctcacaatatcagaatttattcaattgccttattatgatcttattagacttgcttctatggtttgtagtaaagttactccagttggttaccctattcctgagcaagatgtacgaaatttccacgatttttatatgtccaagtttctttacaaactgggtgctatattacctgagaagctttttactgcttctaatccttttattgttggatctgataatcctcttcctccttatttgtatggctataatcccatacttacgccggttacctgcggtcaaaaaatgcaaatttatgcgtcactttattccaaatttaaatatgttggtatcaaagtttcatggcatccaaggaatagagcagtttcatcatatcttccttctgaattcaaattaaagtatgatggtgatgttttgtctatggcttctcttacaacagacccaacttcagatggtgtaccatcaacaatagcacagggaaatgcaatgtttactcctaaggaacgtttaaatcagacagtagagttgactaaaacagaagctaatgtatcaggaaattattacatgcatgtttattttggaaaacagattgaatca

SEQ ID NO: 11712 - DNA, 1593 bp, unidentified
  misc_feature 1..1593: note = Synthetic
  source 1..1593: mol_type = other DNA
atggctaagagatatgcatcaagaaagagagtttatcgtcgaaaagctcgtaaacctattaaaaggtttcgtcgatatcgtgttaaagcacgttcgacagctaaacgttattacaggcttaagagggctgctaggaattattcgaaagtcaagaagattagaagggctaaaaggcaatataaaacgatttctggcaaaggtgttaagaataaattggctaagctcacaatatcagaatttattcaattgccttattatgatcttattagacttgcttctatggtttgtagtaaagttactccagttggttaccctattcctgagaatgatgttaaaaatttccacgatttttatatgtccaagtttctttacaaactgggtgctatattacctgagaagctttttactgcttctaatccttttattgttggatctgataatccttttcctccttatttgtatggctataatcccatacttacgccggttacctgcggtcaaaaaatgcaaatttatgcgtcactttattccaaatttaaatatgttggtatcaaagtttcatggcatccaaggaatagagcagtttcatcatatcttccttctgaattcaaattaaagtatgatggtgatgttttgtctatggcttctcttacaacagacccaacttcagatggtgtaccatcaacaatagcacagggaaatgcaatgtttactcctaaggaacgtttaaatcagacagtagagttgactaaaacagaagccagtgtatcaggaaattattacatgcatgtttattttggaaaacagattgaatcatcaaagacatgggatttaccgtatttccaatgggtgaaacaacaacaacaaggattttatcaacgggttagcaatatggatagtgattctaataaaggaagggttaaagctgctccttattatgattataatacacttcttccatgtattgaaagcaattcaaagttacataaagtatatgatatgtcaaagcctttttcattctttgttaggccaatggttattgattcatctacagtgaaggaggctaatgagggtgctgcatctaatattgaagttgtaagtaatgttcataagtttgaaacattaactaaagggcttaaacatcttggttatcgttcatttgatcatgcattagtaccaccaacagtagaaataccacaagataatcaacaacttgatgataatatgaaaaatagatgggctattaattcagatgatgataactttttcaatcctactatgttttggtattgttttacaacatcagattcaccaccaaatagtagttattctaataatacaccatatcaatcattaccttattcattttataattcacagatatctccaaatactccaaatgcaagagctagagcagagttgtcagcacattttggaacgtataatgatgctcttaatcagtatggttattttgatgtaacattctataccaaatggaagggagagaggcctttggtctcgaaatcttcctatactggtatagtaccatcagaaacaggtgttactggtttatccaccatcatttctaattaa

SEQ ID NO: 11713 - DNA, 816 bp, unidentified
  source 1..816: mol_type = other DNA
  misc_feature 1..816: note = Synthetic
atggctaagagatatgcatcaagaaagagagtttatcgtcgaaaagctcgtaaacctattaaaaggtttcgtcgatatcgtgttaaagcacgttcgacagctaaacgttattacaggcttaagagggctgctaggaattattcgaaagtcaagaagattagaagggctaaaaggcaatataaaacgatttctggcaaaggtgttaagaataaattggctaagctcacaatatcagaatttattcaattgccttattatgatcttattagacttgcttctatggtttgtagtaaagttactccagttggttaccctattcctgagaatgatgttaaaaatttccacgatttttatatgtccaagtttctttacaaactgggtgctatattacctgagaagctttttactgcttctaatccttttattgttggatctgataatccttttcctccttatttgtatggctataatcccatacttacgccggttacctgcggtcaaaaaatgcaaatttatgcgtcactttattccaaatttaaatatgttggtatcaaagtttcatggcatccaaggaatagagcagtttcatcatatcttccttctgaattcaaattaaagtatgatggtgatgttttgtctatggcttctcttacaacagacccaacttcagatggtgtaccatcaacaatagcacagggaaatgcaatgtttactcctaaggaacgtttaaatcagacagtagagttgactaaaacagaagccagtgtatcaggaaattattacatgcatgtttattttggaaaacagattgaatca

SEQ ID NO: 11714 - DNA, 507 bp, unidentified
  source 1..507: mol_type = other DNA
  misc_feature 1..507: note = Synthetic
attacaggcttaagagggctgctaggaattattcgaaagtcaagaagattagaagggctaaaaggcaatataaaacgatttctggcaaaggtgttaagaataaattggctaagctcacaatatcagaatttattcaattgccttattatgatcttattagacttgcttctatggtttgtagtaaagttactccagttggttaccctattcctgagcaagatgtacgaaatttccacgatttttatatgtccaagtttctttacaaactgggtgctatattacctgagaagctttttactgcttctaatccttttattgttggatctgataatcctcttcctccttatttgtatggctataatcccatacttacgccggttacctgcggtcaaaaaatgcagatttacgcatcactttattccaaatttaaatatgttggtatcaaagtttcatggcatccaaggaatagagcagtttcatcatatcttccttctgaattcaaattaa

SEQ ID NO: 11715 - DNA, 507 bp, unidentified; identical to SEQ ID NO: 11714
  source 1..507: mol_type = other DNA
  misc_feature 1..507: note = Synthetic

SEQ ID NO: 11716 - DNA, 507 bp, unidentified
  source 1..507: mol_type = other DNA
  misc_feature 1..507: note = Synthetic
attacaggcttaagagggctgctaggaattattcgaaagtcaagaagattagaagggctaaaaggcaatataaaacgatttctggcaaaggtgttaagaataaattggctaagctcacaatatcagaatttattcaattgccttattatgatcttattagacttgcttctatggtttgtagtaaagttactccagttggttaccctattcctgagcaagatgtacgaaatttccacgatttttatatgtccaagtttctttacaaactgggtgctatattacctgagaagctttttactgcttctaatccttttattgttggatctgataatcctcttcctccttatttgtatggctataatcccatacttacgccggttacctgcggtcaaaaaatgcaaatttatgcgtcactttattccaaatttaaatatgttggtatcaaagtttcatggcatccaaggaatagagcagtttcatcatatcttccttctgaattcaaattaa

SEQ ID NO: 11717 - DNA, 507 bp, unidentified; identical to SEQ ID NO: 11716
  source 1..507: mol_type = other DNA
  misc_feature 1..507: note = Synthetic

SEQ ID NO: 11718 - DNA, 507 bp, unidentified
  source 1..507: mol_type = other DNA
  misc_feature 1..507: note = Synthetic
attacaggcttaagagggctgctaggaattattcgaaagtcaagaagattagaagggctaaaaggcaatataaaacgatttctggcaaaggtgttaagaataaattggctaagctcacaatatcagaatttattcaattgccttattatgatcttattagacttgcttctatggtttgtagtaaagttactccagttggttaccctattcctgagaatgatgttaaaaatttccacgatttttatatgtccaagtttctttacaaactgggtgctatattacctgagaagctttttactgcttctaatccttttattgttggatctgataatccttttcctccttatttgtatggctataatcccatacttacgccggttacctgcggtcaaaaaatgcaaatttatgcgtcactttattccaaatttaaatatgttggtatcaaagtttcatggcatccaaggaatagagcagtttcatcatatcttccttctgaattcaaattaa

SEQ ID NO: 11719 - DNA, 507 bp, unidentified; identical to SEQ ID NO: 11718
  misc_feature 1..507: note = Synthetic
  source 1..507: mol_type = other DNA

SEQ ID NO: 11720 - DNA, 1593 bp, unidentified
  source 1..1593: mol_type = other DNA
  misc_feature 1..1593: note = Synthetic
atggctaagagatatgcatcaagaaagagagtttatcgtcgaaaagctcgtaaacctattaaaaggtttcgtcgatatcgtgttaaggctcgttcaacagctaaacgttattacaggcttaagagggctgctaggaattattcgaaagttaagaagattagaagggctaaaaggcaatataaaacgatttctggcaaaggtgttaagaataaattggctaagctttcaatatcagaatttattcaattgccttattatgaccttattagacttgcttctatggtttgtagtaaagttactccagttggttaccatcttcctgagaatgatgttaaaaatttccacgatttttatatgttcaagtttctttacaaactgggtgctatattacctgagaagctttttactgcttctaatccttttattgttggatctgataatccttttcctccttatttgtatggctataatcccatacttacgccggttacctgcggtcaaaaaatgcaaatttatgcgtcactttattccaaatttaaatatgttggtatcaaagtttcatggcatccaaggaatagagcagtttcatcatatcttccttctgaattcaaattaaagtatgatggtgatgttttgtctttggcttctcttacaacagacccaacttcagatggtgtaccatcaacaatagcacagggaaatgcaatgtttactcctaaggaacgtttaaatcagacagtagagttgactaaaacagaagccagtgtatcaggaaattattacatgcatgtttattttggaaaacagattgaatcatcaaagacatgggatttaccgtatttccaatggattaaacaacaaaatcaaggatattatcaacgggttagcaatatggataatgattctaataaaggaagggttaaagctgctccttattatgattataatacacttcttccatgtattgaaagcaattcaaagttacataaagtatatgatatgtcaaagcctttttcattctttgttaggccaatggttattgattcatctacagtgaaggaggctaatgagggtgctgcatctaatattgaagttgtaagtaatgttcataagtttgaaacattaactaaagggcttaaacatcttggttatcgttcatttgatcatgcattagtaccaccaacagtagaaataccacaagataatcaacaacttgatgatgctatgatgaatagatgggctattaattcagatgatgataactttttcaatcctactatgttttggtattgttttacaacatcagattcaccaccaaatagtagttattctaataatacaccatatcaatcattaccttattcattttataattcacagatatctccaaatactccaaatgcaaaagctagagcagagttgtcagcacattttggaacgtataatgatgctcttaatcaatatggttattttgatgtaacgttctataccaaatggaagggagagaggcctttggtctcgaaatcttcctatactggtatagtaccatcagaaacaggtgtcactggtttatcaacaatcatttctaattaa

SEQ ID NO: 11721 - DNA, 816 bp, unidentified
  misc_feature 1..816: note = Synthetic
  source 1..816: mol_type = other DNA
atggctaagagatatgcatcaagaaagagagtttatcgtcgaaaagctcgtaaacctattaaaaggtttcgtcgatatcgtgttaaggctcgttcaacagctaaacgttattacaggcttaagagggctgctaggaattattcgaaagttaagaagattagaagggctaaaaggcaatataaaacgatttctggcaaaggtgttaagaataaattggctaagctttcaatatcagaatttattcaattgccttattatgaccttattagacttgcttctatggtttgtagtaaagttactccagttggttaccatcttcctgagaatgatgttaaaaatttccacgatttttatatgttcaagtttctttacaaactgggtgctatattacctgagaagctttttactgcttctaatccttttattgttggatctgataatccttttcctccttatttgtatggctataatcccatacttacgccggttacctgcggtcaaaaaatgcaaatttatgcgtcactttattccaaatttaaatatgttggtatcaaagtttcatggcatccaaggaatagagcagtttcatcatatcttccttctgaattcaaattaaagtatgatggtgatgttttgtctttggcttctcttacaacagacccaacttcagatggtgtaccatcaacaatagcacagggaaatgcaatgtttactcctaaggaacgtttaaatcagacagtagagttgactaaaacagaagccagtgtatcaggaaattattacatgcatgtttattttggaaaacagattgaatca

SEQ ID NO: 11722 - DNA, 507 bp, unidentified
  source 1..507: mol_type = other DNA
  misc_feature 1..507: note = Synthetic
attacaggcttaagagggctgctaggaattattcgaaagttaagaagattagaagggctaaaaggcaatataaaacgatttctggcaaaggtgttaagaataaattggctaagctttcaatatcagaatttattcaattgccttattatgaccttattagacttgcttctatggtttgtagtaaagttactccagttggttaccatcttcctgagaatgatgttaaaaatttccacgatttttatatgttcaagtttctttacaaactgggtgctatattacctgagaagctttttactgcttctaatccttttattgttggatctgataatccttttcctccttatttgtatggctataatcccatacttacgccggttacctgcggtcaaaaaatgcaaatttatgcgtcactttattccaaatttaaatatgttggtatcaaagtttcatggcatccaaggaatagagcagtttcatcatatcttccttctgaattcaaattaa

SEQ ID NO: 11723 - DNA, 507 bp, unidentified; identical to SEQ ID NO: 11722
  misc_feature 1..507: note = Synthetic
  source 1..507: mol_type = other DNA

SEQ ID NO: 11724 - DNA, 57 bp, unidentified; identical to SEQ ID NO: 2629
  misc_feature 1..57: note = Synthetic
  source 1..57: mol_type = other DNA

SEQ ID NO: 11725 - DNA, 2616 bp, unidentified
  source 1..2616: mol_type = other DNA
  misc_feature 1..2616: note = Synthetic
atcgtaccggtctgcaacgatgagttcaccttgtcatcatgtgtgcctactttggattttgatgtagacgtgctgtctgcagcttacggagacgggttggagatcagttctccgggcttgcgatgttgtatcgcctggcctcccatgtatgcattaactctgggtgagttttatcactttcacacgcatagatgggtaagtgcctatgactggagcagtcttctggatactgatgaatttttgtccgccattgggtacgctcacccgatatatcgtgatccgaatcctgactacgatccatacgtgatgcatagttcaactggaaagaccattgccgtggacacggtgacggagaaagtgtacatcatagcagaatcactggtccagttcttcaatatcggacttagacaatttccaccctttgccgaagcggagttagatccagagcaggaaaagatgtggttcggagagactaaatgcggccgagaggaatttatccttttacagaggaatctcccggctatgaaggattacgtagcaaaacattgtggcaagagaatcagggtggatgctttccaggactttgacttttccttttgttccttgtcggatatttattatctgactggacctggcattctagagaaaatcacagaaaaggattatgctatcatagggacgtgtgcccgctctcaagctgaaccaaattgcagagctgctatcgttatgggctcgaactgtcacatctatatctacgtagaaaacagaatcagcaaagtctctaaaagtttgaggacttttatacgtagaggatttgatgaattgctctataaagagaagtattcattggactggaatgacgataccttattttatataagtgacactgagacggagaatcttaataggatgttgaatggggagttgcccgttctccgcagtaagcctcggcatatgtgcgtgcgaaaggacaggctcgtgaaagaccgcagcaaaattctgtttgcggtgcgtctggacgaagaggattcgctgacggttaaatttatcacaaaatttctcacgccggtattcgtcggtcgactgcccgctaccagcaggtttgtcgttcccgtctcctgcgctaggttgacgaacggtctgcagggaaccgcagcagctagatttggcattaaaggactacatccctcttcggactgcgtagtgtggaacagactgatagattatgagtatgaaacttacaagtatccttccacctacgtcagagccgatcagattgctgacatggtgaaaaacttgaaatttatggacaattttgatgagaagtggcagtgcatcactaaactggcttttatcggtctctatgctggagcgtctctgtttaacttcgcgtccaaacctacgctgggctactggtgtcgctatctatgtgagtacgcctccatgttattatttcagtttgaaagcaagttaaaagagttgacaaaggaatctactcggcagctgggaggttataatctttgtcactggggtcaagaattgaaggactgcttggagaacaaatccgatgtcttcttcagatacgatttctttgagcgtatcgaatcctgtctcatcgagcactttatgctcctgtgtggttgtgtcgagtgtaggcgcatgtttatcatgtataacaagagaggcaggaagtgtgattttggccactgtgtccgaattcagtgttttcctatgataggttcaattcgtcttccggcttttctgcatttgggtgaaccctacagtgtgagtctgtcgagtctcatagcgaaggatttagggttgagcatgattgaaggtcagatagagcacagtaggctgcctatttcgctacagatctctgtcaccccggataagaaggcattgctaaccttcttaactaacattgttttcattgtgttcgtcgtgaacaccctctaccgtgtcataaatgctgagttggacatatattacgacctcttcacggaagaagtgggaaaattgtgtgtgaccatggaggaagaaatgaagctggggcggaacgggtgcctcggagacctgtgctacttttcttcgatgaaacaaatgaaagaaattgttaggtgtcccggggaaaagagtcagtttatcttaaagtgttgggaagctctgagaatcggtttttccgttcctgcttacaaagactacgacgagactcggttcatggaaatgttttttctgcatcatcttcatataaaacgcttccacgagcacaatgatcgtgacctggtgtcttctgataatctcattccgggtttttttatcgttaatacccatgaagagaatttcttacagcggctacaacgggtagtgttgcccgtcgccgaagattatttaactaacaccaggtgcataaacgggactatggctttttttttcagtggcttgaaatattttgggagtggtaatcatcggggtgttcaaataagtcccgagaaagacgtcagagctatcgggtataaattggggtcgttggacgtcctcagggatgattacaagtattatgaatatgcaccggactgtgccggcgaactgaatggacatgatggggatgagtga

SEQ ID NO: 11726 - DNA, 24 bp, unidentified
  source 1..24: mol_type = other DNA
  misc_feature 1..24: note = Synthetic
atgaaaatgaggaaccctccttaa

SEQ ID NO: 11727 - DNA, 30 bp, unidentified; identical to SEQ ID NO: 2632
  misc_feature 1..30: note = Synthetic
  source 1..30: mol_type = other DNA

SEQ ID NO: 11728 - DNA, 24 bp, unidentified
  misc_feature 1..24: note = Synthetic
  source 1..24: mol_type = other DNA
atctcagctgtccgaacaacttag

SEQ ID NO: 11729 - DNA, 252 bp, unidentified
  source 1..252: mol_type = other DNA
  misc_feature 1..252: note = Synthetic
atgtggaggatccccttctctagcaacttcatgtctatgggctccctcaccgacctggggcagaacatgctgtacgccaactccgctcacgccttggatatgacctttgaggtggatcccatggatgagcccacgcttctctatgttctgtttgaagtcttcgacgtggtgcgcatccaccagccgcaccgcggcgtcatcgaggccgtctacctgcgcacacctttctctgccggtaacgccaccacctaa

SEQ ID NO: 11730 - DNA, 219 bp, unidentified
  misc_feature 1..219: note = Synthetic
  source 1..219: mol_type = other DNA
atgttacataatccgacttccgagactatgtatctaactatgaaagcgatagaaaaagataaactagataaatctattattattccgtttatcgcgtactttgtacttatgcatccggacttttgtaaaaatcgtagatactttacttcatataaacgttttgtaactgattatgttcatgaaggagtatcttacaaagtattcgatgattatttttaa

SEQ ID NO: 11731 - DNA, 219 bp, unidentified
  source 1..219: mol_type = other DNA
  misc_feature 1..219: note = Synthetic
atgttacataatccgacttctgagaccatgtatctaactatgaaagctatagaaaaagatagactagataaatctattattattccgtttatcgcgtactttgtacttatgcatcctgacttttgtaaaaatcgtagatactttacttcatataaacgttttgtaactgattatgttcatgaaggagtatcttacgaagtattcgatgattatttttaa

SEQ ID NO: 11732 - DNA, 219 bp, unidentified
  misc_feature 1..219: note = Synthetic
  source 1..219: mol_type = other DNA
atgttacataatcctacttctgagaccatgtatctaactatgaaagctatagaaaaagatagactagataaatctattattattccgtttatcgcgtactttgtacttatgcatccggacttttgtaaaaatcgtagatactttacttcatataaacgttttgtaactgattatgttcatgaaggagtatcttacgaagtattcgatgattatttttaa

SEQ ID NO: 11733 - DNA, 1587 bp, unidentified
  misc_feature 1..1587: note = Synthetic
  source 1..1587: mol_type = other DNA
atggctaagcgatatgcatcaagaaagagagtttatcgtcgaaaaacgcggaaaccttttagaagggttcgtcgatatcgtgttaaggcacgttcgacagctaaacgttattacaggcttaagagggctgctaggaattattcaaaggctaagaagattagaagggctaaaaggcaatacaagactatgtctggtaaaggtgttaagaataaattgtccaagctcacaatatcggaatttattcaattgccttattatgatgttgttaggccctctgctttactatatgcaggtattaagcctattggttattcttcacttactcaagatgattttaacaggtttgaagatcttactcagactgttattagaaaaatgggagcaatacttcctgagaagatgtttgcttctgctaatccttttattgttggaactaataaggattttcctccttgtttgtatggctataatcccattcttactccggttacttgtggtcaaaaaatgcaaatttatgctgcgctttattctaagttcaagtatgttgggattaaagtttcatggcatccaaggaataaagcagtttcatcatacattccagctgaattccaagtgaagtatgataaagatgtaatgtcacatgcttctcttactataccaccatcaacaaattatgtaccatcatcaatagcacagggaaacgcaatgtatactcctaaggataatttaaagcaaacaatagagttgactagatcagaagctgctgtatcaggtaattattacatgcacgtgtattttggtaaacaaattgaaaggaacgaaacgtggaatcttcctcattttgaatggtctaattctgataataggtttattttaagatcctctactgattattctcataatgaaagacgaattaaagttgctccttattatgataatgaaacattacttccatgtattgagactaattcaaagttacataaagtgtatgatatgtcaaagcctttttcattctttgttagaccaatggttgttgattcatctacagtgaaggaagctaatgaggcttcagcacaaaatgctgttgctataggtcaacaaaatactaatgaacaacttctaagaccattgaaacatcttggttatcgttcatttgatcatgcattaactccttcaacagtagaaataccacaaaatgatcattcattaaatggaaatcagagagatagatggtctattaactcagatgataataacttctttaatccaattatgttctggtattgtttcacaacatcagataatccaggcgaggagaattatactgctgctacaccatatcaagcattacctcatgcattttacaattcacaattagtttctagtgatgcttattttgaagctaaacaggaattatctgcacattatggaactattaatgatgctcttaatcagtatggatattttgatgtaacattctataccaaatggaagggagagaggcctttggtctcgaaatcttcctatactggtatagtaccatcagaaacaggtgttaatggtttatccaccatcatttctaattaa

SEQ ID NO: 11734 - DNA, 1593 bp, unidentified
  source 1..1593: mol_type = other DNA
  misc_feature 1..1593: note = Synthetic
atggctaagcgatatgcatcaagaaagagagtttatcgtcgaaaagctcgtaaacctattaaaaggtttcgtcgatatcgtgttaaagcacgttcgacagctaaacgttattacaggcttaagagggctgctaggaattattcgaaagtcaagaagattagaagggctaaaaggcaatataaaacgatttctggcaaaggtgttaagaataaattggctaagctcacaatatcagaatttattcaattgccttattatgatcttattagacttgcttctatggtttgtagtaaagttactccagttggttaccatcttcctgagcaagatgttaaaaatttccacgatttttatatgttcaagtttctttacaaactgggtgctatattacctgagaagctttttactgcttctaatccctttgttgttggatctgataatccttttcctccttatttgtatggctataatcccatacttacgccggttacctgcggtcaaaaaatgcaaatttatgcgtcactttattccaaatttaaatatgttggtatcaaagtttcatggcatccaaggaatagagcagtttcatcatatcttccttctgaattcaaattaaagtatgatggtgatgttttgtctatggcttctcttacaacagacccaacttcagatggtgtaccatcaacaatagcacagggaaatgcaatgtttactcctaaggaacgtttaaatcagacagtagagttgactaaaacagaagccagtgtatcaggaaattattacatgcatgtttattttggaaaacagattgaatcatcaaagacatgggatttaccgtatttccaatggattaaacaacaaaatcaaggatattatcaacgggttagcaatatggataatgattctaataaaggaagggttaaagctgctccttattatgattataatacacttcttccatgtattgaaagcaattcaaagttacataaagtatatgatatgtcaaagcctttttcattctttgttaggccaatggttattgattcatctacagtgaaggaggctaatgagggtgctgcatctaatattgaagttgtaagtaatgttcataagtttgaaacattaactaaagggcttaaacatcttggttatcgttcatttgatcatgcattagtaccaccaacagtagaaataccacaagataatcaacaacttgatgatgctatgatgaatagatgggctattaattcagatgatgataactttttcaatcctactatgttttggtattgttttacaacatcagattcaccaccaaatagtagttattctaataatacaccatatcaagcattaccttattcattttataattcacagatatcttcaaatactccaaatgcaaaagctagagcagagttgtcagcacattttggaacgtataatgatgctcttaatcagtatggttattttgatgtaacattctataccaaatggaagggagagaggcctttggtctcgaaatcttcctatactggtatagtaccatcagaaacaggtgtcactggtttatcaacaatcatttctaattaa

SEQ ID NO: 11735 - DNA, 816 bp, unidentified
  misc_feature 1..816: note = Synthetic
  source 1..816: mol_type = other DNA
atggctaagcgatatgcatcaagaaagagagtttatcgtcgaaaagctcgtaaacctattaaaaggtttcgtcgatatcgtgttaaagcacgttcgacagctaaacgttattacaggcttaagagggctgctaggaattattcgaaagtcaagaagattagaagggctaaaaggcaatataaaacgatttctggcaaaggtgttaagaataaattggctaagctcacaatatcagaatttattcaattgccttattatgatcttattagacttgcttctatggtttgtagtaaagttactccagttggttaccatcttcctgagcaagatgttaaaaatttccacgatttttatatgttcaagtttctttacaaactgggtgctatattacctgagaagctttttactgcttctaatccctttgttgttggatctgataatccttttcctccttatttgtatggctataatcccatacttacgccggttacctgcggtcaaaaaatgcaaatttatgcgtcactttattccaaatttaaatatgttggtatcaaagtttcatggcatccaaggaatagagcagtttcatcatatcttccttctgaattcaaattaaagtatgatggtgatgttttgtctatggcttctcttacaacagacccaacttcagatggtgtaccatcaacaatagcacagggaaatgcaatgtttactcctaaggaacgtttaaatcagacagtagagttgactaaaacagaagccagtgtatcaggaaattattacatgcatgtttattttggaaaacagattgaatca

SEQ ID NO: 11736 - DNA, 507 bp, unidentified
  source 1..507: mol_type = other DNA
  misc_feature 1..507: note = Synthetic
attacaggcttaagagggctgctaggaattattcgaaagtcaagaagattagaagggctaaaaggcaatataaaacgatttctggcaaaggtgttaagaataaattggctaagctcacaatatcagaatttattcaattgccttattatgatcttattagacttgcttctatggtttgtagtaaagttactccagttggttaccatcttcctgagcaagatgttaaaaatttccacgatttttatatgttcaagtttctttacaaactgggtgctatattacctgagaagctttttactgcttctaatccctttgttgttggatctgataatccttttcctccttatttgtatggctataatcccatacttacgccggttacctgcggtcaaaaaatgcaaatttatgcgtcactttattccaaatttaaatatgttggtatcaaagtttcatggcatccaaggaatagagcagtttcatcatatcttccttctgaattcaaattaa

SEQ ID NO: 11737 - DNA, 507 bp, unidentified; identical to SEQ ID NO: 11736
  misc_feature 1..507: note = Synthetic
  source 1..507: mol_type = other DNA

SEQ ID NO: 11738 - DNA, 1593 bp, unidentified
  misc_feature 1..1593: note = Synthetic
  source 1..1593: mol_type = other DNA
atggctaagcgatatgcatcaagaaagagagtttatcgtcgaaaagctcgtaaacctattaaaaggtttcgtcgatatcgtgttaaagcacgttcgacagctaaacgttattacaggcttaagagggctgctaggaattattcgaaagttaagaagattagaagggctaaaaggcaatataaaacgatttctggcaaaggtgttaagaataaattggctaagctcacaatatcagaatttattcaattgccttattatgatcttattagacttgcttctatggtttgtagtaaagttactccagttggttaccctattcctgagcaagatgtacgaaatttccatgatttttatatgtccaagtttctttacaaactgggtgctatattacctgagaagctttttactgcttctaatccttttattgttggatctgataatcctcttcctccttatttgtatggctataatcccatacttacgccggttacctgcggtcaaaaaatgcaaatttatgcgtcactttattccaaatttaaatatgttggtatcaaagtttcatggcatccaaggaatagagcagtttcatcatatcttccttctgaattcaaattaaagtatgatggtgatgttttgtctatggcttctcttacaacagacccaacttcagatggtgtaccatcaacaattgcacagggaaatgcaatgtttactcctaaggaacgtttaaatcagacagtagagttgactaaaacagaagctaatgtatcaggaaattattacatgcatgtttattttggaaaacagattgaatcatcaaagacatgggatttaccgtatttccaatgggtgaaacaacaaaataatgattattatcaacgggttagccatatggataatgattctaataaaggaagggttaaagctgctccttattatgattataatacacttcttccatgtattgaaagcaattcaaagttacataaagtatatgatatgtcaaagcctttttcattctttgttaggccaatggttattgattcatctacagtgaaggaggctaatgagggtgctgcatctaatattgaagttgtaagtaatgttcataagtttgaaacattaactaaagggcttaaacatcttggttatcgttcatttgatcatgcattagtaccatcaacagtagaaataccacaagataatcaacaacttgatgaatttatgaaaaatagatgggctattaattcagatgatgataactttttcaatcctactatgttttggtattgttttacaacatcagatactccaccagatagtagttattctaattctacaccatatcaagcattacatttcccatattataatgcacaaataccttcaaatactccaaatgcaaaagctagagcagagttgtcagcacattttggaacgtataatgatgctcttaatcagtatggttattttgatgtaacattctataccaaatggaagggagagaggcctttggtctcgaaatcttcctatactggtatagtaccatcagaaacaggtgtcactggtttatcaacaattatttctaattaa

SEQ ID NO: 11739 - DNA, 816 bp, unidentified
  misc_feature 1..816: note = Synthetic
  source 1..816: mol_type = other DNA
atggctaagcgatatgcatcaagaaagagagtttatcgtcgaaaagctcgtaaacctattaaaaggtttcgtcgatatcgtgttaaagcacgttcgacagctaaacgttattacaggcttaagagggctgctaggaattattcgaaagttaagaagattagaagggctaaaaggcaatataaaacgatttctggcaaaggtgttaagaataaattggctaagctcacaatatcagaatttattcaattgccttattatgatcttattagacttgcttctatggtttgtagtaaagttactccagttggttaccctattcctgagcaagatgtacgaaatttccatgatttttatatgtccaagtttctttacaaactgggtgctatattacctgagaagctttttactgcttctaatccttttattgttggatctgataatcctcttcctccttatttgtatggctataatcccatacttacgccggttacctgcggtcaaaaaatgcaaatttatgcgtcactttattccaaatttaaatatgttggtatcaaagtttcatggcatccaaggaatagagcagtttcatcatatcttccttctgaattcaaattaaagtatgatggtgatgttttgtctatggcttctcttacaacagacccaacttcagatggtgtaccatcaacaattgcacagggaaatgcaatgtttactcctaaggaacgtttaaatcagacagtagagttgactaaaacagaagctaatgtatcaggaaattattacatgcatgtttattttggaaaacagattgaatca

SEQ ID NO: 11740 - DNA, 603 bp, unidentified
  misc_feature 1..603: note = Synthetic
  source 1..603: mol_type = other DNA
atgcatcaagaaagagagtttatcgtcgaaaagctcgtaaacctattaaaaggtttcgtcgatatcgtgttaaagcacgttcgacagctaaacgttattacaggcttaagagggctgctaggaattattcgaaagttaagaagattagaagggctaaaaggcaatataaaacgatttctggcaaaggtgttaagaataaattggctaagctcacaatatcagaatttattcaattgccttattatgatcttattagacttgcttctatggtttgtagtaaagttactccagttggttaccctattcctgagcaagatgtacgaaatttccatgatttttatatgtccaagtttctttacaaactgggtgctatattacctgagaagctttttactgcttctaatccttttattgttggatctgataatcctcttcctccttatttgtatggctataatcccatacttacgccggttacctgcggtcaaaaaatgcaaatttatgcgtcactttattccaaatttaaatatgttggtatcaaagtttcatggcatccaaggaatagagcagtttcatcatatcttccttctgaattcaaattaa

SEQ ID NO: 11741 - DNA, 603 bp, unidentified; identical to SEQ ID NO: 11740
  source 1..603: mol_type = other DNA
  misc_feature 1..603: note = Synthetic

SEQ ID NO: 11742 - DNA, 1593 bp, unidentified
  source 1..1593: mol_type = other DNA
  misc_feature 1..1593: note = Synthetic
atggctaagcgatatgcatcaagaaagagagtttatcgtcgaaaagtgcgtaaacctattaaaaggtttcgtcgatatcgtgctaaggctcgttcaactgctaaacgatattttaggcttaagagggctgctaggaattattcaaaagtcaagaagattagaagggctaaaaggcaatataaaacgatttctggcaaaggtgttaagaataaattgtcaaagctttcaatatcagaatttattcaattgccttattatgaccttattagacttgcttcaatggtttgtgctaggcattctccgactggttatcctcttactgagcaagttatgcaatcttttgctaatttatattcagaacaatttctttacaaattgggtgctatacttcctgagaagttgtttgttaattctaatccttttattattggagctgatagatcttttactccttatttattcgggtataatcccatacttacaccagttacgtgtggacaaaaaatgcagatttatgcatcactttattccaaatttaaatacgtcggtgtcaaagtttcatggcatccaaggaatagagcagtttcatcgtatcttccttctgaatttaaagtaaagtatgattctgatgttttgtctatggctgctcttacaacagacccaacttcagatggtgtaccatcaacaatagcacagggaaatgcaatgtatactcctaaggatcgtttaaatcagacaatagagatgactagagcagaagctaatgtatcaggaaattattatatgcatgtatattttggtaagcagatagaatcatccgaaacatgggatttaccatatattaaatggcgtgaaagtagtggtcaacaacaagtatcaatacaacatgagaaagccaaaactaataacaaaggaagagttaaagctgctcttttttatgatactgcctcacttcttccatgtattgaaactaattcaaagttacataaagtatatgatatgtcaaagcctttttccttctttgttagaccaatggttgtagattcatcaacagtaaaagaacctaatgagagaggtgcacaaaatatagaaacagttgattgtaattgtcagcatgaatcattaactaaagggcttaaacatcttggttatcgtagttttgatcatgcattagttccagcaacaatagaaataccacaagacaatcaagaactttcatatcttactcaagatagatgggctattaattcagatgatgataacttcttcaatcctactctgttttggtattgttttacaacatcagatactcctgttgctgcctcttatacaactcattcgccatatcaagcattggctggttcttttaataatgcacaagtacctgctggtgctccaaatggaaatgctagatatgaattatcatcacattttggaacgtttaatgatgctcttaatcaatatggttattttgatgtaacattctataccaaatggaagggagagaggcctttggtctcgaaatcttcctatactggtatagtaccttcagaaacaggtgttactggtttatcaacaattattactaattaa

SEQ ID NO: 11743 - DNA, 816 bp, unidentified
  source 1..816: mol_type = other DNA
  misc_feature 1..816: note = Synthetic
atggctaagcgatatgcatcaagaaagagagtttatcgtcgaaaagtgcgtaaacctattaaaaggtttcgtcgatatcgtgctaaggctcgttcaactgctaaacgatattttaggcttaagagggctgctaggaattattcaaaagtcaagaagattagaagggctaaaaggcaatataaaacgatttctggcaaaggtgttaagaataaattgtcaaagctttcaatatcagaatttattcaattgccttattatgaccttattagacttgcttcaatggtttgtgctaggcattctccgactggttatcctcttactgagcaagttatgcaatcttttgctaatttatattcagaacaatttctttacaaattgggtgctatacttcctgagaagttgtttgttaattctaatccttttattattggagctgatagatcttttactccttatttattcgggtataatcccatacttacaccagttacgtgtggacaaaaaatgcagatttatgcatcactttattccaaatttaaatacgtcggtgtcaaagtttcatggcatccaaggaatagagcagtttcatcgtatcttccttctgaatttaaagtaaagtatgattctgatgttttgtctatggctgctcttacaacagacccaacttcagatggtgtaccatcaacaatagcacagggaaatgcaatgtatactcctaaggatcgtttaaatcagacaatagagatgactagagcagaagctaatgtatcaggaaattattatatgcatgtatattttggtaagcagatagaatca

SEQ ID NO: 11744 - DNA, 603 bp, unidentified
  misc_feature 1..603: note = Synthetic
  source 1..603: mol_type = other DNA
atgcatcaagaaagagagtttatcgtcgaaaagtgcgtaaacctattaaaaggtttcgtcgatatcgtgctaaggctcgttcaactgctaaacgatattttaggcttaagagggctgctaggaattattcaaaagtcaagaagattagaagggctaaaaggcaatataaaacgatttctggcaaaggtgttaagaataaattgtcaaagctttcaatatcagaatttattcaattgccttattatgaccttattagacttgcttcaatggtttgtgctaggcattctccgactggttatcctcttactgagcaagttatgcaatcttttgctaatttatattcagaacaatttctttacaaattgggtgctatacttcctgagaagttgtttgttaattctaatccttttattattggagctgatagatcttttactccttatttattcgggtataatcccatacttacaccagttacgtgtggacaaaaaatgcagatttatgcatcactttattccaaatttaaatacgtcggtgtcaaagtttcatggcatccaaggaatagagcagtttcatcgtatcttccttctgaatttaaagtaa

SEQ ID NO: 11745 - DNA, 603 bp, unidentified; identical to SEQ ID NO: 11744
  misc_feature 1..603: note = Synthetic
  source 1..603: mol_type = other DNA

SEQ ID NO: 11746 - DNA, 27 bp, unidentified
  source 1..27: mol_type = other DNA
  misc_feature 1..27: note = Synthetic
atgtcaatgacactatttctgatgtaa

SEQ ID NO: 11747 - DNA, 3804 bp, unidentified
  misc_feature 1..3804: note = Synthetic
  source 1..3804: mol_type = other DNA
atgtcatccatgatactgactcagtttggaccgttcattgagagcatctcaggtattactgaccaatcaaatgatgtgtttgaaaatgcagcgaaagcattctccatgtttactcgtagcgatgtctacaaagcgttggatgaaatacctttctctgaggatgcgatgcttcccatccctccaactatatataccaaaccatctcacgactcgtattattacattgatgctttgaaccgtgtgcgtcgtaaaacgtaccaaggccctgatgacgtgtatgtgcctaattgttctattgttgagttgctggagccacatgagactctgacatcttatgggcgtttgtctgaggccatcgagaaccgtgctaaggatggagatagtcaagctagaattgcgacaacgtatggtagaattgctgagtctcaagcccgacagattaaggctccattggagaagtttgtgttggcactattagtggctgaagctggagggtctttatatgatccagttttgcagaaatatgatgagatcccaggtctatcgcacaattgccctttatggtgctttagagaaatttgtcgtcacatatctgggccattaccagatcgagcaccttatctttacttatctgctggggttttctggttaatgtcgccacggatgacgtccgcaattcctccattgctatctgatcttgttaacttagctattttgcagcagactgcgggtttagacccatcactagtgaggttgggagtacaaatatgccttcatgcagcagctagctcaagttatgcttggtttatcttgaagactaagtctatttttcctcaaaacacgttgcacagtatgtatgaatctctagaaggagggtattgtcctaatcttgagtggttggagccaagatcggattacaaatttatgtacatgggagccatgccattatccactaagtatgctaggtcggcgccgtccaatgataagaaagcgcgggaacttggcgagaagtacggactgagctcagttgtcagtgagcttcgtagacgtacaaagacttatagtaagcatgattttacttcagtaaggtatattcgtgacgctatggcatgtactagcggtattttcttagtaagaacacccaccgagacggtactgcaagaatatacacagagtccggagatcaaagttcctatcccccaaaaagattggacaggtccaataggtgaaatcagaattttaaaagatacaacgagctctatcgcgcgttacttatatagaacatggtacctggcagcggcgagaatggcggctcaaccacgtacgtgggacccactatttcaggcgattatgagatctcaatacgtgacagctaggggtggctctggcgcaacactccgcgagtctctgtatgcaatcaatgtgtcgttgcctgatttcaaaggcttaccagtaaaggcagcaactaagatatttcaggcggcacaattagcaaatttacctttctctcacacatcagtggctatattagctgacacttcgatgggcttgcgaaaccaggtgcagaggcggccacgatctatcatgccattaaatgtgccccagcagcaggtttcggcgcctcatacattgacagcagattacattaactaccacatgaatctatcaacgacatccggtagtgcagttattgagaaggtgattcccttaggcgtatatgcttcgagtccgccgaatcagtcgatcaacattgacatatctgcatgtgatgctagtattacctgggatttctttctatccgtaattatggcggctattcacgaaggtgttgctagtagctctatcggaaaaccgtttatgggggttcctgcgtccattgtaaatgacgagtctgtcgttggagtgagagctgctaggccgatatcgggaatgcagaacatgattcagcatctttcaaagctatacaaacgtggattttcgtatagagtaaacgactctttttctccaggtaacgatttcacccacatgactaccactttcccgtcaggctcaacagccacttctactgagcatactgctaacaacagtacgatgatggaaactttcttgacagtgtggggaccagaacacactgacgaccctgacgtcttacgtctaatgaagtctttaaccattcagagaaattacgtgtgccaaggtgacgacggactgatgattatcgacgggaatactgctggtaaggtgaacagtgaaaccattcagaagatgctggaactaatctcgaaatatggtgaggaattcggatggaaatatgacatagcgtatgatgggactgccgaatacctaaagctgtacttcatatttggctgtcgaattccaaatctcagtcgtcatccaattgttggtaaagaacgggcgaattcgtcagcagaggagccatggccagcaattctagaccagattatgggtattttctttaatggcgttcatgacgggttacagtggcaacgatggatacgttattcatgggctttgtgctgtgctttttcacgtcaaagaaccatgactggtgagagcgtgggctatcttcagtatcctatgtggtcttttgtctattgggggctaccgctggttaaggtattcgggtcagatccatggatattctcctggtacatgcctactggggatctgggaatgtatagttggattagtctgatacgacctctaatgacaagatggatggtggctaatggctacgtaactgacaaatgctcacctgtattcggaaacgcggattaccgcaagtgtttcaatgagcttaaactatatcaagggtattatatggcacaattgcccagaaatcctaagaagtctggacgagcagcccctcgtgaggtaagagaacaattcacccaggcattatccgactatctgatgcagaatccggagctaaagtcgcgtgtgctacgtggtcgtagtgagtgggagaagtatggagcggggataattcacaaccctccgtcactatttgatgtaccccataaatggtatcagggggcgcaggaggcagcgaccgctacgcgagaggagctggcagaaatggatgagacgttaatgcgtgctagaaagcacagttattcgagcttctccaagttgttagaggcatatctgctcgtaaaatggcgaatgtgcgaggctcgtgaaccatcggttgatttgcgattaccattatgtgcgggtattgacccattaaactcggatccttttctcaaaatggttagcgttggaccaatgctccagagtacgcggaagtactttgcacagacactattcatggcgaagacggtgtcgggtctcgacgtcaatgcaatcgacagcgcgttgttacgattacggacgctgggtgctgataagaaagcgttaacggcgcagttgttaatggtgggacttcaggagtcagaagcggacgcattggccgggaagataatgctgcaagatgtgaatactgtgcaattagccagagtggtcaacttagccgtaccagacacttggatgtcgttggactttgacactatgttcaaacaccatgtcaagctgcttcccaaagatggacgtcatctaaatactgatattcctccccgaatgggatggttgcgtgccattttgcgattcttaggtgccggaatggcgatgactgcgactggagttgccgtcgacatatatctggaggacatacacggcggtggtcgatcactcggacagagattcatgacttggatgcgacaggaaggacggtcagcgtga

SEQ ID NO: 11748 - DNA, 114 bp, unidentified
  misc_feature 1..114: note = Synthetic
  source 1..114: mol_type = other DNA
atgtctacaaagcgttggatgaaatacctttctctgaggatgcgatgcttcccatccctccaactatatataccaaaccatctcacgactcgtattattacattgatgctttga

SEQ ID NO: 11749 - DNA, 987 bp, unidentified
  source 1..987: mol_type = other DNA
  misc_feature 1..987: note = Synthetic
atgtccgtacaccggcccttcccgacacggagtttgagattccaagcaggagagaagatcatggtgtggctgtggctcggcgtcgggctcctcggcggtaccggactggcttccctggtcctggccatttccttatttacccagcgccgaggccgcaagcgatccgacgagacttcgtcgcgaggccggctcccgggtgctgcttctgataagcgtggtgcctgcgcgtgctgctatcgaattccgaaagaagacgtcgttgagccgctggatctggaactggggctcatgcgggtggccacccacccgccgacgccgcaggtgccgcggtgtacgtcgctctacataggagaggatggtctgccgatagataaacccgagtttcctccggcgcgattcgagatccccgacgtatccacgccgggaacgccgaccagcatcggccgatctccgtcgcattgctcctcgtcgagctctttgtcgtcctcggccagcgtcgacacggtactgcatcagccgccgccatcctggaagccacctccgccgcccgggcgcaagaagcggccgcctacgccgccggtccgggcccccaccacgcggctgtcgtcgcacaggcccccgacgccgatacccgcgccgcgtaagaacctgagcacgccgcccaccaagaaaacaccgccgcccacgaaacccaagccggtcggctggacaccgccggtgacgcccaggcccttcccgaaaacgccgacgccacaaaagccaccgcggaatccgagactgccgcgcaccgtcgggctggagaatctctcgaaggtgggactctcgtgtccctgtccccgaccccgcacgccgacggagccgaccacgctgcctatcgtgtcggtttccgagttagccccgcctcctcgatggtcggacatcgaggaactcttggaaaaggcggtgcagagcgtcatgaaggacgccgagtcaatgcagatgacctga

SEQ ID NO: 11750 - DNA, 279 bp, unidentified
  source 1..279: mol_type = other DNA
  misc_feature 1..279: note = Synthetic
atggctgatcctgcagcagcaacgaagtatcctctcctgaaattattaggcagcacttggccaaccaccccgccgcgacccataccaaagccgtcgccttgggcaccgaagaaacacagacgactatccagcgaccaagatcagagccagacaccggaaacccctgccacaccactaagttgttgcacagagactcagtggacagtgctccaatcctcactgcatttaacagctcacacaaaggacggattaactgtaatagtaacactacacccatag

SEQ ID NO: 11751 - DNA, 381 bp, unidentified
  source 1..381: mol_type = other DNA
  misc_feature 1..381: note = Synthetic
ttgggcaccgaagaaacacagacgactatccagcgaccaagatcagagccagacaccggaaacccctgccacaccactaagttgttgcacagagactcagtggacagtgctccaatcctcactgcatttaacagctcacacaaaggacggattaactgtaatagtaacactacacccatagtacatttaaaaggtgatgctaatactttaaaatgtttaagatatagatttaaaaagcattgtacattgtatactgcagtgtcgtctacatggcattggacaggacataatgtaaaacataaaagtgcaattgttacacttacatatgatagtgaatggcaacgtgaccaatttttgtctcaagttaaaataccaaaaact

SEQ ID NO: 11752 - DNA, 39 bp, unidentified; identical to SEQ ID NO: 2669
  misc_feature 1..39: note = Synthetic
  source 1..39: mol_type = other DNA

SEQ ID NO: 11753 - DNA, 36 bp, unidentified; identical to SEQ ID NO: 2670
  source 1..36: mol_type = other DNA
  misc_feature 1..36: note = Synthetic

SEQ ID NO: 11754 - DNA, 7425 bp, unidentified
  misc_feature 1..7425: note = Synthetic
  source 1..7425: mol_type = other DNA
atggatcctgtgtacgtggacatagacgctgacagcgcctttttgaaggccctgcaacgtgcgtaccccatgtttgaggtggaacctaggcaggtcacaccgaatgaccatgctaatgctagagcgttctcgcatctagctataaaactaatagagcaggaaattgatcccgactcaaccatcctggatattggtagtgcgccagcaaggaggatgatgtcggacaggaagtaccactgcgtttgcccgatgcgcagtgcagaagatcccgagagactcgccaattatgcgagaaagctagcatctgccgcaggaaaagtcctggacagaaacatctctggaaagatcggggacttacaagcagtaatggccgtgccagacacggagacgccaacattctgcttacacacagatgtatcatgtagacagagagcagacgtcgcgatataccaagacgtctatgctgtacacgcacccacgtcgctataccaccaggcgattaaaggggtccgattggcgtactgggtagggtttgacacaaccccgttcatgtacaatgccatggcgggtgcctacccctcatactcgacaaattgggcagatgagcaggtactgaaggctaagaacataggattatgttcaacagacctgacggaaggtagacgaggcaaattgtctattatgagaggaaaaaagctagaaccgtgcgaccgtgtgctgttctcagtagggtcaacgctctacccggaaagccgtaagctacttaagagctggcacctaccatcggtgttccatttaaagggcaagctcagcttcacatgccgctgtgatacagtggtttcgtgcgaaggctacgtcgttaagagaataacgatgagcccaggcctttacggaaaaaccacagggtatgcggtaacccaccacgcagacggattcctgatgtgcaagaccaccgacacggttgacggcgaaagagtgtcattctcggtgtgcacgtacgtgccggcgaccatttgtgatcaaatgaccggcatccttgctacagaagtcacgccggaggatgcacagaagctgttggtggggctgaaccagagaatagtggttaacggcagaacgcaacggaatacgaacaccatgaaaaactatatgattcccgtggtcgcccaagccttcagtaagtgggcaaaggagtgccggaaagacatggaagatgaaaaactcctgggggtcagagaaagaacactgacctgctgctgtctatgggcatttaagaagcagaaaacacacacggtctacaagaggcctgatacccagtcaattcagaaggttcaggccgagtttgacagctttgtggtaccgagcctgtggtcgtccgggttgtcaatcccgttgaggactagaatcaaatggttgttaagcaaggtgccaaaaaccgacctgaccccatacagcggggacgcccaagaagcccgggacgcagaaaaagaagcagaggaagaacgagaagcagaactgactcttgaagccctaccaccccttcaggcagcacaggaagatgttcaggtcgaaatcgacgtggaacagcttgaggacagagcgggtgcaggaataatagagactccgagaggagctatcaaagttactgcccaaccaacagaccacgtcgtgggagagtacttggttctttccccgcagaccgtactacgtagccaaaagcttagcctgattcacgctttggcggagcaagtgaagacgtgcacgcacagcggacgagcagggaggtatgcggtcgaagcgtacgacggcagagtcctagtgccctcaggctacgcaatctcgcctgaagacttccagagcctaagcgaaagcgcaacgatggtgtacaacgaaagagagttcgtaaacagaaagctacaccatattgcgatgcatggaccagccctgaacaccgacgaagagtcgtatgagctggtgagggcagagaggacagaacacgagtacgtctacgacgtggaccagagaagatgctgtaagaaggaagaagctgcaggactggtactggtgggcgacttgactaatccgccctaccacgaattcgcatatgaagggctaaaaatccgccctgcctgcccatacaaaattgcagtcataggagtcttcggagtaccaggatctggcaagtcagctattatcaagaacctagttaccaggcaagacctggtgactagcggaaagaaagaaaactgccaagaaatcaccaccgacgtgatgagacagagaggtctagagatatctgcacgtacggttgactcgctgctcttgaatggatgtaacagaccagtcgacgtgttgtacgtagacgaggcgtttgcgtgccactctggaacgttacttgcattgatcgccttggtgagaccaagacagaaagttgtactttgtggtgacccgaagcagtgcggcttcttcaatatgatgcagatgaaagtcaactataatcacaacatctgcacccaagtgtaccacaaaagtatctccaggcggtgtacactgcctgtgactgccattgtgtcatcgttgcattacgaaggcaaaatgcgcactacgaatgagtacaacaagccgattgtagtggacactacaggctcaacaaaacctgaccctggagatctcgtgttaacgtgcttcagaggatgggttaaacaactgcaaattgactatcgtggacacgaggtcatgacagcagccgcatcccaagggttaaccagaaaaggagtttacgcagttaggcaaaaagttaacgaaaacccgctttatgcatcaacgtcagagcacgtcaacgtactcctaacgcgtacggaaggtaaactggtatggaagacactctccggtgacccgtggataaagacgctgcagaacccaccgaaaggaaacttcaaagcaactattaaggagtgggaggtggagcatgcatcaataatggcgggcatctgcagtcaccaaatgacctttgatacattccaaaacaaagccaacgtttgttgggctaagagtttggtccctatcctcgaaacagcggggataaaactaaacgacaggcagtggtcccagataattcaagccttcaaagaagacaaagcatattcacccgaagtagccctgaatgaaatatgcacgcgcatgtatggggtggatctagacagcgggctattttctaaaccgttggtgtctgtgtattacgcggataaccactgggataataggcctggagggaagatgttcggattcaaccccgaggcagcatccattctagaaagaaagtatccatttacaaaagggaagtggaacatcaacaagcagatctgcgtgactaccaggaggatagaagacttcaaccctaccaccaacattataccggccaacaggagactaccacactcattagtggccgaacaccgcccagtaaaaggggaaagaatggaatggctggttaacaagataaacggccaccacgtgctcctggtcagtggctgtagccttgcactgcctactaagagagtcacttgggtagcgccactaggtgtccgcggagcggactatacatacaacctagagttgggtctgccagcaacgcttggtaggtatgacctagtggtcataaacatccacacaccttttcgcatacaccattatcaacagtgcgtagaccacgcaatgaaactgcaaatgctcgggggtgactcattgagactgctcaaaccgggtggctctctattgatcagagcatatggttacgcagatagaaccagtgaacgagtcatctgcgtattgggacgcaagtttagatcatctagagcgttgaaaccaccatgtgtcaccagcaacactgagatgttttttctattcagcaactttgacaatggcagaaggaatttcacaactcatgtcatgaacaatcaactgaatgcagcctttgtaggacaggccacccgagcaggatgtgcaccgtcgtaccgggtaaaacgcatggatatcgcgaagaacgatgaagagtgcgtagtcaacgccgccaaccctcgcgggttaccaggtgacggtgtttgcaaggcagtatacaaaaaatggccggagtcctttaagaacagtgcaacaccagtgggaaccgcaaaaacagtcatgtgcggtacgtatccagtaatccacgccgttggaccaaacttctctaattattcggagtctgaaggggaccgagaattggcggctgcctatcgagaagtcgcaaaggaggtaactagactgggagtaaatagtgtagctatacctctcctctccacaggtgtatactcaggagggaaagacaggctgacccagtcactgaaccacctctttacagccatggactcgacggatgcagacgtggtcatctactgccgcgacaaagaatgggagaagaaaatatctgaggccatacagatgcggacccaagtggagctgctggatgagcacatctccatagactgcgatgttgttcgcgtgcaccctgacagcagcttggcaggcagaaaaggatacagcaccacggaaggcgcactgtactcatatctagaagggacccgttttcaccaaacggcagtggatatggcagagatatatactatgtggccaaagcaaacagaggccaacgagcaagtttgcctatatgccctgggggaaagtattgaatcgatcaggcagaaatgcccggtggatgatgcagatgcatcatctcccccgaaaactgtcccgtgcctctgccgttacgccatgacaccagaacgcgttacccgacttcgcatgaaccatgtcacaagcataattgtgtgttcttcgtttccccttccaaagtacaaaatagaaggagtgcaaaaagtcaaatgctccaaggtaatgctatttgaccacaacgtgccatcgcgcgtaagtccaagggaatacagaccttcccaggagtctgtacaggaagcgagtacgaccacgtcactgacgcatagccaattcgatctaagcgttgacggcaagatactgcccgtcccgtcagacctggatgctgacgccccagccctagaaccagcccttgacgacggggcgatacacacgttgccatctgcaaccggaaaccttgcggccgtgtctgactgggtaatgagcaccgtacctgtcgcgccgcccagaagaaggcgagggagaaacctgactgtgacatgcgacgagagagaagggaatataacacccatggctagcgtccgattctttagggcagagctgtgtccagtcgtacaagaaacagcggagacgcgtgacacagctatgtctcttcaggcaccgccgagtaccgccacggaactgagtcacccgccgatctccttcggtgcaccaagcgagacgttccccatcacatttggggacttcaacgaaggagaaatcgaaagcttgtcttctgagctactaactttcggagacttcctacccggagaagtggatgatttgacagatagcgactggtccacgtgctcagacacggacgacgagttacgactagacagggcaggtgggtatatattctcgtcggacactggtccaggtcatttacaacagaagtcagtacgccagtcagtgctgccggtgaacaccctggaggaagtccacgaggagaagtgttacccacctaagctggatgaagcaaaggagcaactactacttaagaaactccaggagagtgcatccatggccaacagaagcaggtatcagtcgcgcaaagtagaaaacatgaaagcaacaatcatccagagactaaagagaggctgtagattatacttaatgtcagagaccccaaaagtccctacctaccggaccacatatccggcgcctgtgtactcgcctccgattaacgtccgactgtccaaccccgagtccgcagtggcagcatgcaatgagttcttggctagaaactatccaactgtttcatcataccaaatcaccgacgagtatgatgcatatctagacatggtggacgggtcggagagttgtctggaccgagcgacattcaatccgtcaaaacttaggagctacccaaaacagcacgcttaccacgcgccctccatcagaagcgctgtaccgtccccattccagaacacactacagaatgtactggcagcagccacgaaaagaaactgcaacgtcacacagatgagggaattacccactttggactcagcagtattcaacgtggagtgtttcaaaaaattcgcatgcaaccaagaatactgggaagaatttgctgccagccctatcaggataacaactgagaatttaacaacctatgttactaaactaaaggggccaaaagcagcagcgctatttgcaaaaacccataatctgctgccactgcaggaagtgccaatggataggttcacagtagacatgaaaagggatgtgaaggtgactcctggtacaaagcacacagaggaaagacctaaggtacaggttatacaggcggctgaacccttggcaacagcatacctatgtgggattcacagagagctggttaggaggctgaacgccgtcctcctacccaatgtacatacactatttgacatgtctgccgaggatttcgatgccatcatagccgcacactttaagccaggagacactgttttagaaacggacatagcctcctttgataagagccaagatgattcacttgcgcttactgctttaatgctgttagaggatttaggggtggatcactccctgttggacttgatagaggctgctttcggagagatttccagctgtcatctaccgacaggtacgcgcttcaagttcggcgccatgatgaaatctggtatgttcctaactctgttcgtcaacacactgctaaatatcaccatcgccagccgagtgctggaagatcgtctgacaaaatccgcgtgcgcagccttcatcggcgacgacaacataatacatggagtcgtctccgatgaattgatggcagccagatgcgccacttggatgaacatggaagtgaagatcatagatgcagttgtatcccagaaagccccttacttttgtggagggtttatactgcacgatatcgtgacaggaacagcttgcagagtggcagacccgctaaaaaggctatttaaactgggcaaaccgctagcggcaggtgacgaacaagatgaggatagaagacgagcgctggctgacgaagtggtcagatggcaacgaacagggctaattgatgagttggagaaagcggtatactctaggtatgaagtgcagggtatatcagttgtggtaatgtccatggccacctttgcaagctccagatccaacttcgagaagctcagaggacccgtcgtaactttgtacggcggtcctaaatag

SEQ ID NO: 11755 - DNA, 10254 bp, unidentified
  source 1..10254: mol_type = other DNA
  misc_feature 1..10254: note = Synthetic
atggctggcaaagccatttcaaaaggtaaggggggtggcccccctgggaagagacccaaagtggccataagaaagacggggcagtcggcgggactcatgccaagagttctgctgctgtcccgcatcatgggtgtgttgtggcacttgttgtcgaacacacccagaccgcccattctaagggctttttggcgcacagttcctgtgcgacaggccatgggggtcctgacacgcatccgtagggttgctggttccatgatgcagagccttcagggcagagggaagcgacgtgccggagaggggctttctgcttattggctcgcggcgctgctctgcggggtggcgttgtgcgctcatgtgcgacgggggcccgatggtggtatagtgatccgagcggatggaagggacgcggcaacacaactcagagttggaaatggcacatgcgccattctctccactgacatgggcgactggtgtgatgactcattggcgtacgagtgtgtcaccatagagggaggcgaagagccagtggacgtggattgtttttgccgaggggtgactggtgtgttcattgagtatggtaggtgtggaaggaaaggccactcaagggttaccagatcggtgcacattccatcccacgcagagcggaacatggtgggtcatggtgaacggacctggctgggaacgtcaaactggaaagaacacgcaacaagagtggaaagctgggtctggaagaacaaggtcatggtgattgctgtggccatggcgacttggatttgcgttaagagtatgacccttcggcttcttattgtagtggcgttcttgctggtggcgccaggacaggcttccaggtgcactcacctggagaacagagactttgtggagggtgtaacagggacaaccaaggttacactggtacttgaactggggggatgtgtcacggttacggccgagggcagaccctcggtggacgtttggcttgacagtatctaccaggagtctctggcacaggtgagggagtattgcttgcatgccaaattgagtaattcaaaggttgcagcaagatgtccaacgatggggcccgcgaccctgccggaagaacaccaggcagacatggtatgtaagagagatcaaagtgatagaggatgggggaaccattgtggactatttggaaagggaagtattgtggcatgcaccaagttcacatgtgaagaaaagaggacggccgcaggttatgtctttgatagtagcaaagtcacatttgcggtgaaagtggaaccacatacggggacgtacctagcggccaatgatacacatgtggatcgaaaggaagccaagttcacagcggcagctgagaaagtaatcttgacgcttggtgactacggggacatgagtctggtgtgccgtgtcactagtggaatggacatggcgcagacagtgattcttgagatggacaagacaaatgagcaccttccgcaggcctggcaggtacaccggagctggttcgaggatctctccctgccgtggcggcataagggagaaagtgcctggcgtgaagctcagaggcttgtggaatttggtcctccgcatgccgtaaagatggatgtgtataatcttggagaccagactagtgtcatgttgaaatcactgacaggcgccggtatggtgcgtcttgaaggcacgaaggtgttcatgcagagtgggcacataacatgtgatgtgggtctggagaagctgaaactcaaaggcataacatactccatgtgtgagagcggaaagttctcatggaagaggccccccacggatagcggtcatgacacagtggttatggaggtgagctattccggggccaccaaaccctgcaggattcctgtgatggcgacggctcatggtgaagaatccaacgttgcgatgctcatcacctctaatcccaccattgagacagacaagggagggtttatagagatgcaagtgccgcctggcgacatcaccatcaagattggagacctgaagcagcagtggtttcagaaaggcagcacaataggaagagtgtttcagaaaactaggcgtggtgttgagcgccttgttgctgttggagaacacgcatgggatttcggctctgtgggaggagtgttttcctctgtagcgaaggcttgccacatggtgttgggtaatctattcggggccgtgttcggagggttcgggttccttcccaggatcctcattggagcaggtctcgtctggcttggactcaatgctaggaatgtgaccttgtcggtggggttcctggccgtggggggaatccttctggcgctgaccctgggtgtgggggctgacgtgggctgctcaatagaccccgtgagaaaggaacttcggtgtggagagggactggcagtgtggaaggagacgtcggagtggtatgatggatatgtgttctacccggaatcacctggggcactggcggcggccctactggatgcatacgagagcggggtctgtgggcttgtcccccagaacagactagagatggctatgtggagagcagttgcaggagagttgaatgtggtgctggttgagaatgacgcaaacctcactgtggtggttgatgggagagacccacaggactaccgcgggggcagggctggacagctgggaaccggaaagaaggacatgacagttaaatggcacacatggggaaaggcattgttgtggacagttcctgagagccccagacgaatgcttgtaggtgtgaccaagacggatgaatgtccgatgcatagaagactgaccaatgtgtttcaagttgcggagtttggtgtggggtttcggacgaaagtgttcttggatttccgagacacccctacaaccctgtgcgacagtggcatgatgggagccgcagtgaagaatggttatgctgtgcatactgaccagagcatgtggatgaggtcacacctgaatgagacgggtgttttcttggacgagctgttgctgacggacttgaggaactgcacgtggccagggagtcacaccatcgacaatgagggagtgatagactcggagctgttccttcccgtgtcgatggcggggcctagatccaagtataacaggattccgggatacgctgagcaagtcaagggaccttgggaccagaccccattacgtgtggtgagagagccgtgccctgggaccaaggtggagaaggatgcagcatgcacaaagagagggccctcagtgcgtagcacgacggaaagtggaaagatcataccagagtggtgctgccgggcatgtgagatgccccctgtgacataccgtagtggcactgattgttggtatgcaatggagatacgcccgagacatgtgcagggaggtctcgtcaggtctaccgttatggcagcgaatgaacagcttactagcgaagctggcattcctggagttgtggccataatgatacttgtggagttgatattgcggagacgaccaggcgctggggtgaccactgtctggagtgggttgctcctgctggtgctgatggtgctgggactcgtcactgttgagggaattctgaggtttgttgtggccgttggctcttcctttattctccagttggggccggacatggccaccttcgtgttgttgcaggctgcctttgacctgagggtgggcttcatgacggcatttgtcttgaagaggacagccacccctagagaagtggtaattgtctacttttgcttgctcactcttgaacatggcttaccaacagaaggattcgacacagccctggagtggtttgatgcggttgcggtggctgccttgaccatgaatgccagcgttgatgaaggaaagcaggcacttggactgttggtggccggccttatggcgttgaagagcttgaggagcctgcagctcgggcttatggtgttcttgggactgatgtgggtgacgaccatggttggactcttcagggggcagcaggatagaaaaggctggacttacgggatccccctgtgtgggatactgggcggctctggggtcggcatacgactgttggctttctgggagttgaggaagaggtgcttgagaagatcaatcgaagagccattgacgatgctgggactcatgctggcagtgtctagtggggtattaagaaactcatcaccagaggcacttgtcactgcggtggctggagcagcgatgatactggcgctgatcattggaaccagaaagatgcagctgacggccgaatggacgggagagatagagtggaacccagacctggtgaacgagggaggccatgttgacctcgctgtgaggagagatgcaatgggaaatttccatgtcacggaaatagagagagaggagcggaagatggctgtcttcctgttcttgggccttgttgctgcagccatacactggtcgggtattctcgtggtttttgtcgggtggctagccgtagagacagtgtttagtggaaagagaggtgacttagtattttctggagtccctgaggcactcgtgagagggaacgccccgttcgaagtgaaggagggcgtgtacaggatatttagacctggtctcttgtggggacataaccagataggtgtgggatatgggaagcagggagtactgcacaccatgtggcatgtcacacggggagcagccattcgaatcggtgatggagtgtgtggacctcattgggcagatgtgcgtgaagacgttgtgagttatgggggaccctggcacttggcctcaaggtggaagggagaggttgtgcagttacatgcgttccctccaggacgtgcccatgaggttcatcagtgtcagccaggtaggctaaagttggagaatggaaaatgcataggtgccattcccattgacatgcccaaaggcacctcaggaagccccattcttaatgtggacggggatgttgtagggctgtatggaaacggactgagaactaatgacacatatgtcagcggcatttctcagggatctgcggaaaagagcaaactggagatgccgttggcagtgcagggagaagcatggttgtcgaaggggaagatcaccgtgttggacctgcaccctggggcaggaaagacccatagggtccttcctgatctaataaggcagtgtatcgacaagaggcttcgaactctggtgctggcgccaacgagagttgtgcttagagaaatggaaaaagcgctacagggaaagaaggtgagattccattcgccatcagtagaccacgggagcagtgatgcaatcgtggatgttatgtgccacgcaacttatgttaccaggcgcttgttgccgcaaggtagacagaactgggaagtggcaatcatggatgaggcgcattggacagacccacatagcatagcagctcggggccacctgtactcacttgctaaggaaaacaagtgcgcgctcgtcctcatgacggcaactccacccgggcaaaatgacccatttccagagtctaggggaaagatcgtgagtgaagagagacagatcccagatggggaatggcgtgatggatttgattggataacagagttcgaaggaaggacggcctggttcgtcccgtccattgcccggggagcagcaatcgcaaagactcttagacagaaagggaagacggtcatatgtttaaatagcaagagctttgagaaagaatatcaccgagtgcaggaggagaagcctgatttcgtggtcaccacagacatttcagagatgggcgccaatttggatgtccatcgagtgatagatggccggacaaatatcaaaccagaagaggtggacggttctgtggagttgaccggggtgagacgtgtcaccacggcctccgcggcacaaaggagaggccgggtcggaaggaaagaagggcaaacagacagttatgtctactcgggccagtgtgatgatgatgactccagcctggtgcagtggaaggaggcacaaatcctcttggacaacataactgcagtgcgcggaccagtcgcaaccttctatgggccagagcaagggaaaatgcctgaggttgccggtcactttagactaagtgaagagaagcggaaacattttagacatctactaagccagtgcgacttcacaccatggttggcttggaatgtggccgctaacacgacaggggtcatggatagaagctggacatggagtggccctgagagcaatactatagacgaccagaatggagatgtggtgaagtttaggtcaccaggtggagcggaaagaactctcaggcccctgtggaaggatgctcgcacgtttagagagggtagagacgtgaaggagttcgtgttatatgcgtccggacgaaggagcgcaagtggaatcctggagagcatgggagccgtgccgacactcctgagggacaagtgcgtccacgcttatgatgtgttttatacattgtacagaggaagtccaggtacaagggcctacgccatggcacagagggaggctcctgaggcggttctgacggcattggaagtggtgattctgggagcgctgacgtgtggtgtgctgtggagcctgatgacaagggggtcacccggccgcatggggctgggtgtggttgtcctactggtctcgctgggtctcatgtgggccgggggtgtgacctatgggcagatggctggagtatcactgctgttttatgcttttttgacagtcatacagccggagccaggaaagcagcggagcactgatgacaataagttggcctttgtgctgctgttcttaggagtggtcattggaggagtggcggccaacgagatggggtggttggagagaacaaagcacgacatttccaggttgctatggccggtgacaggagagggcggcggcgttttacaggtgtgggccgacattgacatccagcctgcaaggtcgtggggcacttatgtgtttattgtctctctgtgcacaccttaccttgtccatcagctccagaccaaggtgcagcagctggtcaacagctcagtggcctcgggagcgcaagggatgcgcgaagtggggggaggagccccattctttggagtgaagggccacgtgttgacactgggagtgacatcactggtgggagccactcctgtgtcgctgggactcggagcggctctggcggtttttcatctgacgctggtgctgtctggggtggaggcagaattcacgcagagggttcacaaggcattcttttcgggaatggttaaaaaccccctggtggatggagaggtcacgtgcccctttgatggaggtgagagtaagccagctttttatgaacggaagttaagcttgattgtggctttggcactgtgtgcgctttcgttggtgctcaaccgcaatgcatgggccatcgccgagtcgggtgccgtgggagtggcagcccttgggcagttgatgagaccagatgaagagacttggtggaccatgccgatggcgtgcgggatggcaggactggttcgaggaagtctgtgggggcttctcccaataatgcacagggcttggctgaaaacaagcggaacccgaagaggtggaggagagggcgagacacttggtgacttgtggaaagagaaactgaatggcatgacaaaagaagagttctttcagtaccgtaggagcggtgtattggaaacagacagaacgacggctagagaactgctgaggcgtggagagacagctatgggcttggctgtttcacgtgggacagcgaaattggcatggctcgaagagcgtggctttgtcactctgaagggagaagtcgttgaccttggatgtgggcgaggaggctggtcctattatgcagcgtctcggccatcagtgatgggtgtgaaagcctataccatagggggacgtggccatgaggaaccccggcttgtcacgagtctaggatggaacctggtgaagttccgtagctctatggatgtgttcaccatggatccccacagagcggacaccatactgtgtgacatcggagaaagcagctcgtcagcggagaaggaaggggagaggtcacgtagagtgatttttcttatggaacaatggaaaatgaggaatccgacagcagcttgtgtgtttaaggttttagcaccatataggccagaagtgatagaggctctccaccggtttcagttgcagtggggcggggggctggttagggtccctttctcacgcaactccacgcatgagatgtattattccacggccgttagcggaaacttggtgaacgctgtaaatgtgacaacgaagaggctgatggataggatggcagactccagaggacccatcagggtgccagaagtggaccttggtgtaggaactagatgtgtggttctagctgaggatagagtgagggaggaagatgtcattgagagggtggaggccctgagaaagcaatatgcggacacatggcatgtggactctgaacatccgtaccgaacgtggcagtactgggggagctacagaacaccacccatgggctcggcggcctcgctgatcaatggggttgtcaagcttctcagctggccttggaacgcccgcgaggacgttgtcaggatggccatgactgatacaacggcatttgggcagcagagggtcttcaaggacaaggtggatacaaaagctcaggagccacaaccgggaacccgtgtcatcatgcgctgcgtcaatgattggatgatggatagactggcaaaaaggagcaagccgcgcctgtgcacaaaagaagagttttgcgcaaaggtgagatcaaatgcagcgttgggagcatggacagatgagcagaatatatggaagaacgccagggaagctgtggaagacccaggattttggaaccttgttgatgctgagcgtgagctacacaggcagggaagatgtgctcaatgcgtatacaacatgatggggaagcgtgagaagaagctgggagaatttggctcggccaaaggaagcagagccatatggtacatgtggttgggcagccggtttttggagtttgaggccctgggttttctcaatgaagaccattgggcgtcgcgagaggcttgtggagctggggtcgagggaacgagtttgaactatctcggctggctggtgagagaactggggcagatgaatggtggcaagatgtatgctgacgacactgctggatgggataccagaatcacgaatgccgatttggaggatgaggagcaactgttaaggcacatggaaggtgagcacagagttttggcacgcaccatatttcagaaagcatatcacgccaaagtggtgagggtcgcaagaccatcctccgatgggggatgtgtgatgggcatcataacgcggagggaccaaagaggttctggtcaggtcgtgacttatgcgctgaatactcctaccaacatcaaggtacagttgatgaggatgatggagagtgagggggtcatcggtccagctgatgcacatgaccccaggttgctgagagttgagaattggttgcagcgccatggcgaggaaaggttgaggcgtatgttggtaagtggtgatgactgcgtcgtcaagcccatagatgaccgttttgcaggggccttgtattttctcaatgacatggcaaaggtgcggaaagacaccacggaatgggaacactcacgtggatttgagagctgggaagaagtccccttctgcccacaccactttcacgagctggtcatgaaggacggacgcacgctggtggttccatgtagggatcaggatgagttggtggggagagccagagtgtcgccaggatgtggttggagcataagggagaccgcatgcctttccaaggcctatggacagatgtggcttctgagttactttcacaggcgagatcttcgaactctaggactggctatatgctctgcggtgcctgttgattgggtgcccactggacggacgacttggagcattcacgcaagtggtgcttggatgacgacagaagacatgttggaggtctggaatagagtgtggattcaggacaacccctacatggaagataagagcaaggtcgcggaatggagagacgtgccctacttgcctaaggcgcaggacatggtctgcgggtcactcataggcagggcagacagagctgaatgggcgcggaagatatggacaggggttttgaaggtgcgggctatgattgggcatgagagataccgagactacctgtcatgcatggacagacatgaagctccgtggatgacggacctgaatagcgacatcctgtaa

SEQ ID NO: 11756 - DNA, 855 bp, unidentified
  source 1..855: mol_type = other DNA
  misc_feature 1..855: note = Synthetic
atggcttacgcacgctaccggcgacgccggccctaccggacgaatcggaagaggacctcatacaggcggaatacgaggcgtacacgaaatgcgccttttcgacgacgatcctatcggaggccggccaatcgattcaaaaagcgggtgcttgcaatctcttctaagaagaagtttgacactatgcggtcgggatcagccaacggggtcatcgacgtgacattcaatgacgttcaacaagcgatcatggcgtggagtccaacgacgatcccttacaacgaagtggagcactcgcccgctcatcgcaattctcagcagattttcttcactggcgtcaaggagaccctggatccgtatgccatctttccgtttcattggcgtcgtgttgtgttctggacccacgagaggtttccgcagtttgagacgatcgttgctgcaggcgggactcgtttccgttatggtgtgacttacggcgtcaccgatactcctgtgcaggctattcaagagttgatgttccagggcacgattggcatcgattgggaccctactcgccccatggacgcgcgtcttgacaggcatcgaatcaagattgtttctgacaagcgggttaatttcaatccgcagtcggataatggacgctattctgttttcaaacgttggcacagcattcgccgtcgtattatgtatgatcaggaggaggcgggcgatgatcagattagtgatgtttggtctactgtcgctccaacgtcatcaggcaatttgtttattgtggatttctttggctttccgcctggtttggcacaaggcgctgcagcgagacttggtttgcagagtactgtttattggagggagtcatga

SEQ ID NO: 11757 - DNA, 174 bp, unidentified
  misc_feature 1..174: note = Synthetic
  source 1..174: mol_type = other DNA
atcggaagaggacctcatacaggcggaatacgaggcgtacacgaaatgcgccttttcgacgacgatcctatcggaggccggccaatcgattcaaaaagcgggtgcttgcaatctcttctaagaagaagtttgacactatgcggtcgggatcagccaacggggtcatcgacgtga

SEQ ID NO: 11758 - DNA, 1593 bp, unidentified
  source 1..1593: mol_type = other DNA
  misc_feature 1..1593: note = Synthetic
atggctaagcgatatgcatcaagaaagagagtttatcgtcgaaaaacgcggaaaccttttagaagggttcgtcgatatcgtgttaaggcacgttcgacagctaaacgttattacaggcttaagagggctgctaggaattattcaaaggctaagaagattagaagggctaaaaggcaatataagacaatgtctggcaaaggtgttaagaataaattgtccaagctttctatatcggaatttattcaattgccttattatgaccttattagacttgcttctatggtttgtagtaagattgctccaactggttatcctcttactgacactcagatggataattttactaaattatatacaaacagttttctttacaaaatgggtgctatactacctgagaagctttttactgcttctaatccttttattgttggatatgataaggctcttcctccttatttgtatggctataatcccatacttacgccggttacctgcggtcaaaaaatgcaaatatatgcgtcactttattccaaatttaaatatgttggtatcaaagtttcatggcatccaaggaataaagcagtctcatcatatgtaccttctgaatttaaattaacatatgataaggatcctgttgcaatggctgctcttctaccaaatccagcatcaccactagtaccatcaacaatagcacagggaaacgcaatgtatactcctaaggataggttaacacaaactgcagagatgagtaaatcagtagctgttgtatcaggaaattattacatgcacgtttattttggaaaacagattgaaacatcaaagacatgggatttaccttatttccaatgggtgaaagatgaaactcatgaatttcttcaacaagttagctatttaaataataattctaataaaggaagagttaaagctgctccttattatgataatgaaacattacttccatgtattgaaggtaattcaaagttacataaagtatatgatatgtcaaagcctttttcattctttgttagaccaatggttattgattcatctacagtgaaggaggctaatgagaatgctgcagctaatattgaagttgtaactaatcaacataagtttgaaacattaactaaagggcttaaacatcttggttatcgttcatttgatcattcattagtaccaccatcaatagaaataccacaagataatcaacaacttgatgaagttatgaaaaatagatgggctattaactcagatgatgataacttctttaatcctactatgttttggtattgtttcacaacatcagatgctccacctgaagcaagttattcgagtgctacaccatatcaagcattacctttctcatattataattcacagatatcttcagatactccaaatgcaagagctagagcagagttgtcagcacattttggaacgtataatgatgctcttaatcagtatggatattttgatgtaacattctataccaaatggaagggagagaggcctttggtctcgaaatcttcctatactggtatagtaccatcagaaacaggtgttaatggtttatccaccatcatttctaattaa

SEQ ID NO: 11759 - DNA, 816 bp, unidentified
  misc_feature 1..816: note = Synthetic
  source 1..816: mol_type = other DNA
atggctaagcgatatgcatcaagaaagagagtttatcgtcgaaaaacgcggaaaccttttagaagggttcgtcgatatcgtgttaaggcacgttcgacagctaaacgttattacaggcttaagagggctgctaggaattattcaaaggctaagaagattagaagggctaaaaggcaatataagacaatgtctggcaaaggtgttaagaataaattgtccaagctttctatatcggaatttattcaattgccttattatgaccttattagacttgcttctatggtttgtagtaagattgctccaactggttatcctcttactgacactcagatggataattttactaaattatatacaaacagttttctttacaaaatgggtgctatactacctgagaagctttttactgcttctaatccttttattgttggatatgataaggctcttcctccttatttgtatggctataatcccatacttacgccggttacctgcggtcaaaaaatgcaaatatatgcgtcactttattccaaatttaaatatgttggtatcaaagtttcatggcatccaaggaataaagcagtctcatcatatgtaccttctgaatttaaattaacatatgataaggatcctgttgcaatggctgctcttctaccaaatccagcatcaccactagtaccatcaacaatagcacagggaaacgcaatgtatactcctaaggataggttaacacaaactgcagagatgagtaaatcagtagctgttgtatcaggaaattattacatgcacgtttattttggaaaacagattgaaaca

SEQ ID NO: 11760 - DNA, 603 bp, unidentified
  source 1..603: mol_type = other DNA
  misc_feature 1..603: note = Synthetic
atgcatcaagaaagagagtttatcgtcgaaaaacgcggaaaccttttagaagggttcgtcgatatcgtgttaaggcacgttcgacagctaaacgttattacaggcttaagagggctgctaggaattattcaaaggctaagaagattagaagggctaaaaggcaatataagacaatgtctggcaaaggtgttaagaataaattgtccaagctttctatatcggaatttattcaattgccttattatgaccttattagacttgcttctatggtttgtagtaagattgctccaactggttatcctcttactgacactcagatggataattttactaaattatatacaaacagttttctttacaaaatgggtgctatactacctgagaagctttttactgcttctaatccttttattgttggatatgataaggctcttcctccttatttgtatggctataatcccatacttacgccggttacctgcggtcaaaaaatgcaaatatatgcgtcactttattccaaatttaaatatgttggtatcaaagtttcatggcatccaaggaataaagcagtctcatcatatgtaccttctgaatttaaattaa

SEQ ID NO: 11761 - DNA, 603 bp, unidentified; identical to SEQ ID NO: 11760
  misc_feature 1..603: note = Synthetic
  source 1..603: mol_type = other DNA

SEQ ID NO: 11762 - DNA, 1593 bp, unidentified
  misc_feature 1..1593: note = Synthetic
  source 1..1593: mol_type = other DNA
atggctaagcgatatgcatcaagaaagagagtttatcgtcgaaaaacgcggaaaccttttagaagggttcgtcgatatcgtgttaaggcacgttcgacagctaaacgttattataggcttaagagggctgctaggaattattcgaaagtcaagaagattagaagggctaaaaggcaatataagacaatgtctggcaaaggtgttaagaataaattgtccaagctttcaatatcggaatttattcaattgccttattatgatcttattagacttgcttctatggtttgtagtaagatttctccaactggttatcctcttaatgacgaccagatggattcttttgttaatgaatatacaagcaggttcctttacaaaatgggtgctatactacctgagaagctttttactgcttctaatccttttattgttggatatgataaggctcttcctccttatttgtatggctataatcccatacttacgccggttacctgcggtcaaaaaatgcaaatatatgcgtcactttattccaaatttaaatatgttggtatcaaagtttcatggcatccaaggaataaagcagtttcatcatatgtaccttctgaattcactataaaacctactcaggatgtagtaacagaggctggtctagttgtacgaccaggtacagcaccagttccatctttgatagaaaaggcaaacgttatgattacacgttcagatcaattaaagcaaacggtagagatgaataaatcagtagctgttgtatcaggaaattattatatgcacgtttattttggaaaacagattgatacatcaaagacgtgggatttaccttattttaaatgggctcagggtgaaaacatgatatatcttcaacgggttagtaatggtgataattcttctaataaaggaagagttaaagttgctccttattatgataatgaaacattacttccatgtattgaaggcaattcaaagttacataaagtatatgatatgtcaaagcctttttcattctttgttagaccaatggttattgattcatctacagtgaaggaagctaatgaggcttcagcacagaatggtgtggttgtaggtaatcaacatgataatgaacaacttctaaaaccattgaaacatcttggttatcgttcatttgatcattcattaactccttcaacagtagaaataccacaaaatgatcaatcattaaatgtaaatcagagagatagatggtctattaactcagatgataataacttcttcaatccaattatgttctggtattgtttcacaacaacagataatccaggtgagatgaattatacgagtgctacaccatatcaagcattacctcttgcatattataatgctcaattaacttctgatgtaccatattttgaagctaaacaggaattatctgcacattatggaactattaatgatgctcttaatcagtatggatattttgatgtaacattctataccaaatggaagggagagaggcctttggtctcgaaatcttcctatactggtatagtaccatcagaaacaggtgttaatggtttatccaccatcatttctaattaa

SEQ ID NO: 11763 - DNA, 1593 bp, unidentified
  misc_feature 1..1593: note = Synthetic
  source 1..1593: mol_type = other DNA
atggctaagcgatatgcatcaagaaagagagtttatcgtcgaaaaacgcgtaaacctattaaaaggtttcgtcgatatcgtgttaaagcacgttcgacagctaaacgttattacaggcttaagagggctgctaggaattattcgaaagtcaagaagattagaagggctaaaaggcaatataaaacgatttctggcaaaggtgttaagaataaattggctaagctttcaatatcagaatttattcaattgccttattatgaccttattagacttgcttctatggtttgcagtaaagttactccgactggttattctcttactgagcaagatatgcaacaattttataatatttataagcgcgactttctttacaaactgggtgctatattacctgagaagctttttactgcttctaatccttttgttgttggatctgataatgctcttcctccttatttattcgggtttaatcccatacttacaccagttacgtgtggacaaaaaatgcagatttacgcatcactttattccaaatttaaatatgttggtatcaaagtttcatggcatccaaggaataaagcagtttcaacgtatgtacctgctgaatttaaagtaaagtatgatggagatcctgttgcactggctgctcttctaccaaatccagcatcaccactagttccatcaacaatagcacagggaaatgcaatgtatactcctaaggatcgtttaaatcaaacaatagagttgactaaatcagaagctaatgtatcaggaaattattatatgcatgtatattttggtaagcagatagaatcatcagaaacatgggatttaccatattttagatggcgtgaaagtggtggtcaaaaacaagtatcattacaacatcagaaaggcaaaactgataacaaaggaagagttaaagctgctcttttttatgatccagttacacttcttccatgtattgaaagcaattcaaagttacataaagtatatgatatgtcaaagcctttttccttctttgttagaccaatggttgtagattcatcaacagtaaaagaacctaacgagagaggagcagataatatagagacaattgattgtaattgtcagcatgaatcattaactaaagggcttaaacatcttggttatcgttcatttgatcatgcattagttccgtcaacagtagaaataccacaagatggtcaacaacttacagatcttactcaagatagatggtattacaattcagatgatgataacttcttcaatcctactatgttttggtattgttttacaacatcagatgctccatttgatgagagttattctagtccttcaccatatcaagcattagctttctcatattataatacacagataccttcaaatactccaaatgcaaaagctagagcagagttgtcagcacattttggaacgtataatgatgctcttaatcaatatggttattttgatgtaacattctataccaaatggaagggagagaggcctttggtctcgaaatcttcctatactggtatagtaccatcagaaacaggtgttactggtttatccaccatcatttctaattaa

SEQ ID NO: 11764 - DNA, 816 bp, unidentified
  source 1..816: mol_type = other DNA
  misc_feature 1..816: note = Synthetic
atggctaagcgatatgcatcaagaaagagagtttatcgtcgaaaaacgcgtaaacctattaaaaggtttcgtcgatatcgtgttaaagcacgttcgacagctaaacgttattacaggcttaagagggctgctaggaattattcgaaagtcaagaagattagaagggctaaaaggcaatataaaacgatttctggcaaaggtgttaagaataaattggctaagctttcaatatcagaatttattcaattgccttattatgaccttattagacttgcttctatggtttgcagtaaagttactccgactggttattctcttactgagcaagatatgcaacaattttataatatttataagcgcgactttctttacaaactgggtgctatattacctgagaagctttttactgcttctaatccttttgttgttggatctgataatgctcttcctccttatttattcgggtttaatcccatacttacaccagttacgtgtggacaaaaaatgcagatttacgcatcactttattccaaatttaaatatgttggtatcaaagtttcatggcatccaaggaataaagcagtttcaacgtatgtacctgctgaatttaaagtaaagtatgatggagatcctgttgcactggctgctcttctaccaaatccagcatcaccactagttccatcaacaatagcacagggaaatgcaatgtatactcctaaggatcgtttaaatcaaacaatagagttgactaaatcagaagctaatgtatcaggaaattattatatgcatgtatattttggtaagcagatagaatca

SEQ ID NO: 11765 - DNA, 507 bp, unidentified
  source 1..507: mol_type = other DNA
  misc_feature 1..507: note = Synthetic
attacaggcttaagagggctgctaggaattattcgaaagtcaagaagattagaagggctaaaaggcaatataaaacgatttctggcaaaggtgttaagaataaattggctaagctttcaatatcagaatttattcaattgccttattatgaccttattagacttgcttctatggtttgcagtaaagttactccgactggttattctcttactgagcaagatatgcaacaattttataatatttataagcgcgactttctttacaaactgggtgctatattacctgagaagctttttactgcttctaatccttttgttgttggatctgataatgctcttcctccttatttattcgggtttaatcccatacttacaccagttacgtgtggacaaaaaatgcagatttacgcatcactttattccaaatttaaatatgttggtatcaaagtttcatggcatccaaggaataaagcagtttcaacgtatgtacctgctgaatttaaagtaa

SEQ ID NO: 11766 - DNA, 507 bp, unidentified; identical to SEQ ID NO: 11765
  source 1..507: mol_type = other DNA
  misc_feature 1..507: note = Synthetic

SEQ ID NO: 11767 - DNA, 1593 bp, unidentified
  source 1..1593: mol_type = other DNA
  misc_feature 1..1593: note = Synthetic
atggctaagcgatatgcatcaagaaagagagtttatcgtcgaaaagctcgtaaacctattaaaaggtttcgtcgatatcgtgctaaggctcgttcaactgctaaacgatattttaggcttaagagggctgctaggaattattcaaaagtcaagaagattagaagggctaaaaggcaatataaaacgatttctggcaaaggtgttaagaataaattatcaaagctttcaatatcagaatttattcaattgccttattatgaccttattagacttgcttcaatggtttgtactaggcattctccgactggttatcctcttactgagcaaactatgcaatcttttgctgaattatattcagaacaatatctttacaaattgggtgctatacttcctgagaagttgtttgttaattctaatccttttattattggagctgatagatcttttactccttatttattcgggtttaatcccatacttacaccagttacgtgtggacaaaaaatgcagatttatgcatcaatttattccaaatttaaatacgtcggtgtcaaagtttcatggcatccaaggaatagagcagtttcatcatatcttccttctgaatttaaagtaaagtatgatggtgatgttttgtctatggcttctcttacaacaggcccaacttcagatggtgtaccatcaacaattgcacagggaaatgcaatgtttactcctaaggatcgtttaaatcagacaatagagttgactaaatcagaagctaatgtatcaggaaattattatatgcatgtatattttggtaagcagatagaatcatccgaaacatgggatttaccatattttagatggcgtgaaagtggtggtcaaaaacaattatcattacaacatgagaaagctaaacataataataaaggaagagttaaagctgctcttttttatgatattcaaacacttcttccatgcattgaaactaattcaaagttacataaagtgtatgatatgtcaaagccattttccttctttgttagaccaatggttgtagattcatcaacagtaaaagaacctaatgagagaggtgcagataatatagatacaattgattgtaattgtcagcatgaatcattaactaaaggacttaaacatcttggttatcgtagttttgatcatgcattagttccttcaacagtagaaataccacaagacaatcaagaactttcaaatcttactcaagatagatggtattacaattcagatgatgataacttcttcaatcctactctgttttggtattgttttacaacatcagataatcctgtcgatgcatcttatagaactcattcaccatatcaaccattggctagttcttttaataatgcacaaatacctgctggtgctccaaatggaaatgctagatatgaattatcatcacattttggaacgtttaatgatgctcttaatcaatatggttattttgatataacattctataccaaatggaagggagagaggcctttggtctcgaaatcttcctatactggtatagtaccatcagaaacaggtgtcactggtttatccaccatcatttctaattaa

SEQ ID NO: 11768 - DNA, 816 bp, unidentified
  source 1..816: mol_type = other DNA
  misc_feature 1..816: note = Synthetic
atggctaagcgatatgcatcaagaaagagagtttatcgtcgaaaagctcgtaaacctattaaaaggtttcgtcgatatcgtgctaaggctcgttcaactgctaaacgatattttaggcttaagagggctgctaggaattattcaaaagtcaagaagattagaagggctaaaaggcaatataaaacgatttctggcaaaggtgttaagaataaattatcaaagctttcaatatcagaatttattcaattgccttattatgaccttattagacttgcttcaatggtttgtactaggcattctccgactggttatcctcttactgagcaaactatgcaatcttttgctgaattatattcagaacaatatctttacaaattgggtgctatacttcctgagaagttgtttgttaattctaatccttttattattggagctgatagatcttttactccttatttattcgggtttaatcccatacttacaccagttacgtgtggacaaaaaatgcagatttatgcatcaatttattccaaatttaaatacgtcggtgtcaaagtttcatggcatccaaggaatagagcagtttcatcatatcttccttctgaatttaaagtaaagtatgatggtgatgttttgtctatggcttctcttacaacaggcccaacttcagatggtgtaccatcaacaattgcacagggaaatgcaatgtttactcctaaggatcgtttaaatcagacaatagagttgactaaatcagaagctaatgtatcaggaaattattatatgcatgtatattttggtaagcagatagaatca

SEQ ID NO: 11769 - DNA, 603 bp, unidentified
  source 1..603: mol_type = other DNA
  misc_feature 1..603: note = Synthetic
atgcatcaagaaagagagtttatcgtcgaaaagctcgtaaacctattaaaaggtttcgtcgatatcgtgctaaggctcgttcaactgctaaacgatattttaggcttaagagggctgctaggaattattcaaaagtcaagaagattagaagggctaaaaggcaatataaaacgatttctggcaaaggtgttaagaataaattatcaaagctttcaatatcagaatttattcaattgccttattatgaccttattagacttgcttcaatggtttgtactaggcattctccgactggttatcctcttactgagcaaactatgcaatcttttgctgaattatattcagaacaatatctttacaaattgggtgctatacttcctgagaagttgtttgttaattctaatccttttattattggagctgatagatcttttactccttatttattcgggtttaatcccatacttacaccagttacgtgtggacaaaaaatgcagatttatgcatcaatttattccaaatttaaatacgtcggtgtcaaagtttcatggcatccaaggaatagagcagtttcatcatatcttccttctgaatttaaagtaa

SEQ ID NO: 11770 - DNA, 603 bp, unidentified; identical to SEQ ID NO: 11769
  misc_feature 1..603: note = Synthetic
  source 1..603: mol_type = other DNA

SEQ ID NO: 11771 - DNA, 24 bp, unidentified
  source 1..24: mol_type = other DNA
  misc_feature 1..24: note = Synthetic
atgtttattccgtatcgcgggtag

SEQ ID NO: 11772 - DNA, 18 bp, unidentified
  misc_feature 1..18: note = Synthetic
  source 1..18: mol_type = other DNA
atggaaagttatatgtaa

SEQ ID NO: 11773 - DNA, 33 bp, unidentified; identical to SEQ ID NO: 1442
  misc_feature 1..33: note = Synthetic
  source 1..33: mol_type = other DNA

SEQ ID NO: 11774 - DNA, 273 bp, unidentified
  source 1..273: mol_type = other DNA
  misc_feature 1..273: note = Synthetic
atgacgtcccggctctccgatcccaactcctcagcgcgatccgacatgtccgtgccgctttatcccacggcctcgccagtttcggtcgaagcctactactcggaaagcgaagacgaggcggccaacgacttcctcgtacgcatgggccgccaacagtcggtattaaggcgtcgacgcagacgcacccgctgcgtcggcatggtgatcgcctgtctcctcgtggccgttctgtcgggcggatttggggcgctcctgatgtggctgctccgctaa

SEQ ID NO: 11775 - DNA, 126 bp, unidentified; identical to SEQ ID NO: 2685
  misc_feature 1..126: note = Synthetic
  source 1..126: mol_type = other DNA

SEQ ID NO: 11776 - DNA, 126 bp, unidentified; identical to SEQ ID NO: 2685
  misc_feature 1..126: note = Synthetic
  source 1..126: mol_type = other DNA

SEQ ID NO: 11777 - DNA, 2127 bp, unidentified
  source 1..2127: mol_type = other DNA
  misc_feature 1..2127: note = Synthetic
atggggaacgcttcctctatcgttcagacgatcaacgtcaccggagatggcaatgtgttcaaaccatcagctgagacttcatccaccgccgtaccgtcgttaagtctatcacctggaatgctgaatcctggaggtgtgccatggatcgcgattggggatgagacatctgtgacatcgccaggcgcattacgccgaatgacatcaaaagatatcccagagacagcaatagttaacacagacaattcatcaggcgctgtgccaagtgagtcagccttagtgccctataatgatgagccattggtggtggtaacagagcatgctattaccaacttcactaaagctgagatggcacttgaattcaatcgtgagttccttgacaagctgcgtgtgctctcagtgtcaccaaaatattcagaccttctgacttatgtcgactgctacgtcggtgtgtcagctcgtcaggctctaaacaatttccagaagcaagtgcctgtgattacgcctactaggcagacgatgtatgtcgactctatacaggcggccctaaaagctctggaaaagtgggagattgatctgagagtggctcagacgctgctgcctacgaacgttccgattggagaggtctcttgcccgatgcagtcagtagtgaagttgctggatgatcagttgccagatgatagcctgataagaaggtaccccaaggaagccgccgttgctctggctaaacgtaatggaggaatacaatggatggatgtatcagagggaaccgtaatgaacgaggctgttaacgccgttgcggctagtgcattggcactttcatcatcagctccacctttagaggaaaagtcaaagttaaccgaacaggcgatggatctcgtgaccgcggctgaacctgagataatcgcctcgctcgtgccagttcctgcaccagtttttgccataccacctaaaccagcagattacaatgtacgaactctaaaaattgatgaagccacgtggttacggatgattccaaagacgatgaacacacctttccaaatacaggtgactgacaacacaggcactaattggcatcttaatttgagaggggggactcgtgtagtgaatttggatcaaatcgctccgatgagatttgttctagacctagggggcaagagctacaaggaaacaagctgggacccaaatggtaagaaggttgggttcatcgtctttcaatccaagataccatttgaactctggactgccgcctcacagattggtcaagccacggtggttaactatgtccagctatatgccgaggacagctcatttactgcacagtctattattgctactacatcattggcttataactatgagcctgaacagctgaataagactgatcctgagatgaattattaccttttagcgaccttcatagattcggctgctataacgccgacgaatatgacgcagcctgacgtctgggatgccttgttgacgatgtcccctttgtccgctggtgaggtaacagtgaaaggtgcagtagtgagtgaggtagtccctgcagacttgataggtagctacactcccgaatccttaaatgcctcacttccgaatgatgctgctagatgtatgatcgatagagcctcgaagatagctgaagcaataaagattgatgatgatgctggaccagatgaatattcccccaattctgtaccaattcaaggtcagcttgccatctcgcaactcgaaacgggatatggtgtgcgaatattcaaccccaaagggatactctccaaaattgcatctagggcgatgcaggctttcattggtgacccgagcacaatcatcacgcaggcagcgccagtgttatcagataagaataactggattgcactagcacaaggagtcaaaactagtctacgtactaaaagcctatcagcgggagtgaagactgcagtgagtaagctgagctcatctgagtctatccagaattggactcaaggattcctggataaggtgtcaacgcattttccagctccaaagcctgactgttcgactagcggagatagtggtgaatcgtctaatcgtcgagtgaagcgcgactcatacgcaggagtggtcaaacgtgggtatacacgttaa

SEQ ID NO: 11778 - DNA, 57 bp, unidentified; identical to SEQ ID NO: 2688
  misc_feature 1..57: note = Synthetic
  source 1..57: mol_type = other DNA

SEQ ID NO: 11779 - DNA, 10140 bp, unidentified
  misc_feature 1..10140: note = Synthetic
  source 1..10140: mol_type = other DNA
atggtaggtaaattgaaaaacgcaaaaaataaagggagaacccggctacgccggcctcccaaagggaaagccatgggcatgggactgattctcggaatcatgaactacgcctcccacatcgctcttggcatgaaagtcaacagcaggctaacgagtttctggaaaatgactccacctgggaaattagctaaggggataaccactctgatgaacatcctccggactctgctaaacggaatcttgggacgcaaaaaacaaaggagaggaggaactgaaagcctgttccccataatgtttctaactggattgatggctatgcaggtatcccaaaatggtgatggttggctgctttcacctgatcaaatggatataggaaaaacctacaaagttggtactggactatgcattttctcttcactggatattggcgtgccatgcaacttgaccataacatatgcgtgtgtcaccttggctaatactgaagagccagtggatttggactgcttttgccgtgacgttcagaatgtgtgggttaaatatccgctttgtaaacctggaggccacaggctaaaacgatcgctgtcaataactgaacatccatcgtctgtctcactagacaaaccaactttgtggcatcactggaacagtgtcaatgatcgaattggcaagagtgaagagtggatagttaccaatgcttggaaaagtttggtcattgctattgttgtcatcatggtgtttggaatcagttaccagagcatgatagtgatatgcatcgcggctctgatagctccaagctactcaactcagtgtgtcaacatccaaaaacgtgatatcataaggggagcgtctgacgtttcttggtttgatgtcctgttggaaaagggggcttgtgttaccattagtgctcaggataaaccaagtgtggatctgtggctcgatgatgtgattcaagaatctctcatcgaaggaagacactattgcaccaaggcatccatcacagaccttaaagctgacgctcgctgtcctacgcaaggtgaagccaccatgcgtgaggaacatctcgacggatatgtctgcaagagaagcttcagtgatagaggctggggaaatggttgtggtttgtttggaaaaggcagcatcgttggatgtgctaaggccacttgtggggcaaatgacatcatcaaaagctactcgtatgattcaccaaaagtcaaatatgtaattggagctgaagtgcatcaaggcaagttgctaacaaacaacagcaccgacaggatagttaagacaactctcacagctgaatctgaaaagcataccatcacaatagcggattatggtagcatggacttcacatgtcgtgttgttgctagtgctgaattgtcaaacatcagaatgattgaacttgatggccatatgttcaatgtgcatgaggactggctgagtgacttgccattgccctccaaaatttcaggtggatcttggcatggaatggatcgtttagttgtatttaaagaaccacatgcagtaaagatggaaattcaggaatgtggagatcagagaccagcagtttttaaatcattggtcaaagctgaagaagtgaccaaaactagtaactcttaccatctcaccggaggacatgttgattgtagagtgagtactctcaatcttcgaatgaagggtttgacgtatcaaatgtgttcttctagctttgtgtggcacaaaagaccagtggccacgcaacatggcacggttgcaatggaagtcaaatataagggatccgatgctccatgtagaatacctgtttctgttgaaaaggaaggttataatgggaagaattttggaaatcttattactgctaacccatttgccgctaataatgaggctgttgtgttccttgaattggaagctccgctaggtgtatcgaccatcaaagttggtggagctgtgtttcaatggaaacaagagggaagttcaatcggaaaagctgtaactctgatgaaaaggaacattgaaaagacattgataacctcaagtgcttactggagcagttcagaacctttcacttcagcaggcataatgcgcattctccgaatgccgtttgacatgatatttggaggtgtaggatttctgggaaagctcatgatatctggagttctgatctggttgtgtgtaaatgtccaaaactcaaccttatctgtggtttcaggagtgattggatttatgcttcttggatttacaactggagtcatgggagaccacggatgcgcactagacacatacaggaaagaaatgcggtgcggggatggattgatggtttggaatgatgtcaacaattggcatgaggcctacaaatattaccctgaagatcctgagattttccttgcaagcttggttgaggatagagagaaacattgtggatattctccatcaaaccacattgacttggccatgtggaaagcacttgaggaggagataaactggtttctggaagatcagtcagttgattggaggataatggttggaaatgaagaaaaggttttccacaaaacaaactcaagtggctgggaaagaagagctgggaggaattctctatcatggaagaactgggcgaaaagtttcaaattgatgtcatggattttggagaggaaacaaggcaacggaacgtatttcgtgggtcctgtaggccttgatgaatgtccccttgctaaccgatcatggaacgctttcaaagtgtctgagttcggggctggcattttacaaacaagggctttcattgacattcaaacatcaaacagtcagttttgtgaccagggactgatagggtctggcgctaaggataaaagaattgtgcatggatctccctggatgtggatggacagctatgaagtcaatggcactctccagctacagaaattagagatgaaatatgccgttgaatgcttatggccattaagccacacacttggaggaaaaggagctcctgagtcacaactcattctccctaagaaacttggaggaccagtatcaacactgaacatgattaaagggtatgctacccaagaattaggaccctggaaaaatggggctcttgttcttgaaagaggagagtgtcctggaacaaaagtccaaattctagaggattgtgataaaagaggacattctgttagaagtaccacccaaggaggggtaacaatacctgactggtgttgtaaacactgtgttttgccacctttgaaattcaccaatgccgatggatgttggtatgccatggaaatcagaccactgaaaacgacacctggactagtttatgcaggaagtatgacagctttggaagctcagtcatggggagttctctctgtgatgttgctgttttacatgggctttctaccgaagattgcaaaagaaagatggagtgtgccaactgccttcatgtttttcgtctttgccatcacagggttgattgattgcagggattttctccgctacttgctggcggtgggaacaacctttgcgtggcaatttcctgagccaatgctttggatggttgccatgcagactgtgttcatgctacgtcctgccctgacagttggaattttatttgccagaagctggaagtttgaaagaatcttggctcttgcttctctcctgcaagtctttcaacatgtgactatggagtgggaatcagtttggaaagttttggattccttgggctttgttgtctatgggttcttactttctaagtctggaatgcaaagccacgtgttcatgctgtttgtagtgtcactgacttggatggatagcatagtaatgcaacatgctctagcacttggaggagtgatgctcttgatgtccattagtccaaagttcatgcaatctgattggatacagaagacacagttaaccattctgggaggattgaagatcctgaatgctcctttctatgttgtagcattgattttttacacatgtttcaatgattacatgcatagaggccaaagagctactgattacacagccatactcggcattgttatggcaataggagcagccatttgcaaaaatggtctggaatcaagtggatggatgatcggaatcatgggaattttcctagtcttttttctcctccaattaagcaaaggagagatgacagctgaatgggctggatactgtgaatggaaaaaagattgtgataaatctgttggcagtctgagtcttgaggtgaaaaggatgtccgacggaagactggtcaacctctcaaaagacaaggagagtatgactgaagttatcatggtgtctgttggaatgattgtcactggttttcattggattggaattcctctaaccatagctatgcttggaatcaaaaagtgttatgatgccacgcaaagatcaattattgtgtttggagttggtgaagatccagaaggtgagaaagtcagtattcaagatggggtttaccgaattatggtttcatcactcttcggaaagaaacaagttggagttggaatttggaccggtaactcattccataccatgtggcacgtcacacgtggtgctgtattgaacatctgtgggaggaaaatcgtaccagaatgggccagcatcacagaagatctaatatcatataatggtgggtggagattgttcactagatgggatggaacagaagttcaagttcacgcttacacccctgatggaaaagtcaccacaacacagctgcttcctggaagcatgaaggttgaaggtggtcttgagttgggcctaattccacttgattttccaccaggatcttctggctcaccaatcatatcatcagatggaaagataattgggctgtatggaaatggagtcttacatggggacacatactgtagttctatagctcaaactgagaagaaggaagaagatgttccacaaccaaagacacttgaaggagatggctggttgtcaaaagggaaaataaccgtaattgatgcccatcctggaagtggtaaaacacatagaatactaccaaatttagttaaaagggctgctgagagaaagatgaggacacttgttttagctccaacacgggttgtgataaaagagatggaaagtgctctcaaaggaatggatatcagttttcactcatcggccgtgtcaacgaagaccccaggatcacttgttgatgtcatgtgccatgctacttttgtaaataggaaattaattcatactccacagaggaattatgaggtaataatcatggatgaagctcattggacagacccgagtagcattgcagctcgtggatacatcactagccagtgtgaaatgaaaaaatgtgctgttgtgttgatgacggctacacctcctggagttgatgatccatgggcaaacagtaatgagaagattgctgatgttgaaaagatgattcctgatgagccatggaaacaaggttatgaatggataacagactttgaaggaagaacagcgtggtttgtgccatcatacaatgcagctcagggaatctcaaaagccttgagagagagaggaaagaaagtcctcattctgacaagcaagacctttcatgacaactatcctaagatacagtcagaaaaacctgatttcatactcaccactgacatttcggagatgggtgccaatttagatgttgatagggtaattgatccaaggacaactcttaaaccaatggaaaaaggcaatattgtggaggttagcggtgaaatatcaataacgcctgcctcagcagcccagagaaggggaagagtcggacgagttaagggaaaaaaggccgaatacatctatcaaggaaccacggaaatggatgattcagatctaatttgctggaaagaagcacaaatgttactggacaacatggatagccgacaaagagcgacatgtcaattctatgaacctgaacaagacaagatgactgaaattcctggctattatagactcacagaggagaagagaaaggtattccgtcatctcctaacgcagtgtgattttaccccatggctggcatggaatgtagctcagaataccaaaggcattgaggatcgtggatggttaaacataggtcccaatcagcatttagtgtcagatgaaaatggtgatccaatcaagtatacaacacctagtgggagagaaaggcaacttcaaccggtttggttggacaacaggatggtgaaagaaaaaagagacttggtttcattgctagaatacgcccaaatgagaagatcaggggttctgctaggcttacccagactgatgtaccaaaaagttgtggaatcaattgacatggtgcacacttattacacagctgacccaaattcacggaactttaaacttgctgagaaagaactacctgatgcttttctctgtattttgcagtcattgcttatgattgtgggagtgttcatcattctaatgtggatactaagtagaaccaaagttgacaggatctggattggaacgttggtgataggaatgtcaggattgacggcatggtacggaggagtgcctttgcctgttatctcaggtggagcgctggtctgctttgtgctgttaatctgtttggtaccagaggaaggaatgcaacgcactcaaattgactccacattggcaaccattttaatctgtgtgatactgactgttgtgacagttgttgccaatgaaatgcggctactggaaaatacaaagcgtgacataatggatctcttcaagagagacaccactgtgaacgaaagtcctgtcttccattacacgtgggaatcactcatggaatgggacatcaggcctttgaccatctgggccacatatgtggtttttgtcacgttagctaggccacaagccttgcacaaccttaaaatgttcacacaaagagtcattactggaacagtggctggaaaacatgacatggttaacttgcttccatttggagctgcttggctctctttgggtttaggagacttgactttggcagtcggggcgttcagaaacatgtcatgtctaaccttggtgggtggagtcttacttgccttggctcattggacttggttctatccgctgcatgcagcagctgaaagctcaaaagcccacaaaattgtaacacaatctctctcaaagaacaccatggtcgatggtgaaaccatttatcaattagaccaaacctctgcagagacagagaggagtgagaagattttctctatggtcactggcttcactttgactgctatcaatgttttcactcttcgcaaagcatgggctgtcttggagtgtgtgatggttggaatggtgttaatcaagtatctgattgaaccaaagggaactacattttggacccttccagtggttagtggattaacatcactggtccgaggagatttctttggtttgattcccatttctttcagggtctggctatatgccagaagtgatagacgaggtatagtaaccagtcatcacacattgggtgaaaagtggaaacttgaacttaaccagctaagtcataaagaattcctgagttacaggaaggttggaattttggaagttgacagacccgatgctgtgatgaatttaaataaaggcaaaaccaacactggacacgccgtttctagaggaacttcaaaactggcttggatgcatgaaagaggttttattcccttgtcaggtcatgtggttgacctgggctgcggccgcggcggctggagctactattgcgcagcacaaacaccagtaaggaaagtcaatgcttataccttaggtactggagctcatgagaaacctcgtctggtcgaaagcttaggttggaacctcatcacctttaagtcaaaaactgatgtattcaaactaaaaccatacagttgtgacactgttttatgtgatataggtgagtctaatccatcatatgctactgaggccaaaaagacacttgaagtgattgagatggtcggaaattggatgctagtaaaccctgagtcaaatttttgctttaaagtactgaacccttactcccctcaagttttagagaggttgacaaagttccagcacatgtttggaggtggaataatcagggtcccgcattcacgaaactcaacacatgaaatgtattttgtgtcaggaatcaccaataatttggttggaagtgtgaatgcagtcacaaagaaattaatgcagagaatgagacaagaaggaaaggaaagagtggtggctgacatcaagtttccagtcggcactcgttccaatcttacaacctgtgttaaggctgatgccaagctgattgaacagagaattgaaaaagttaagaatgaaaacaaaaattcctggacgtttgatgataatcatccatatcgcacatggcaataccatggaagctaccaaattcgggatgttggtacaaaagccaatgcaattaactatgtggttaaacttttgagttggccttggcaagcattggaaagtgtgttttccatatcaatgactgataccacagctttcggacagcagagagtgttcaaagaaaaagttgacacaaaagctcctgaacctccaaaagaggtcaaaatagtgatgaggaaagtgttcacctggttagtgaaaagaatattgaaaaaaggaggtaagattaggaaatgcactaaagaagaattcattaacaaggtggaatcacatgcgtccattggagcatggagccaagagatgcagggatggagtgatgccaaggaagcagttcatgaccccaggttttggaatatggtggacaaagagaggaaactacacctggaaggaaaatgtgaaatgtgcatctataacatgatgggtaaaagagaaaagaaaccaggtgagtttggatgtgccaagggtagccggaccatatggtacatgtggttaggtagcaggttcctagaatttgaatctttcggcttcttgaatgaggaacattgggcatcaagagagttgtctggaggaggggtagagagcataccactgttctaccttggatatcatctaagagagatggctaagaaacctggaaaactctatgctgatgacactgcaggatgggacactcgtataactgaagcagatctggatgatgaatgcatcctctgtgactatatggaggatgagcataaacaacttgctctttctctgtttgagctatgttacaaaaataaggtagccctttgtcccaggccaggaagacatggaggaactgtaatggatgtgatctctaggagagatcagagaggatctggtcaagttgtaacatatgcactaaacaccttaacaaatattaaagtccagttaatcagattggctgaaagtgaaggtgtgctggatgaagatttcaatgatcacgggattgaaacttggctgaaccactatggtgaggaaagattgtctcgtctcttgattagtggtgatgactgcgtggtaaacgcatgtgatgaaaggtttgggagaagcttgacatggttgaacaccatggagaaaatccgcaaggacattgacttgtgggctccatcaaatggatatgagaactttgaaaaagttgagttctgctcaaaccactttcatgagctgatgttgaaagatggacgtcagctggtcgtcccctgcaggagtcaaaatgaattagttggtagagcttctgtaaatcagggtggaagtgcaaccgttgcagggactgcgtgtctagccaaagcctatgcccaaatgtggaatttgttgtattttcacagaagagacttgaggcttctggggtttgccatcatgtctgcaacaccatcaaattggattccaactggaagaacaacatggtcaattcatgctacaaaagactggatgaccactgaagatttgttagatgtttggaacagaatctggattgatgaaaatccatggatggatgataagacaaacatcacaacatggaagaatgtggcctacctgcccagaggacaagacatgtgttgtggcagtcttattggcagctcaaaaagagcaacttgggccaaactcattcctggagcagttgaaaaagtgagagggatgattgggaatgaaaattacgtcaactaccttggagcaatgggacgctatgaatgtgatgatgtctcattccaactgtattaa

SEQ ID NO: 11780 - DNA, 897 bp, unidentified
  source 1..897: mol_type = other DNA
  misc_feature 1..897: note = Synthetic
atgagcaagatctttgtcaaccctagtgcacttagatccggcttggctgacttggagatggctgaggagacagtggatttggtgaataaaaacatggaggatagtcaagcccaccttcaaggaattcctatagacgtggaaacacttcctgaggatattaagaggctcagaatagcagactacaaacaggggcaacaggaggaggatgcttcgagacaagaagagggtgaggatgaggacttctacatgaccgagagtgaaaactcatacgtccctctccagtcttatcttgatgctgtgggaatgcagattgtcagaaagatgaaaactggagatggattcttcaagatatgggcacaagcagtggaggacatcgtatcttatgtggccaccaacttccccgcccctgtcaacaagctccaggccgacaagtcaactcggaccacactggagaaggtcaagcaagccgcctcctcttctgcccctagcaagagggagggaccatcctcaaacatgaaccttgactcccaggaatcatcaggtcctccaggattagactgggctgccagcaatgatgaggatgatggatctattgaggcagagattgctcatcagatagccgagagcttttctaagaagtataagttcccttctcgatcatccgggatattcctttggaattttgagcaactgaaaatgaatcttgatgatatagtgagagaggtcaaaggaatccctggggtgacaagaatggctcgggatggcatgaagttgcccctccggtgcatgctggggagtgtggcatccaatcattccaaaaggttccaaattctagtcaattcggcgaaactgggcaaactcatgcaggatgatctaaacagatatcttgcgtattga

SEQ ID NO: 11781 - DNA, 135 bp, unidentified; identical to SEQ ID NO: 2693
  misc_feature 1..135: note = Synthetic
  source 1..135: mol_type = other DNA

SEQ ID NO: 11782 - DNA, 90 bp, unidentified; identical to SEQ ID NO: 2694
  source 1..90: mol_type = other DNA
  misc_feature 1..90: note = Synthetic

SEQ ID NO: 11783 - DNA, 216 bp, unidentified
  misc_feature 1..216: note = Synthetic
  source 1..216: mol_type = other DNA
atctacgcaatcgcgataatggagggatctaaacgcaaacacgacagtcggcgactacaacaagaacaggagcagcttcgtccacgtacaccgccatcatatgaagaaattgcaaaatatggacactcatttaacgtgaaaagatttacgaatgaagaaatgtgtcttaagaatgattatccacgaattatatcatataatcctccaccaaaatag

SEQ ID NO: 11784 - DNA, 21 bp, unidentified
  misc_feature 1..21: note = Synthetic
  source 1..21: mol_type = other DNA
atggacactcatttaacgtga

SEQ ID NO: 11785 - DNA, 477 bp, unidentified
  source 1..477: mol_type = other DNA
  misc_feature 1..477: note = Synthetic
atggcgcgctttgaggatccaacacggcgaccctacaagctacctgatctgtgcacggaactgaacacttcactgcaagacatagaaataacctgtgtatattgcaagacagtattggaacttacagaggtatttgaatttgcatttaaagatttatttgtggtgtatagagacagtataccccatgctgcatgccataaatgtatagatttttattctagaattagagaattaagacattattcagactctgtgtatggagacacattggaaaaactaactaacactgggttatacaatttattaataaggtgcctgcggtgccagaaaccgttgaatccagcagaaaaacttagacaccttaatgaaaaacgacgatttcacaacatagctgggcactatagaggccagtgccattcgtgctgcaaccgagcacgacaggaacgactccaacgacgcagagaaacacaagtataa

SEQ ID NO: 11786 - DNA, 51 bp, unidentified; identical to SEQ ID NO: 2699
  misc_feature 1..51: note = Synthetic
  source 1..51: mol_type = other DNA

SEQ ID NO: 11787 - DNA, 162 bp, unidentified
  source 1..162: mol_type = other DNA
  misc_feature 1..162: note = Synthetic
aaggtattacaagaatataaaaaaatgattgaagaaggagatattcattggcaaattatttcttctgaattcgaggaagatgtaaagaaggagttgattaagaatatagttatagaggctatacacacggttactggaccagtggggcaactgtggatgtaa

SEQ ID NO: 11788 - DNA, 249 bp, unidentified
  source 1..249: mol_type = other DNA
  misc_feature 1..249: note = Synthetic
atggttgatttatttttcaatgatactgcttggtacataggacagattttagttttagttttattttgtcttatttctttaatctttgttgttgcttttttagcaactattaagctttgtatgcaactttgtggtttttgtaatttctttattatttcaccttcggcttacgtttataaaagaggtatgcagttgtataagtcttatagtgaacaagttataccacccacttcagattatttaatctaa

SEQ ID NO: 11789 - DNA, 18 bp, unidentified
  misc_feature 1..18: note = Synthetic
  source 1..18: mol_type = other DNA
atgggtacaagcaattaa

SEQ ID NO: 11790 - DNA, 45 bp, unidentified; identical to SEQ ID NO: 2708
  misc_feature 1..45: note = Synthetic
  source 1..45: mol_type = other DNA

SEQ ID NO: 11791 - DNA, 2613 bp, unidentified
  source 1..2613: mol_type = other DNA
  misc_feature 1..2613: note = Synthetic
atggatctgcaaagacatccgattccgtttgcgtggctagatcgagacaaagttgagcgtcttacagattttctcagcaatttggaaagactggataatgtagatttgcgagagcatccccatgtgactaattcttgtgtcgtgagagagggagacgatgtagacgatttaaaaacattgtataacctactagtgttatggcttatgtatcactacgtcttatctaaaaggaagccggattataatgctatatggcaagacatcacgaaactccaaagtgtcgtaaacgagtacttaaactccaaaggtctgaataaaggaatttttgaaaatatgttcacgaacaaagaaaagtttgaatcgcaattcagtgatattaatcgcgctttactgcgtttaggaaactttattaagtggggtagcaatgttgcgatcgatactccttatgtaaatcttactgcagaagacagcagcgagatagaaaataatttgcaagatgctgaaaaaaacatgctgtggtataccgtctataacataaatgacccctgggacgaaaacggttacttaataacgagtattaataaattaatttatctcggtaagttatttttagcgttaactcagtcctggtcaaagctagaaaaggttgctatgagtcaaattgtaatcacgcaaaatcatctctcgggtcatttgaggaggcacgacaattttaatattgtatattctcatagggttttgcagactcctctgactggtcaaagagtagagagttttctgaaaataatcaccagtgattatgatattatcaaaagtagtctggaatcacacagcgcgtcgaaagcattttcgatgtctgagattgggcctaattctttaatggatttcgtccctttacgcggcgatatacattcaaatttgactttacctagtatgtctatagatacaaagaaatcatctttagatccggctcgtctgaaaaaaagtaattccagaagtttggatagtttcttaagaatgcagagacaacctaaatttctagagttggatagcgttgataatgccggggaaaaaattttactaaaggaagcaacactcgggggtgaaaacgttaaagcgacaacgcctgcttcctctgtctctttaatgtccggagttgagtcgccgtcgtctttcacttctaccaatctggatctgccgttgtcgtctttcacttctactaatctggatctgcgagataagtcgcacggtaattataaaattggcccttcggggattttagattttaatgttaaatttccacctaatgcgcaattgaatacgaacggtgtggatttactacaggataaaacttcgatcgggagtcccagtagcggtattaccgatgtggtaaatggtttcgctaatctcaatctgcatcagaataaatcaaatgtttcgccaccgtggagcagaaacacagcggcgaatgcggactttttagatccggtgcatcgctttgttcctgagcagacagggacacccttcgtgttgaataattccgacgtggcgggatcagaagcgaagcatacgacttacagtacggagaccggcgtttcaccccgtaacgtttttctcattaaagatttgagaggcaaagacggttttaggaaacagaagcagtcagatattccgaaaagcttaactaaggaaagaaatgataaagctataatgcactcacgcgaggtgaccggagattctggcgatgcgactgaaactgtgggtgctcggaattccccggcgttgagaaaaattaagcaagcaaatgatttttttgccgggttaaataagaaaaatgatcgtgacgtattaagaggggggaaaggaaatagcaaggacttgcattctggcggcaatgcaaaaaaaaaagaaatgtcgggaaagtttaatgacgataaagaaatgacgcgaaacggacaagagccatcacgtagtttaatgggagatgctagaaatgccggagatgaacaatatattcaagcgggtctcgggcagcgagttaacaatcttctaagtcaatttacaaatctgattagtttaggcgagaagggcatcgaagacattttgcagaatcagcgcgggaccgagttaaagttggctacagaaaacaagtcgggacgcgaatcggaggaagctaacgtagaaaaaattcttgaagttagtaatcctcaagatatgtttaaaaattttaggttgcaaaacgatctcgattccgttcagtctccgtttaggctaccggatgctgatttgtctcgcgagttagattccgcgtcatttaaggacgcgttagacttgaagcttccgggtaacggagaacgagaaatagatctcgctcttgaaaaagtgaaggtaggcgagacggaaacctcagatttaaaagtcggtcaggatgaaagttttgttcctgcgcaattaatgaaggttgagacacctgaagaaaaagatgatataattgaacagatggttctgaggatacgtcaagacggggaaactgatgaaaacaccgtctctgggccgggagtcgctgagtctttggatatagaagccaaaggcgagtcagcgatcgcgtcgtga

SEQ ID NO: 11792 - DNA, 24 bp, unidentified
  source 1..24: mol_type = other DNA
  misc_feature 1..24: note = Synthetic
atccgattccgtttgcgtggctag

SEQ ID NO: 11793 - DNA, 2577 bp, unidentified
  source 1..2577: mol_type = other DNA
  misc_feature 1..2577: note = Synthetic
atggatttgaaagcgcagtcgatcccgtttgcgtggctagatcgagacaaagttcagcgtcttacaaattttcttagcaatttggaaaatctggagaatgtagatttacgagaacatccctatgtgactaattcttgtgtcgtgagagagggagaagatgtagacgagttaaaaacactgtataacacatttattttatggcttatgtatcactacgtgttatctaaacggaagccggattataatgctatatggcaagacatcacgaaactccagaatgtcgtaaacgagtacttaaaatccaaaggtctgaataaaggaaattttgaaaatatgttcacgaacaaagaaaagtttgaatcgcaattcagtgatattcatcgcgctttactgcgtttaggaaattctattaggtggggtagcaatgttccgatcgatactccttatgtaaatcttactgcagaagacagcagcgagatagaaaataatttgcaagacgctgaaaaaaacatgctctggtacaccgtctataacataaatgacccctgggacgaaaacggttacttagtgacgagtattaataaattagtttatcttggtaagttatttgtaacgttaaaccagtcctggtcaaagctagaaaaggttgctatgtctcaaattgtaaccacgcaaaatcatctctcgggtcatttgaggaagaacgagaattttaatgctgtgtattctcagagggttttgcagacccctctaactggtcagagagtagagagttttttgaaaataatcaccagtgattatgagattatcaaaagtagtctggaatcatacagcgcgtcgaaagcattttcggtgcctgagaatgggcctcactctttaatggatttcgcctctttagacggccgcatgccttcagatttgagtttacctagtatatctatagatacaaagagaccatctgcggatttggctcgtctgaaaataagtcaacccaaaagtttggacgcgcccttaaaaacgcagaggcgacataaatttccagagtcggatagcgtcgataatgccgggggaaaaattttgataaagaaagaaacactcgggggtagagacgttagagcgacaacgcctgtttcgtctgtctctttaatgtccggagttgagccgttgtcgtctttgacttctaccaatctggatctgcgagataagtcgcacggtaattatcgaattggcccttcggggattttagattttggtgttaaacttccagctgaggcgcaatctaatacgggagacgtggatttactacaggataaaacttcgatcagaagtcccagtagcggtattactgatgtggtaaatggtctcgctaatctcaatctgcgtcagaataaatcggatgtttcacggccgtggagtaaaaacacagcggcgaatgcagatgttttcgatccggtgcatcgtttggtttctgagcagacagggacacccttcgtgttgaataattccgatgtggctggatcagaggcgaaacttacgacgcacagtactgagaccggagtgtcgccccataacgtttctctcattaaagatttgagggacaaagacggttttaggaaacagaagaagttagatctgcttggaagctggactaaggaaaaaaatgataaggctatagtacactcacgcgaagtgaccggagactctggcgatgcgactgaaactgtgactgctcgggattccccagtgttgagaaaaactaagcacgcgaatgatatttttgccgggttaaataagaaatatgctcgtgacgtatcaagaggggggaaaggaaatagcagggacttgtattctggcggcaatgcagaaaaaaaggaaacctcaggaaagtttaatgtcgataaagaaatgacgcaaaacgagcaagagccattacctaatttaatggaagctgctagaaatgccggagaggaacagtatgttcaagcgggtcttgggcagcgagttaacaagattctagccgaatttacaaatctgattagtttaggcgagaagggcattcaagacattttgcacaatcagtctgggaccgagcttaagttgcctacagaaaacaagttgggacgcgaatcggaggaagctaacgtagaaagaattcttgaagttagtgatcctcaaaatctgtttaaaaattttaagttgcaaaacgatctcgattctgtgcagtctccgtttaggctgccaaatgctgatctgtctcgcgatttagattctgtgtcatttaaggatgcgctggacgtgaagctcccgggtaacggagaacgggaaatagatctcgctcttcaaaaagtgaaggcaggtgagagagaaacctcagatttcaaagtcggtcaggatgaaactcttattcccacgcaattaatgaaggttgagacacctgaagaaaaagacgatgtaattgaaaagatggttctgaggatacgtcaagacggggaaactgatgaagaaaccgtccctgggccgggagtcgctgagtccttgggtatagctgccaaagacaagtcagtgatcgcgtcgtga

SEQ ID NO: 11794 - DNA, 24 bp, unidentified
  source 1..24: mol_type = other DNA
  misc_feature 1..24: note = Synthetic
atgtcaaacgtcagcaagagttga

SEQ ID NO: 11795 - DNA, 93 bp, unidentified; identical to SEQ ID NO: 2715
  source 1..93: mol_type = other DNA
  misc_feature 1..93: note = Synthetic

SEQ ID NO: 11796 - DNA, 27 bp, unidentified
  source 1..27: mol_type = other DNA
  misc_feature 1..27: note = Synthetic
atgtcaacgacacaatttctgatgtaa

SEQ ID NO: 11797 - DNA, 27 bp, unidentified
  misc_feature 1..27: note = Synthetic
  source 1..27: mol_type = other DNA
atgtcaatgacacaatttctgatgtaa

SEQ ID NO: 11798 - DNA, 27 bp, unidentified
  source 1..27: mol_type = other DNA
  misc_feature 1..27: note = Synthetic
atgtcaatgacacaatttctgatgtaa

SEQ ID NO: 11799 - DNA, 114 bp, unidentified; identical to SEQ ID NO: 2718
  source 1..114: mol_type = other DNA
  misc_feature 1..114: note = Synthetic

SEQ ID NO: 11800 - DNA, 1071 bp, unidentified
  source 1..1071: mol_type = other DNA
  misc_feature 1..1071: note = Synthetic
aggacacaagcaatggagccggacatcaagagtatttcaagtgagtcaatggaaggagtatctgatttcagccctagttcttgggagcatggtgggtatcttgataaggttgaaccagaaattgatgaaaatggcagtatgattccaaaatacaagatctataccccaggagctaacgagaggaaatacaacaactacatgtaccttatatgttacggctttgttgaagatgttgagagaaccccagagacagggaaacgcaagaagatcaggacaattgctgcctaccctctgggtgttggtaagagtgcctctcatccccaagatcttctggaggaactctgttccctcaaagttactgtgagaagaacagctggatcaactgagaaaattgtgtttggatcatctggccctctaaatcacctcgttccgtggaagaaagtactgactagtggttcaatttttaatgcagtcaaggtttgtcggaacgttgatcagatacagcttgacaagcatcaagctctgagaatattttttctcagtatcacaaagctcaatgattctggaatctacatgattccacgaaccatgcttgagttcaggagaaacaatgccattgccttcaatcttctagtgtacttgaagattgatgctgatttatccaaaatggggatccagggaagcctcgataaagatggcttcaaggttgcctccttcatgctacacttggggaactttgtccgtcgtgcagggaagtattactctgttgattattgtaggaggaagattgataggatgaaattgcagttttcactgggttccataggcggactaagtctccacattaagatcaatggtgtaatcagcaaacggctgtttgctcaaatgggattccaaaaaaacctttgtttctctttgatggacatcaatccttggctcaacagattgacctggaacaacagttgtgagatcagccgagtagcagctgtgttgcagccttctattccaagagagttcatgatctatgatgatgtcttcattgacaatacagggagaattctaaagggctaa

SEQ ID NO: 11801 - DNA, 15 bp, unidentified
  misc_feature 1..15: note = Synthetic
  source 1..15: mol_type = other DNA
atgcaatcgcgataa

SEQ ID NO: 11802 - DNA, 198 bp, unidentified
  misc_feature 1..198: note = Synthetic
  source 1..198: mol_type = other DNA
atggagggatctaaacgcaaacacgaaagtcggagaccacaacaagaacaggaacagcaccgtccacgtacaccgccatcctatgaagaaattgcaaaatatggacactcatttaacgtgaaaagatttacgaatgaagaaatgtgtcttaagaatgattatccacgaattatatcatataatcctccaccaaaatag

SEQ ID NO: 11803 - DNA, 21 bp, unidentified
  source 1..21: mol_type = other DNA
  misc_feature 1..21: note = Synthetic
atggacactcatttaacgtga

SEQ ID NO: 11804 - DNA, 33 bp, unidentified; identical to SEQ ID NO: 2723
  misc_feature 1..33: note = Synthetic
  source 1..33: mol_type = other DNA

SEQ ID NO: 11805 - DNA, 864 bp, unidentified
  source 1..864: mol_type = other DNA
  misc_feature 1..864: note = Synthetic
atggatgaaattgtaaaaaatatccgggaggggacgcatgtccttcttccattttatgaaacattgccagaacttaatctgtctctaggtaaaagcccattacctagtttggaatacggagctaattactttcttcagatttctagagttaatgatctaaatagaatgccaaccgacatgttaaaactttttacacatgatatcatgttaccagaaagcgatctagataaagtctatgaaattttaaagattaatagcgtaaagtattatgggagaagtactaaagcggacgcagtagttgccgatcttagcgcacgcaataaactgtttaaacgcgaacgagatgctattaaatctaataatcatcttactgaaaacaatctatacattagcgattataagatgttaacctttgacgtgtttcgaccattatttgattttgtaaacgaaaaatattgtattattaaacttcctactctattcggtagaggtgtaatcgataccatgagaatatattgtagtctctttaaaaatgttagattgctgaaatgtgtaagcgatagctggttaaaagatagcgccattatggtggctagtaatgtttgtaaaaaaaatttggatttatttatgtctcatgttaagtccgttactaagtcttcttcttggaaggatgtgaacagtgttcaatttagtattctaaacgatccagtggatacggaattcattaataagttcttagagttttcgaatagagtatacgaagctctctattacgttcactcgttgctttattctagtatgacttctgattcgaaaagtatcgaaaacaaacatcagagaagactagttaaactactgttatga

SEQ ID NO: 11806 - DNA, 45 bp, unidentified
  source 1..45: mol_type = other DNA
  misc_feature 1..45: note = Synthetic
acggagctaattactttcttcagatttctagagttaatgatctaa

SEQ ID NO: 11807 - DNA, 15 bp, unidentified
  source 1..15: mol_type = other DNA
  misc_feature 1..15: note = Synthetic
attttgttgttttaa

SEQ ID NO: 11808 - DNA, 42 bp, unidentified; identical to SEQ ID NO: 2728
  misc_feature 1..42: note = Synthetic
  source 1..42: mol_type = other DNA

SEQ ID NO: 11809 - DNA, 354 bp, unidentified
  source 1..354: mol_type = other DNA
  misc_feature 1..354: note = Synthetic
atgaaggtttgcctgattatgaaagtggagggggcgctatgggagcttttccacatgtgcggagtggacttacaccaacaatttgtagaaataatccaaggctggaaaaatgagaattacctggggatggtgcaggaatgtaacatgatgattgatgaaatcgatggagggccggcctttaatgtgattcttatgctggatgtacgcgtagagccactgcttgaagccacagttgatcaccttgaaaatagagtgggttttgacctggctgtatgttttcaccaacacagcggcggtgaacgctgtcacctgcgtgacttgcactttatcgtccttcgagaccgtttggaataa

SEQ ID NO: 11810 - DNA, 39 bp, unidentified; identical to SEQ ID NO: 2739
  source 1..39: mol_type = other DNA
  misc_feature 1..39: note = Synthetic

SEQ ID NO: 11811 - DNA, 39 bp, unidentified; identical to SEQ ID NO: 2739
  source 1..39: mol_type = other DNA
  misc_feature 1..39: note = Synthetic

SEQ ID NO: 11812 - DNA, 42 bp, unidentified; identical to SEQ ID NO: 2740
  misc_feature 1..42: note = Synthetic
  source 1..42: mol_type = other DNA

SEQ ID NO: 11813 - DNA, 54 bp, unidentified
  misc_feature 1..54: note = Synthetic
  source 1..54: mol_type = other DNA
atggataaattactcaaagaaaaaagaatgcaacctgtgcaaaacaaaatataa

SEQ ID NO: 11814 - DNA, 18 bp, unidentified
  source 1..18: mol_type = other DNA
  misc_feature 1..18: note = Synthetic
atgggagataataactaa

SEQ ID NO: 11815 - DNA, 33 bp, unidentified; identical to SEQ ID NO: 2723
  source 1..33: mol_type = other DNA
  misc_feature 1..33: note = Synthetic

SEQ ID NO: 11816 - DNA, 864 bp, unidentified
  source 1..864: mol_type = other DNA
  misc_feature 1..864: note = Synthetic
atggatgaaattgtaaaaaatatccgggagggaacgcatgtccttcttccattttatgaaacattgccagaacttaatctgtctctaggtaaaagcccattacctagtctggaatacggagctaattactttcttcagatttctagagttaatgatctaaatagaatgccgaccgacatgttaaaactttttacacatgatatcatgttaccagaaagcgatctagataaagtctatgaaattttaaagattaatagcgtaaagtattatgggaggagtactaaagcggacgccgtagttgccgacctcagcgcacgcaataaactgttcaaacgtgaacgagatgctattaaatctaataatcatctcactgaaaacaatctatacattagcgattataagatgttaaccttcgacgtgtttcgaccattatttgattttgtaaacgaaaaatattgtattattaaacttccaactttattcggtagaggtgtaatcgatactatgagaatatattgtagtctctttaaaaatgttagactgctaaaatgcgtaagcgatagctggttaaaagatagcgccattatggtggctagtgatgtttgtaaaaaaaatttggatttatttatgtctcatgttaagtccgtcactaagtcttcttcttggaaggatgtgaacagtgttcaatttagtattttaaacaatccagtggatacggaattcattaataagttcttagagttttcgaatagagtatacgaagctctctattacgttcactcgttgctttattctagtatgacttctgattcaaaaagtatcgaaaacaaacatcagagaagactagttaaactactgctgtga

SEQ ID NO: 11817 - DNA, 45 bp, unidentified; identical to SEQ ID NO: 11806
  source 1..45: mol_type = other DNA
  misc_feature 1..45: note = Synthetic

SEQ ID NO: 11818 - DNA, 18 bp, unidentified
  misc_feature 1..18: note = Synthetic
  source 1..18: mol_type = other DNA
atgggagataataactaa

SEQ ID NO: 11819 - DNA, 33 bp, unidentified; identical to SEQ ID NO: 2723
  misc_feature 1..33: note = Synthetic
  source 1..33: mol_type = other DNA

SEQ ID NO: 11820 - DNA, 51 bp, unidentified; identical to SEQ ID NO: 2735
  misc_feature 1..51: note = Synthetic
  source 1..51: mol_type = other DNA

SEQ ID NO: 11821 - DNA, 18 bp, unidentified
  source 1..18: mol_type = other DNA
  misc_feature 1..18: note = Synthetic
atgggagataataactaa

SEQ ID NO: 11822 - DNA, 33 bp, unidentified; identical to SEQ ID NO: 2723
  source 1..33: mol_type = other DNA
  misc_feature 1..33: note = Synthetic

SEQ ID NO: 11823 - DNA, 864 bp, unidentified
  misc_feature 1..864: note = Synthetic
  source 1..864: mol_type = other DNA
atggatgaaattgtaaaaaatatccgggaggggacgcatgtccttcttccattttatgaaacattgccagaacttaacttgtctttaggtaaaagcccattacctagtctggaatacggagctaattactttcttcagatttctagagttaatgatctaaatagaatgccaacagacatgttaaaactttttacacacgatatcatgttaccagaaagcgatctagataaagtctatgaaattttaaagattaatagcgtaaagtattatggtaggagtactaaagcagatgctgtagttgccgatctcagtgcacgcaataaactgttcaaacgtgaacgagatgctattaaatctaataatcatctcactgaaaacaatctatacattagcgattataagatgttaaccttcgacgtgtttcgaccattatttgattttgtaaacgaaaaatattgtattattaaacttcctactctattcggtagaggtgtaatcgataccatgagaatatattgtagtctctttaaaaatgttagactgctgaaatgcgtaagcgatagctggttgaaagatagcgccattatggtggctagtgatgtttgtaaaaaaaatttggatttatttatgtctcatgttaagtccgtcactaagtcgtcttcttggaaggatgtgaacagtgttcaatttagtattttaaacgatccagtggatacggaattcattaataagttcttagagttttcgaatagagtatacgaagctctctattacgttcactcgttactttattctagtatgacttctgattcaaaaagtatcgaaaacaaacatcagagaagactagttaaactactgctgtga

SEQ ID NO: 11824 - DNA, 45 bp, unidentified; identical to SEQ ID NO: 11806
  misc_feature 1..45: note = Synthetic
  source 1..45: mol_type = other DNA

SEQ ID NO: 11825 - DNA, 165 bp, unidentified
  source 1..165: mol_type = other DNA
  misc_feature 1..165: note = Synthetic
atttctacaatagcgaacatatatgggctttttattatttgtacgatgtccaggataacatttttacggataaataaatatgaaggtggagagcgtgacgttcctgacattgttgggaataggatgcgttctatcatgctgtactattccgtcacgacccattaa

SEQ ID NO: 11826 - DNA, 1632 bp, unidentified
  misc_feature 1..1632: note = Synthetic
  source 1..1632: mol_type = other DNA
atgaacagaattaaggttatgataattagttctttattattatcagatattacgattgcacaaataggttgggataatttgacttcgattggagttataagtactaagcaatacgactataaaataactactctgaacactgaccagttaatggttataaagatggttcctaatatatcatcaatcattaattgcactaaactcgaattaacaaaatatagagagttagtctcagggatcattagaccaataaatgagtcattagaattaatgaattcatacattaacatgagagcaggttcagagagatttataggggctgtaatagctggtgtagccttaggagtggcaactgcagcacaaataacatcagggattgccctacataattcaattatgaacaaaaaacaaatacaagaattgaggaaggctcttagtactaccaacaaagcaattgatgaaataaggattgcaggtgaaagaacattaatagcaattcaaggtgtacaggattatattaataatataattatccctatgcaggacaaactccaatgtgatattttatcatcacaactttctgttgctttactcagatattatacaaatatactaacagtttttgggccaagtatacgggatcctattactagtacaatttcagtacaagcactcagtcaagcattcaatggtaatcttcaggcattgcttgatggactggggtatactgggagagacttacgtgatcttctagagagtaaatctatcactggccagataattcatgcagatatgactgatttgttccttgttttgagaataaattatccttccataactgagatgcagggagtaacaatatatgggctcaattcaattacatatcatattgggcctgaagagtggtataccattatgcctgattttattgctgttcagggttttttaatatctaattttgatgagagaaagtgttcagtaactaaatcaagtatattgtgccaacaaaattcaatttacccaatgtcaacagagatgcaaagatgtattaagggcgagataagattctgtccaagatccaaggcaattgggacattagttaatcggtttatattgaccaaaggtaatttaatggctaattgtttagggattatatgcagatgttatacttcaggacaagttataacacaagacccaagtaaattgattacgataatatcgcaagaggagtgcaaggaagttggtgttgatggtattcgtattatggtaggacctagaaaattaccagatattacctttaatgctaggttggaaattggtgtaccaatatcattgagcaaattggatgtcgggactgatttagcgattgcttcagctaaacttaataattctaaggcattgttagagcaatcagataagattttagattcaatgtctaaattggattctatgaattcaagaataataggattaatcttagcaattatgataatctttataatcattattactattatctggatcatatataaaaaatgtaggaataaagataataaattcagtacttcaattgaaccgctctacatacccccttcttataactcacctcatagtgtggttaagtctatttga

SEQ ID NO: 11827 - DNA, 18 bp, unidentified
  misc_feature 1..18: note = Synthetic
  source 1..18: mol_type = other DNA
atggggaaaaagacgtag

SEQ ID NO: 11828 - DNA, 189 bp, unidentified
  misc_feature 1..189: note = Synthetic
  source 1..189: mol_type = other DNA
ctgagccggctccgccgtcggaaacccgacgagacaacaatgacacgtcttacttcagcagcacctctttccattcttccgtgtcccctgccacctcagtggaccgtcaatttcgacggaccacgtacgaccgttgggacggtcgacgttggctgcgtacccgctacgggaacgccagcgcctgcgtga

SEQ ID NO: 11829 - DNA, 27 bp, unidentified
  misc_feature 1..27: note = Synthetic
  source 1..27: mol_type = other DNA
ctgctcactctgaccctgaattcataa

SEQ ID NO: 11830 - DNA, 54 bp, unidentified; identical to SEQ ID NO: 2754
  source 1..54: mol_type = other DNA
  misc_feature 1..54: note = Synthetic

SEQ ID NO: 11831 - DNA, 36 bp, unidentified
  source 1..36: mol_type = other DNA
  misc_feature 1..36: note = Synthetic
atcaaaatagtgaaacgactgactatccctccttag

SEQ ID NO: 11832 - DNA, 21 bp, unidentified
  misc_feature 1..21: note = Synthetic
  source 1..21: mol_type = other DNA
ataggtgtagttttgcagtga

SEQ ID NO: 11833 - DNA, 660 bp, unidentified
  misc_feature 1..660: note = Synthetic
  source 1..660: mol_type = other DNA
atgtctaatatgacgcaactcactgaggcgcagattattgccattattaaagactggaactttgcatggtccctgatctttctcttaattactatcgtactacagtatggatacccatcccgtagtatgactgtctatgtctttaaaatgtttgttttatggctcctatggccatcttccatggcgctatcaatatttagcgccgtttatccaattgatctagcttcccagataatctctggcattgtagcagctgtttcagctatgatgtggatttcctactttgtgcagagtatccggctgtttatgagaactggatcatggtggtcattcaatcctgagactaattgccttttgaacgttccatttggtggtacaactgtcgtacgtccactcgtagaggactctaccagtgtaactgctgttgtaaccaatggccacctcaaaatggctggcatgcatttcggtgcttgtgactacgacagacttcctaatgaagtcaccgtggccaaacccaatgtgctgattgctttaaaaatggtgaagcggcaaagctacggaactaattccggcgttgccatttaccatagatataaggcaggtaattacaggagtccgcctattacggcggatattgaacttgcattgcttcgagcttag

SEQ ID NO: 11834 - DNA, 660 bp, unidentified; identical to SEQ ID NO: 11833
  source 1..660: mol_type = other DNA
  misc_feature 1..660: note = Synthetic

SEQ ID NO: 11835 - DNA, 387 bp, unidentified
  misc_feature 1..387: note = Synthetic
  source 1..387: mol_type = other DNA
atgataatcagatcattcgccgatagtggtaacgctatcgaaacgacatcgccagaaattacaaacgctacaacagatattccagctatcagattatgcggtccagagggagatggatattgtttacacggtgactgtatccacgctagagatattgacggtatgtattgtagatgctctcatggttatacaggcattagatgtcagcatgtagtattagtagactatcaacgttcagaaaacccaaacactacaacgtcatatatcccatctcccggtattatgcttgtattagtaggcattattattattacgtgttgtctattatctgtttataggttcactcgacgaactaaactacctatacaagatatggttgtgccataa

SEQ ID NO: 11836 - DNA, 387 bp, unidentified; identical to SEQ ID NO: 11835
  source 1..387: mol_type = other DNA
  misc_feature 1..387: note = Synthetic

SEQ ID NO: 11837 - DNA, 690 bp, unidentified
  source 1..690: mol_type = other DNA
  misc_feature 1..690: note = Synthetic
atgagctttgaaataagtgtagaggaaattgaagagctcattgagactggcaatctcaacatagaccatgcactaaaagaattaggtgcaaccagtcaatcatcactaaacaaacctccatcccaaagtagcagaacagaaggaaatgatggtggaaccaagatttcaagaaatccggctcctgtagaggcacctgcccatacatccacagcacaacggtcacacaatgaagagaatgaatcaggaagacaaaatctagacagcctttccatgatatccaataaaccccagacaggcacgctgcttatgggatcagacacacaacttccaagtccatcaaagacttatcaaggactcattcttgatgcaaaaaagagagcactaaatgagccaagaagggatcaaaagataacaaatgaacatggcagtatgaatgacaccaggatatttaagaggggggaatatagataccaggaaagaggcttgggttacacagaatcagagatcaagaacacaacccccactccaagacatcgaagagagtactcgatttcatgggttaacggaagaaccacaatatccgagtggtgcaatccatgctgcgcaccagtcaaatcaactgcctctgtcgaaaaatgcacatgtggaagatgtcccaaaatttgcgaactatgcatcagagatccttga

SEQ ID NO: 11838 - DNA, 690 bp, unidentified; identical to SEQ ID NO: 11837
  misc_feature 1..690: note = Synthetic
  source 1..690: mol_type = other DNA

SEQ ID NO: 11839 - DNA, 45 bp, unidentified; identical to SEQ ID NO: 2765
  misc_feature 1..45: note = Synthetic
  source 1..45: mol_type = other DNA

SEQ ID NO: 11840 - DNA, 57 bp, unidentified; identical to SEQ ID NO: 2766
  misc_feature 1..57: note = Synthetic
  source 1..57: mol_type = other DNA

SEQ ID NO: 11841 - DNA, 384 bp, unidentified
  source 1..384: mol_type = other DNA
  misc_feature 1..384: note = Synthetic
atgataatcagatcattcgccgatagtggtaacgctatcgaaacgacatcgccagaaattacaaacgctacaacagatattccagctatcagattatgcggtccagagggagatggatattgtttacacggtgactgtatccacgctagagatatcgacggtatgtattgtagatgctttcatggttatattggtattagatgtcagcatatagtattagtagactatcaacgttcagaaaaaccagacactacaacatcatatatcccatctccaggtattgtgcttgtattagtaggcattattattacgtgttgtctattatctgtttataggttcactcgaagaactaaactacctctacaagatatggttgtgccataa

SEQ ID NO: 11842 - DNA, 345 bp, unidentified
  misc_feature 1..345: note = Synthetic
  source 1..345: mol_type = other DNA
acgacattgtcagaaattacaaacactacaacagatattccagctatcagattatgcggtccagagggagataggtattgttttcacggtatctgtatccacgctagagatattgacggtatgtattgtagatgctctcatggttatacaggcattagatgtcagcatgtagtattagtagactatcaacgttcagaaaaaccaaacactacaacgtcatatatcccatctcccggtattgtgcttgtattattagtaagcattattgtgtgttgtctattatttgtttataggttcactcgaagaactaataaattacctttacaagatatggttgtgccataa

SEQ ID NO: 11843 - DNA, 606 bp, unidentified
  source 1..606: mol_type = other DNA
  misc_feature 1..606: note = Synthetic
atggggaacccccagacgaccatcgcgtacagcctacatcaccccagggcgtcgctaacgagcgcgctgccggacgcggcacaggtggtgcacgtgtttgagtcagggacgcgcgcggttctgacgcggggtcgagcgcgccaggaccgcctgccccgcggaggcgtggtgatacaacacacccccatcgggctgctggtgattatcgactgtcgtgccgaattttgcgcataccgctttataggacgcgctagtacccagaggctggagcgctggtgggacgcccatatgtacgcgtacccctttgactcctgggtcagctcatcgcacggcgaaagcgtccggagtgcgacggccggcatcctgacggtggtgtggaccccggacaccatctacatcaccgcaacgatctacgggacggcccccgaggcggcgcgggggtgcgataacgcacccctggacgtccgcccgaccacaccccccgcccccgtatccccaacggcgggcgagttcccagcaaacacaacagacctactggtcgaggttctgcgggaaattcagatcagccccaccctggacgacgcagacccaacccccggaacctga

SEQ ID NO: 11844 - DNA, 1914 bp, unidentified
  misc_feature 1..1914: note = Synthetic
  source 1..1914: mol_type = other DNA
atggcgtcggcggaaatgcgcgagcggttggaggcgcctctgcccgaccgggcggtgcccatctacgtggccgggtttttggccctgtacgacagcggggacccgggcgagctggccctggacccagacacggtgcgtgcggccctgcctccggagaaccccctgccgatcaacgtagaccaccgcgctcggtgcgaggtgggccgggtgctcgccgtggtcaacgaccctcgggggccgttttttgtggggctgatcgcgtgcgtgcagctggagcgcgtcctcgagacggccgccagcgccgctatttttgagcgccgcggacccgcgctctcccgggaggagcgtctgctgtacctgatcaccaactacctgccatcggtctcgctgtccacaaaacgccggggggacgaggttccgcccgaccgcaccctgtttgcgcacgtggccctgtgcgccatcgggcggcgccttggaaccatcgtcacctacgacaccagcctagacgcggccatcgctccgtttcgccacctggacccggcgacgcgcgagggggtgcgacgcgaggccgccgaggccgagctcgcgctggccgggcgcacctgggcccccggcgtggaggcgctcacacacacgctgctctccaccgccgtcaacaacatgatgctgcgtgaccgctggagccttgtggccgagcggcggcggcaggccgggatcgccggacacacgtaccttcaggcgagcgaaaaatttaaaatatggggggcggagtctgcccctgcgccggagcgcgggtataaaaccggcgccccgggtgccatggacacatcccccgccgcgagcgttcccgcgccgcaggtcgccgtccgtgcgcgtcaagtcgcgtcgtcgtcttcttcttcttcttttccggcaccggccgatatgaaccccgtttcggcatcgggcgccccggcccctccgccgcccggcgacgggagttatttgtggatccccgcctctcattacaatcagctcgtcaccgggcaatccgcgccccgccacccgccgctgaccgcgtgcggcctgccggccgcggggacggtggcctacggacaccccggcgccggcccgtccccgcactacccgcctcctcccgcccacccgtacccgggtatgctgttcgcgggccccagtcccctggaggcccagatcgccgcgctggtgggggccatcgccgccgaccgccaggcgggtgggcttccggcggccgccggagaccacgggatccgggggtcggcgaagcgccgccgacacgaggtggagcagccggagtacgactgcggccgtgacgagccggaccgggacttcccgtattacccgggcgaggcccgccccgagccgcgcccggtcgactcccggcgcgccgcgcgccaggcttccgggccccacgaaaccatcacggcgctggtgggggcggtgacgtccctgcagcaggaactggcgcacatgcgcgcgcgtacccacgccccctacgggccgtatccgccggtggggccctaccaccacccccacgcagacacggagacccccgcccaaccaccccgctaccccgccaaggccgtctatctgccgccgccgcacatcgcccccccggggcctcctctatccggggcggtccccccaccctcgtatcccccagttgcggttacccccggtcccgctcccccgctacatcagccctcccccgcacacgcccacccccctccgccgccgccgggacccacgcctccccccgccgcgagcttaccccaacccgaggcgcccggcgcggaggccggcgccttagttaacgccagcagcgcggcccacgtgaacgtggacacggcccgggccgccgatctgtttgtgtcacagatgatggggtcccgctaa

SEQ ID NO: 11845 - DNA, 42 bp, unidentified
  source 1..42: mol_type = other DNA
  misc_feature 1..42: note = Synthetic
atcccacttatctacccaaagtcctttataataatgttgtag

SEQ ID NO: 11846 - DNA, 72 bp, unidentified; identical to SEQ ID NO: 2773
  source 1..72: mol_type = other DNA
  misc_feature 1..72: note = Synthetic

SEQ ID NO: 11847 - DNA, 213 bp, unidentified
  misc_feature 1..213: note = Synthetic
  source 1..213: mol_type = other DNA
atggccacgggtgtcatgaaacccgccacccttgacctgccttcaccacccgtgcccgctccaccaaaggcagctccggtcgtgcaggcccccccggtggcaaccgccgtgcgccgcgtccccgcccgccgccaggcccagaactggcagagcacgctgcacagtatcgtgggcctgggagtgaaaagtctgaagcgccgccgatgctattaa

SEQ ID NO: 11848 - DNA, 27 bp, unidentified
  source 1..27: mol_type = other DNA
  misc_feature 1..27: note = Synthetic
atgattatttttaacaaaataacataa

SEQ ID NO: 11849 - DNA, 27 bp, unidentified
  misc_feature 1..27: note = Synthetic
  source 1..27: mol_type = other DNA
atgattatttttaacaaaataacataa

SEQ ID NO: 11850 - DNA, 27 bp, unidentified
  source 1..27: mol_type = other DNA
  misc_feature 1..27: note = Synthetic
atgattatttttaacaaaataacataa

SEQ ID NO: 11851 - DNA, 513 bp, unidentified
  source 1..513: mol_type = other DNA
  misc_feature 1..513: note = Synthetic
atggataataatgaacctaaagtactagaaatggtatatgatgctacaattttacccgaaggtagtagcatggatccaaatatcatggattgtataaacagacacatcaatatgtgtatacaacgcacctatagttctagtataattgccattttggatagattcctaatgatgaacaaggatgaactaaataatacacagtgtcatataattaaagaatttatgacatacgaacaaatggcgattgaccattatggaggatatgtgaacgctattctatatcaaattcgtaaaagacctaatcaacatcacaccattgatctgtttaaaagaataaaaagaacccggtatgacacttttaaagtggatcccgtagaattcgtaaaaaaagttatcggatttgtatctatcttgaacaaatataaaccggtttatagttacgtcctgtacgagaacgtcctgtacgatgagttcaaatgtttcattaactacgtggaaactaagtatttctaa

SEQ ID NO: 11852 - DNA, 354 bp, unidentified
  misc_feature 1..354: note = Synthetic
  source 1..354: mol_type = other DNA
atgaaggtctgcctgattatgaaagtggagggggcactgtgggagcttttccacatgtgcggagtggacttacaccaacaatttgtagagataattcaaggctggaaaaatgagaattacctggggatggtgcaggaatgtaacctgatgattgatgaaatcgatggagggccagcctttaatgtgattcttatgctggatgtacgcgtagagccactgctcgaagccacggtcgagcaccttgaaaatagagtgggttttgacctggctgtctgtttccaccagcacagcggaggggaacgctgtcacctgcgtgacttgcactttatcgtccttcgagaccgtttggaataa

SEQ ID NO: 11853 - DNA, 24 bp, unidentified
  source 1..24: mol_type = other DNA
  misc_feature 1..24: note = Synthetic
atgaaaatgacagtaaagacatag

SEQ ID NO: 11854 - DNA, 606 bp, unidentified
  misc_feature 1..606: note = Synthetic
  source 1..606: mol_type = other DNA
ctgccacgcccattttatcatataagcctgaagcccgtgagctggcctgacgagaccatgaggccagccaagtctacagattctgtgtttgtgaggaccccggtcgaggcgtgggtcgcgccctcgccgccggacgacaaggtggctgagtccagctacctcatgttcagggccatgtacgcggtgttcacccgggatgagaaagacctgcctttgccagccctggtcctctgccggctcatcaaggcctccctgaggaaggataggaagctgtacgcggagctggcctgcaggacagccgacatcgggggcaaagacacgcacgtacggctcatcatcagcgtcctgcgcgcagtgtacaacgaccactacgactactggtcgcggctcagggtggtgctgtgctacacagtggtgtttgcggtgcgaaactacctggatgaccacaagagcgccgccttcgtgctgggggcaatcgcccactacctggccctctatcgcagactctggtttgcgaggctgggcggcatgccaagatcgctgagacgtcagttccccgtgacgtgggccctggccagcctgactgacttcctgaaatctttgtaa

SEQ ID NO: 11855 - DNA, 606 bp, unidentified; identical to SEQ ID NO: 11854
  misc_feature 1..606: note = Synthetic
  source 1..606: mol_type = other DNA

SEQ ID NO: 11856 - DNA, 24 bp, unidentified
  source 1..24: mol_type = other DNA
  misc_feature 1..24: note = Synthetic
aagataaatcgttcaatagtgtag

SEQ ID NO: 11857 - DNA, 93 bp, unidentified; identical to SEQ ID NO: 2793
  misc_feature 1..93: note = Synthetic
  source 1..93: mol_type = other DNA

SEQ ID NO: 11858 - DNA, 36 bp, unidentified; identical to SEQ ID NO: 2794
  misc_feature 1..36: note = Synthetic
  source 1..36: mol_type = other DNA

SEQ ID NO: 11859 - DNA, 246 bp, unidentified
  source 1..246: mol_type = other DNA
  misc_feature 1..246: note = Synthetic
attgtattcaacccacagacacatcctctgaccattcaacgggacacaatagtgggcgtggcaatggcttgctatatccaccccggtaaggcagccagccaggcaccatacagcttctacgactgcaaggaagagagctggcacgtggggctcttccagatcaaacgcggaccgggaggggtctgtacaccaccttgccacgtagcgattagggccgaccgccacgaggaacccatgcaatcgtga

SEQ ID NO: 11860 - DNA, 75 bp, unidentified
  misc_feature 1..75: note = Synthetic
  source 1..75: mol_type = other DNA
atgaatataactattgccctaccagcgcagacaagaattcacatgggactcaaacaggaatccctgttgagttga

SEQ ID NO: 11861 - DNA, 558 bp, unidentified
  misc_feature 1..558: note = Synthetic
  source 1..558: mol_type = other DNA
atgggtggcaagagctcaaaacagcaggaggaaaaatatttaaagtactacaaggctatgcgcaggggctatggagcagagggcaccaatggggactatcaacagctgcatgcttcagagccattgctaggggcattatcaacatcccaagaagaattcgacagggagcagaagtcctcctcaactgacgaagaggaagaaacgggctttccagtatatccacagtgcccagtaagagaacccacctacaaggacttggttgatatgccccactttttaaaagaaaaggggggactggaagggatttggcattctaaaagaagagaagagatcttggacttatatgctcaaaatgaatggggattcattcctacctggcaatcttatactgatggcccagggataagatacccgaagacatttaggttcttattcaagctttgcccggtggcagtgcctccagaccaggagaacaatgagtgtaacaaattgctccagtcctctcagctgggaatccaggaagaatccttggggagagaggctagtgtggaagtttga

SEQ ID NO: 11862 - DNA, 168 bp, unidentified
  source 1..168: mol_type = other DNA
  misc_feature 1..168: note = Synthetic
attttgttgttttatacatttgccattagttattgcagagcatttatttactcaattatggaaaccatagatccagtgtatatatctcagttcagttataaagaattatatattcgtagctcgtataaagatatcaatgaagtcatgagtcaaatggtaaaattataa

SEQ ID NO: 11863 - DNA, 213 bp, unidentified
  misc_feature 1..213: note = Synthetic
  source 1..213: mol_type = other DNA
ttggaacagctcatagaaaatattaactttaacaactctagtataatttcgttgttctatacatttgccattagttattgcagagcattcatttactcaatcatggaaaccatagatcaaatgtatatatctcagttcagttataaagaattgtacattagtagctcgtataaagatattaatgaatccatgagtcagatggtaaaattataa

SEQ ID NO: 11864 - DNA, 213 bp, unidentified
  source 1..213: mol_type = other DNA
  misc_feature 1..213: note = Synthetic
ttggaacagctcatagaaaatattaactttaacaactctagtataatttcgttgttctatacatttgccattagttattgccgagcattcatttactcaattatggaaaccatagatccggtgtatatatctcagttcagttataaagaattatacgttagtagctcttataaagatattaatgaatccatgagtcagatggtaaaattataa

SEQ ID NO: 11865 - DNA, 120 bp, unidentified; identical to SEQ ID NO: 2809
  misc_feature 1..120: note = Synthetic
  source 1..120: mol_type = other DNA

SEQ ID NO: 11866 - DNA, 63 bp, unidentified; identical to SEQ ID NO: 2811
  source 1..63: mol_type = other DNA
  misc_feature 1..63: note = Synthetic

SEQ ID NO: 11867 - DNA, 435 bp, unidentified
  source 1..435: mol_type = other DNA
  misc_feature 1..435: note = Synthetic
ttgacgctactcccgactttgaatatttgctcatggcagacggagaatggttccctacggaccttctttgtgtggacttggacgatgacgtcttctggccttcggacacgagcactcaacctcaaacaatggaatggactgatgtaccgctcgtatgcgatactgtcatggaaccccagggaaatgcctcgtcatctgataagagtaactcccagtcctcaggaaatgagggggttatcattaataacttctattccaatcaataccagaactcaattgatttgtctgccagtggtggcaacgctggcgatgctccccagaacaatggacaactgtccagcattctgggtggagctgcaaatgcttttgctactatggcacctctcctcatggaccagaacacagaggagatggaaaacctctctgacagagtag

SEQ ID NO: 11868 - DNA, 435 bp, unidentified; identical to SEQ ID NO: 11867
  source 1..435: mol_type = other DNA
  misc_feature 1..435: note = Synthetic

SEQ ID NO: 11869 - DNA, 6912 bp, unidentified
  source 1..6912: mol_type = other DNA
  misc_feature 1..6912: note = Synthetic
atggcttgcaaacacggatacccagacgtgtgccctatttgcacagccgttgacgctactcccgactttgaatatttgctcatggcagacggagaatggttccctacggaccttctttgtgtggacttggacgatgacgtcttctggccttcggacacgagcactcaacctcaaacaatggaatggactgatgtaccgctcgtatgcgatactgtcatggaaccccagggaaatgcctcgtcatctgataagagtaactcccagtcctcaggaaatgagggggttatcattaataacttctattccaatcaataccagaactcaattgatttgtctgccagtggtggcaacgctggcgatgctccccagaacaatggacaactgtccagcattctgggtggagctgcaaatgcttttgctactatggcacctctcctcatggaccagaacacagaggagatggaaaacctctctgacagagtagcttctgacaaagcagggaattcggccacaaacacacagtctactgttggccggctctgtggctatggaaagtcccaccacggagaacacccaacctcttgtgccgatgccgcgactgacaaggtcctcgcggctgaacgttactacactatcgatctggctagttggaccacttcccaagaagctttctctcacatcaggattcctctccctcacgtccttgctggcgaggacggaggggtttttggagctaccttaaggagacactacctctgcaagactggatggcgcgtacaagtccaatgcaacgcctcccagtttcatgctggctcccttcttgtcttcatggctccagaattctatactggtaaaggaacaaaatcaggcactatggagccttcagacccatttaccatggacaccacctggcgcagcccgcaaagtgcgcccacaggctaccgctatgacagacaagccggctttttcgccatgaaccaccagaaccaatggcaatggactgtctaccctcaccagattttgaatttgcgcacaaacaccaccgttgacttggaagttccctatgtcaatgtggcaccctccagctcttggactcaacatgcaaactggactctcgttgttgctgtgctcagccctcttcagtacgccaccggttcttcaccggacgttcaagtcacagcctccctgcaacctgttaatcccgtgtttaatggtttgagacacgaaactgtgcttgcgcaaagtcctattccagtcacggtgcgtgagcaccagggctgtttctactccactaaccctgacaccactgttcccatctatggaaaaaccatttccaccccgagtgactacatgtgtggtgagttttctgatcttcttgaattgtgcaagctccccacattccttggcaaccccagcaccgacaacaagcgttacccttatttctctgccaccaactccgtgccagccacttccctggttgactaccaagttgctctctcatgctcttgtacggccaactcaatgcttgctgctgttgctcgtaactttaatcagtaccgtggttcactgaattttcttttcgttttcactggtgctgcaatggttaagggcaagtttctcatagcctacaccccgcctggtgcgggaaagcccaccacccgggaccaagctatgcaggctacctacgccatttgggacttgggcttgaattccagcttcaacttcactgccccttttatatctccaactcattaccgtcagactagctatactagccccaccatcacatctgttgacggttgggtcactgtttggcagctgacccccctgacctacccttctggaacccccacccattctgatattctcacccttgtctccgccggcgatgacttcacgctcaggatgccaatttcacccaccaaatgggttccacagggaattgacaatgctgagaagggaaaggtctccaacgatgacgcttcggtcgatttcgttgccgagccagtcaagctacccgagaaccaaacccgggtggccttcttttacgacagagctgtccccataggaatgttgagacccggccaaaatatggaaaccacctttagctaccaagagaatgatttccgcctcaattgtcttctgttgacccctcttccttcttattgtcccgacagttcctccggtcctgtcagaacgaaggctcccgtccagtggcgatgggtgcggtctggtggcgccaatggtgccaacttcccactcatgaccaaacaggactacgccttcctctgcttttcccctttcacctactacaagtgtgaccttgaagttaccgttagtgctatgggagcaggcaccgtttcttctgttctgcgctgggcacccaccggggcgcccgcggatgtcactgaccagctgatcggctatactcctagtcttggtgaaacacgtaacccccacatgtggatcgttggctctggaaattctcaaatttcttttgtcgtaccttacaattcccctctgtccgtcttacccgctgcttggttcaatggatggtccgactttggaaacaccaaggattttggagttgctcctacgtcggattttgggcgcatttggatacagggtaacagctctgcctcagttcgaatcaggtacaagaagatgaaggtcttctgcccccgcccgaccctctttttcccctggccaacgcccaccaccaccaagatcaatgctgacaatccagtccccattcttgagcttgagaatcccgcttctctctaccgcattgatcttttcatcacctttactgatgagctcataacttttgactacaaggtccacggacgtcctgtgctcaccttccggattccaggcttcggtctgacaccggcaggcagaatgctcgtgtgcatgggcgagaagcccgcacacagtccgttcacctcgtctaaatctctataccatgttatcttcacttccacttgcaattccttcagctttaccatctataaaggacgctaccgctcctggaagaagcccatccacgatgagcttgtggatcgtggttacaccactttccgcgagttcttcaaggctgtgcgcggataccatgctgactactacaaacagagactcatacatgatgtagaaatgaacccaggccctgtgcagtcggtttttcagccacaaggtgcggtgctaactaaatccctagcaccccaggcaggaattcaaaacatccttctacgcctccttggcatagaaggtgactgttcagaagttagtaaagcaatcacagttgtcactgacttggttgctgcatgggaaaaagcaaaaaccactctggtctctcctgaattttggtcagaacttatattaaaaactaccaagttcattgctgcttccgtgctctaccttcacaaccctgacttcactaccactgtttgtctctcattgatgactggtgtagacctcctcaccaatgattctgtttttgattggcttaagagcaaattgtcctccttctttcgtactcctcccccagcttgccccaatgtcatgcaacctcaggggcctctacgcgaggccaatgagggttttacctttgccaagaatattgaatgggccacgaaaaccatccagtccattgtcaattggcttactagctggttcaagcaggaagaggaccacccccaatcaaaattagacaaattgcttatggaattccctgatcattgtaggaacattatggatatgaggaacggtcgaaaggcctattgtgaatgcactgcttcctttaagtattttgatgatctttacaatcttgctgttacttgcaaaagaattccattagcctccctttgtgagaaatttaagaatagacacgaccactctgtcaccagacccgagccggtggttgtcgtcctgcgcggcgccgctgggcaaggcaaatctgtgaccagccaaatcattgcccaatctgtttctaagatggcctttggccgtcagtctgtttattctatgccccccgattcggaatattttgatggctatgaaaatcaattttctgtgattatggatgatctaggacaaaatcccgatggtgaagatttcaccgtcttttgtcaaatggtttctagcacaaattttctcccgaatatggctcacctggaaagaaaaggcacccctttcacctctagctttattgttgccacaacaaatttgcccaaattccgccccgttacggtagcccattaccctgctgttgataggcgaatcacctttgacttcaccgttactgctggaccccactgtaaaacacccgctggaatgttggacattgagaaggcttttgatgaaatacctggctccaaacctcagcttgcctgctttagtgctgattgtcccctcctacacaagagaggagttatgttcacctgcaatcgcaccaaaactgtctacaaccttcaacaggttgtgaaaatggtcaacgacactatcactcgcaagactgaaaacgttaagaaaatgaacagcttggttgcccagtccccaccagactggcaacactttgagaatatcctcacttgcctccgtcagaataatgctgctcttcaggatcaagttgatgaattgcaagaagcgttcacccaagcccgcgagcgttctgattttctttctgattggttgaaggtttctgctatcatttttgctggtattgtctcactttctgctgtcataaaactagcctccaaatttaaagaatcaatttggcccacgcccgtgagagttgagctctctgagggcgaacaggccgcgtatgctggtcgtgcgcgcgctcaaaaacaagcccttcaggtcctagatattcaaggaggcgggaaggttctagcccaggccggtaaccccgtcatggactttgagcttttctgtgccaaaaacatggtttccccgattaccttctactatcctgacaaggctgaagtgacccagagctgcttgctgctccgtgcccacctcttcgtggtcaaccgccacgtcgctgaaacggaatggacagctttcaagcttagggatgtgaggcacgaacgtgacactgttgtcatgcgttccgttaaccgctcaggagctgaaacggaccttacattcgtgaaggttactaaaggaccactcttcaaggacaatgtgaacaagttttgctcaaacaaggacgattttcctgctaggaatgacactgttaccgggataatgaacactggattggccttcgtgtattccggtaactttctgattggcaatcaacctgtgaacacaacaactggagcctgcttcaaccactgcctccactatcgagctcaaactcgacgtggttggtgtggttctgccatcatctgcaatgttaacggcaaaaaagctgtttacggaatgcactctgctggaggcggaggccttgccgccgctaccatcatcaccagagagttgattgaagcagctgagaagtctatgttggcgctggaaccgcaaggtgccatcgtggacatttccacaggatctgtcgtacatgtccccagaaagaccaaactgaggagaacagtcgctcatgacgttttccaacccaaattcgaacctgcagttctgtcccgttatgaccctcggaccgacaaggatgtagatgttgtagccttctccaaacacactactaacatggaaagcttgcctccaatctttgacattgtctgcggtgaatacgctaaccgtgttttcaccatccttggtaaagacaacggtctcttaaccgttgaacaggctgtgcttggcttgtcgggcatggaccccatggagaaggacacctcccctggattgccctacactcaacaaggactcagacgaactgaccttctggatttcaacactgccaaaatgacaccccaattggactatgcccattccaaactggtactcggcgtttatgacgacgttgtctaccaatcatttttgaaagatgaaattcggcccttggagaagatccacgaagcaaaaacccggattgttgatgtgcccccgtttgcccactgcatttggggaagacagcttttgggacgcttcgcttccaaatttcaaactaaacctggacttgaacttggatctgcaattggaactgacccggatgttgattggacgcgctatgccgccgagctgagcgggttcaactacgtctatgatgtagattactccaactttgatgcttcccattctactgcaatgtttgaatgtttgattaacaatttctttacagagcaaaatggatttgacagacgcattgccgagtaccttagatctctggctgtgtcgcgacatgcttatgaggaccgccgtgtcctcatacgtgggggcctgccttcgggctgtgctgctaccagcatgttaaacaccatcatgaacaatgtcataattcgtgctgccctgtaccttacttattcaaattttgaatttgatgatattaaggtcctttcctacggagacgaccttttaattggaactaattaccaaattgattttaatcttgttaaagaaagattagcccccttcggttataagattactcctgccaacaagaccactacttttcctctgacctcccatttgcaagatgttacctttctaaagagaagatttgtgagatttaattcttacctgttcagacctcaaatggatgctgtcaatttgaaagcaatggttagctactgtaaaccaggaacacttaaggagaaactaatgtccattgctcttctggccgttcattctggaccagatatttatgatgagattttccttccttttaggaatgttggaatagttgtccccacctatgattctatgctttacagatggcttagcttatttagatga

SEQ ID NO: 11870 - DNA, 3210 bp, unidentified
  source 1..3210: mol_type = other DNA
  misc_feature 1..3210: note = Synthetic
atggcttgcaaacacggatacccagacgtgtgccctatttgcacagccgttgacgctactcccgactttgaatatttgctcatggcagacggagaatggttccctacggaccttctttgtgtggacttggacgatgacgtcttctggccttcggacacgagcactcaacctcaaacaatggaatggactgatgtaccgctcgtatgcgatactgtcatggaaccccagggaaatgcctcgtcatctgataagagtaactcccagtcctcaggaaatgagggggttatcattaataacttctattccaatcaataccagaactcaattgatttgtctgccagtggtggcaacgctggcgatgctccccagaacaatggacaactgtccagcattctgggtggagctgcaaatgcttttgctactatggcacctctcctcatggaccagaacacagaggagatggaaaacctctctgacagagtagcttctgacaaagcagggaattcggccacaaacacacagtctactgttggccggctctgtggctatggaaagtcccaccacggagaacacccaacctcttgtgccgatgccgcgactgacaaggtcctcgcggctgaacgttactacactatcgatctggctagttggaccacttcccaagaagctttctctcacatcaggattcctctccctcacgtccttgctggcgaggacggaggggtttttggagctaccttaaggagacactacctctgcaagactggatggcgcgtacaagtccaatgcaacgcctcccagtttcatgctggctcccttcttgtcttcatggctccagaattctatactggtaaaggaacaaaatcaggcactatggagccttcagacccatttaccatggacaccacctggcgcagcccgcaaagtgcgcccacaggctaccgctatgacagacaagccggctttttcgccatgaaccaccagaaccaatggcaatggactgtctaccctcaccagattttgaatttgcgcacaaacaccaccgttgacttggaagttccctatgtcaatgtggcaccctccagctcttggactcaacatgcaaactggactctcgttgttgctgtgctcagccctcttcagtacgccaccggttcttcaccggacgttcaagtcacagcctccctgcaacctgttaatcccgtgtttaatggtttgagacacgaaactgtgcttgcgcaaagtcctattccagtcacggtgcgtgagcaccagggctgtttctactccactaaccctgacaccactgttcccatctatggaaaaaccatttccaccccgagtgactacatgtgtggtgagttttctgatcttcttgaattgtgcaagctccccacattccttggcaaccccagcaccgacaacaagcgttacccttatttctctgccaccaactccgtgccagccacttccctggttgactaccaagttgctctctcatgctcttgtacggccaactcaatgcttgctgctgttgctcgtaactttaatcagtaccgtggttcactgaattttcttttcgttttcactggtgctgcaatggttaagggcaagtttctcatagcctacaccccgcctggtgcgggaaagcccaccacccgggaccaagctatgcaggctacctacgccatttgggacttgggcttgaattccagcttcaacttcactgccccttttatatctccaactcattaccgtcagactagctatactagccccaccatcacatctgttgacggttgggtcactgtttggcagctgacccccctgacctacccttctggaacccccacccattctgatattctcacccttgtctccgccggcgatgacttcacgctcaggatgccaatttcacccaccaaatgggttccacagggaattgacaatgctgagaagggaaaggtctccaacgatgacgcttcggtcgatttcgttgccgagccagtcaagctacccgagaaccaaacccgggtggccttcttttacgacagagctgtccccataggaatgttgagacccggccaaaatatggaaaccacctttagctaccaagagaatgatttccgcctcaattgtcttctgttgacccctcttccttcttattgtcccgacagttcctccggtcctgtcagaacgaaggctcccgtccagtggcgatgggtgcggtctggtggcgccaatggtgccaacttcccactcatgaccaaacaggactacgccttcctctgcttttcccctttcacctactacaagtgtgaccttgaagttaccgttagtgctatgggagcaggcaccgtttcttctgttctgcgctgggcacccaccggggcgcccgcggatgtcactgaccagctgatcggctatactcctagtcttggtgaaacacgtaacccccacatgtggatcgttggctctggaaattctcaaatttcttttgtcgtaccttacaattcccctctgtccgtcttacccgctgcttggttcaatggatggtccgactttggaaacaccaaggattttggagttgctcctacgtcggattttgggcgcatttggatacagggtaacagctctgcctcagttcgaatcaggtacaagaagatgaaggtcttctgcccccgcccgaccctctttttcccctggccaacgcccaccaccaccaagatcaatgctgacaatccagtccccattcttgagcttgagaatcccgcttctctctaccgcattgatcttttcatcacctttactgatgagctcataacttttgactacaaggtccacggacgtcctgtgctcaccttccggattccaggcttcggtctgacaccggcaggcagaatgctcgtgtgcatgggcgagaagcccgcacacagtccgttcacctcgtctaaatctctataccatgttatcttcacttccacttgcaattccttcagctttaccatctataaaggacgctaccgctcctggaagaagcccatccacgatgagcttgtggatcgtggttacaccactttccgcgagttcttcaaggctgtgcgcggataccatgctgactactacaaacagagactcatacatgatgtagaaatgaacccaggccctgtgcagtcggttttttcagccacaaggtgcggtgctaactaa

SEQ ID NO: 11871 - DNA, 24 bp, unidentified
  misc_feature 1..24: note = Synthetic
  source 1..24: mol_type = other DNA
attcatctggagaatacttcttga

SEQ ID NO: 11872 - DNA, 807 bp, unidentified
  source 1..807: mol_type = other DNA
  misc_feature 1..807: note = Synthetic
atgcattatacaaatatggagatattccctgtattcggcatttctaaaattagcaattttattgctaataatgactgtagatattatatagatgtagagcatcaaaaaattatatctgatgagatcaatagacagatggatgaaacggtacttcttaccaacatcttaagcgtagaagttgtaaatggcaatgagatgtaccatcttattccccatagactatcgacgattatactctgtattagttctgttggaggatgtgttatctctatagataatgacgtcaatgataaaaatattctaacatttcccattaatcatgctgtaatcatatccccactgagtaaatgtgtcgtagttagcaagggccctacaaccacactggttgttaaagcggatatacccagcaaacgattggtaacatcgtttacaaacgacatactgtatgtaaacaatctatcactgattaattatttaccgttgtctgtattcattattagacgagtcactgactatttggatagacacatatgcgatcagatatttgctaataataagtggtattccattataactatcgacgataagcaatatcctattccatcaaattgtataggtatgtcttctgccaagtacataaattcgagcatcgagcaagatattttgatccatgtttgtaacctcgagcatccattcgactcagtctacaaaaaaatgcagtcgtacaattctctacctatcaaggaacaaatattgtatggtagaattgataatataaatatgagcattagtatttcggtggattaa

SEQ ID NO: 11873 - DNA, 21 bp, unidentified
  misc_feature 1..21: note = Synthetic
  source 1..21: mol_type = other DNA
atgactgtagatattatatag

SEQ ID NO: 11874 - DNA, 75 bp, unidentified; identical to SEQ ID NO: 2818
  source 1..75: mol_type = other DNA
  misc_feature 1..75: note = Synthetic

SEQ ID NO: 11875 - DNA, 315 bp, unidentified
  source 1..315: mol_type = other DNA
  misc_feature 1..315: note = Synthetic
atgtctaacgacaatgccaaaacagatatagaaattctttatgaacaattatcttcccgagttgaaattgaaatagcttttctccctatgttaccaaaactgtacgatataatgctgccttcattagatgcccgactacattttattaatgttggatacagacacttaacctatttaaaatatttacatcacagagcaaatcaatgcagtcactcggagattatcaaaaaaaaaatcaaactactcacttcaattttatcgaaactgttaaatgtgaatggaattttagaacatcaggaatatttaaatacataa

SEQ ID NO: 11876 - DNA, 18 bp, unidentified
  source 1..18: mol_type = other DNA
  misc_feature 1..18: note = Synthetic
atgccaaaacagatatag

SEQ ID NO: 11877 - DNA, 258 bp, unidentified
  misc_feature 1..258: note = Synthetic
  source 1..258: mol_type = other DNA
attgtgtgtattgtagctgctgtaattattatggcaatcaatgtatttacgaattcacagatatttaatattatttcttacattattttgtttattctgttctttgcatatgtgatgaacatcgaaagacaggactatagaagaagtataaatgtaaccattcctgaacagtatacctgcaacaaaccttatactgcgggaaataaggtagatgttgatataccaacatttaacagtttaaatactgacgattattaa

SEQ ID NO: 11878 - DNA, 228 bp, unidentified
  source 1..228: mol_type = other DNA
  misc_feature 1..228: note = Synthetic
atggcaatcaatgtatttacgaattcacagatatttaatattatttcttacattattttgtttattctgttctttgcatttgtgatgaacatcgaaagacaggactataaaagaagtataaatgtacccattcctgaacagtatacctgcaacaaaccttatattgcgggaaataagatagatgttgatataccaacatttaacagtttaaatactgatgattattaa

SEQ ID NO: 11879 - DNA, 30 bp, unidentified; identical to SEQ ID NO: 2826
  source 1..30: mol_type = other DNA
  misc_feature 1..30: note = Synthetic

SEQ ID NO: 11880 - DNA, 24 bp, unidentified
  misc_feature 1..24: note = Synthetic
  source 1..24: mol_type = other DNA
atttccttgatcacgcctgtgtga

SEQ ID NO: 11881 - DNA, 1029 bp, unidentified
  source 1..1029: mol_type = other DNA
  misc_feature 1..1029: note = Synthetic
atgaaagacagaggaaataaaaacacctctaaaacaagacagaccgtcaaatctcgccgaactagaaaaacaacgaaacagttcgtagaacggaaaaaaaatctatccgctaaaacgactatacgaaataatcgattacaaaacaatctatctccgcaaaccaccccaaccgaaaaacccgtcgattatgcgactgcaagagtctttccccagcacaccccatacgatataaaatttaataaggaaaaatatcgaaataacgagatctacgcctattccaaactacggaaaatctcaaacgccgtgtttcgccaagaaaaagaaattaatcgtcttactgtatttacggacaaacctctcgccgacctgtcattcaaaatgcctgtaaatacatcgacaacggagaaaaaggaaattgtcaggtctacggaatgccaaaggcaagatcggaatacagtcaacgctttcaaaatttttcaatcttacgaaacatctccaccttactccccgtgctcacctaaaaattttatgtcagaaatttacagattattccgctgctacaacgcttcaattgtgcaaatacaggtttattcccgaaataagatcttaataaacgccatgcaagaaaaattgatgtccatcggcaacatggttattaacgtgggcgagcagataatttctgaatcggttcaccatgaaccggtagtcgctattgcaatcaatcagtttttcagagggaccgtcccacaaacggacgcactccgaaaaaacgctgtaactcctataccggtaaacgcctcaaaaaaaaagcttgtcggcatttgctctctcatgataaacgcgccaacggaaaaggatttattatgcgccgctcacgtttgtatcaattttgcgatctgctatcccaacgagattactttgaatatcgcaaagctaacacaaccgatgctccttcaagaacacatcaccatatacaactctttcaataaatatatttattgggatgattatggcaaactattaaactga

SEQ ID NO: 11882 - DNA, 258 bp, unidentified
  misc_feature 1..258: note = Synthetic
  source 1..258: mol_type = other DNA
attgtgtgtattgtagctgctgtaattattatggcaattaatgtatttacgaattcacagatatttaatattatttcttacattattttgtttattttgttctttgcatatgtgatgaacatcgaaagacaggactatagaagaagtataaatgtaaccattcctgaacagtatacctgcaacaaaccttatactgcgggaaataaggtagatgttgatataccaacatttaacagtttaaatactgacgattattaa

SEQ ID NO: 11883 - DNA, 1809 bp, unidentified
  source 1..1809: mol_type = other DNA
  misc_feature 1..1809: note = Synthetic
atgccggcagaaaacaagaaagttagattcgaaaatactacttcagacaaagggaaaattcctagtaaagttattaagagctactacggaaccatggacattaagaaaataaatgaaggattattggacagcaaaatattaagtgctttcaacacagtaatagcattgcttggatctatcgtgatcatagtgatgaatataatgatcatccaaaattacacaagatcaacagacaatcaggccgtgatcaaagatgcgttgcagggtatccaacagcagatcaaagggcttgctgacaaaatcggcacagagatagggcccaaagtatcactgattgacacatccagtaccattactatcccagctaacattgggctgttaggttcaaagatcagccagtcgactgcaagtataaatgagaatgtgaatgaaaaatgcaaattcacactgcctcccttgaaaatccacgaatgtaacatttcttgtcctaacccactcccttttagagagtataggccacagacagaaggggtgagcaatctagtaggattacctaataatatttgcctgcaaaagacatctaatcagatattgaagccaaagctgatttcatacactttacccgtagtcggtcaaagtggtacctgtatcacagacccattgctggctatggacgagggctattttgcatatagccacctggaaagaatcggatcatgttcaagaggggtctccaaacaaagaataataggagttggagaggtactagacagaggtgatgaagttccttctttatttatgaccaatgtctggaccccaccaaatccaaacaccgtttaccactgtagtgctgtatacaacaatgaattctattatgtactttgtgcagtgtcaactgttggagaccctattctgaatagcacctactggtccggatctctaatgatgacccgtctagctgtgaaacccaagagtaatggtgggggttacaatcaacatcaacttgccctacgaagtatcgagaaagggaggtatgataaagttatgccgtatggaccttcaggcatcaaacagggtgacaccctgtattttcctgctgtaggatttttggtcaggacagagtttaaatacaatgattcaaattgtcccatcacgaagtgtcaatacagtaaacctgaaaattgcaggctatctatggggattagaccaaacagccattatatccttcgatctggactattaaaatacaatctatcagatggggagaaccccaaagttgtattcattgaaatatctgatcaaagattatctattggatctcctagcaaaatctatgattctttgggtcaacctgttttctaccaagcgtcattttcatgggatactatgattaaatttggagatgttctaacagtcaaccctctggttgtcaattggcgtaataacacggtaatatcaagacccgggcaatcacaatgccctagattcaatacatgtccagagatctgctgggaaggagtttataatgatgcattcctaattgacagaatcaattggataagcgcgggtgtattccttgacagcaatcagaccgcagaaaatcctgtttttactgtattcaaagataatgaaatactttatagggcacaactggcttctgaggacaccaatgcacaaaaaacaataactaattgttttctcttgaagaataagatttggtgcatatcattggttgagatatatgacacaggagacaatgtcataagacccaaactattcgcggttaagataccagagcaatgtacataa

SEQ ID NO: 11884 - DNA, 1320 bp, unidentified
  misc_feature 1..1320: note = Synthetic
  source 1..1320: mol_type = other DNA
atgggtgttgccaatgattcatcccctgaatatcaatggatgtctccccatagattatcagatactgttatattaggagactgtttgtattttaacaacataatgtcccaattagatttacaccaaaattgggctccgtcagttagattgttaaattattttaagaattttaataaggaaacactactaaagatagaagagaatgattacattaattcatcctttttccaacaaaaggataaacgattttatcctataaacgacgatttttatcacatatctacaggaggatatggtatagtctttaagatagataactatgtagtaaaatttgtattcgaggccacaaaattatatagtcccatggaaactacggcggagttcacagtacccaaatttctatacaacaatctaaagggagatgaaaaaaaattaatcgtgtgtgcgtgggccatgggattaaactataaattaacatttttacatactctgtataaacgggttcttcatatgttgctattattgatacaaactatggatggtcaggaactctcattgagatattcttctaaagtttttttaaaggcgtttaacgagagaaaggacagtatcaaattcgtgaaattactatcccacttttatccggcagttattaacagtaatattaatgttataaactattttaaccgcatgtttcactttttcgaacatgaaaagagaactaactacgaatacgaaagaggaaatattataatttttcccctagcactgtattcggcagataaagtagataccgagttagctatcaaattaggatttaaatctttggtacaatacataaagtttatctttttacagatggctctgttatacattaaaatctacgaactaccctgttgcgacaactttttacacgcagatcttaaacccgataatatcttactttttgattccaatgaaccaataataattcatctaaaggataaaaagtttgtttttaatgaacgtattaaatcggcattaaacgactttgacttttcccaagtggctggaatcattaacaagaaaataaaaaacaatttcaaagttgaacataactggtattacgatttccatttctttgttcatactttattaaaaacatatccagaaatcgaaaaagatatcgaatttagtacagcattagaagaattcatcatgtgtaccaaaacagactgtgataaatatagattaaaggtttccattcttcacccaattagtttcttggaaaaatttattatgagagacattttctcagactggataaatggcggaaactaa

SEQ ID NO: 11885 - DNA, 138 bp, unidentified; identical to SEQ ID NO: 2841
  misc_feature 1..138: note = Synthetic
  source 1..138: mol_type = other DNA

SEQ ID NO: 11886 - DNA, 423 bp, unidentified
  misc_feature 1..423: note = Synthetic
  source 1..423: mol_type = other DNA
attttccgggaataccggatattacgaattattggtagtgacgtaaataataaaattataatgcgattaatttttggtgcgttgattatttctttaacgtatatgtattattatgaagtgcatggaacggaattacgctgcaaatgtcttgatggtaaaaaactgccgcccaaaacaattatgttgggtaatttttggtttcatcgcgaatctggtggtcccagatgcaataacaatgaatatttcttgtatctaggcggaggaaaaaaacatggacctggagtatgtttatcgccccatcaccctttttcaaaatggctagacaaacgcaacgataacaggtggtataatgttaatgtaacaagacaaccggaacgagggccgggaaaaataactgtaaccctagtaggtctgaaggaataa

SEQ ID NO: 11887 - DNA, 51 bp, unidentified; identical to SEQ ID NO: 2853
  source 1..51: mol_type = other DNA
  misc_feature 1..51: note = Synthetic

SEQ ID NO: 11888 - DNA, 1047 bp, unidentified
  misc_feature 1..1047: note = Synthetic
  source 1..1047: mol_type = other DNA
attttacaatccctacccaatatgacctctaacagagcaagggtgacttacaacccaccaccaacaaccacaggcacacgatcgtgtgggccggaactttccgggtggatctctgagcaattgatgacaggcaagattccgattaccgatatcttcaatgaaattgaaaccttacctagtataagtccctcgatccactccaaaatcaaaaccccaagtgttcaaacacgcagtgtccagacccaaactgacccaaattgtaatcatgattttgcagaggttgtgaaaatgctaacatctctaacccttgtcgtacaaaaacaaacccttgcaactgaatcacttgagcaacgcattactgacctggaaggtagcctgaaaccagtgtctgagatcaccaagattgtttctgcactaaatagatcctgtgcagagatggtggccaaatatgatcttctagtaatgacgactggtcgtgcaactgccactgctgcagctactgaagcatactgggcagaacatggacgtcctccaccggggccctcattgtacgaggaggatgcaatcaggactaaaattggaaaacaaggggatatggtacccaaggaagtgcaagaggccttccgtaatctggatagtactgcccttctaacggaagagaattttgggaaaccagacatatccgcaaaagacttgcgcaatatcatgtatgatcacctcccaggttttggcacagcatttcatcaactagtgcaagttatctgcaagttagggaaggacaattcctcacttgatgtaattcatgcagaatttcaggccagccttgctgaaggagactctcctcagtgtgccctgattcagataaccaaacggattcctattttccaagatgcagcaccacccgtaatccatattcggtcacgcggtgatataccaaaggcgtgtcaaaagagcctccgccctgttccaccatcaccaaagattgataggggttgggtatgcatattccagctacaagacggaaaaacactcggactcaaaatctaa

SEQ ID NO: 11889 - DNA, 789 bp, unidentified
  source 1..789: mol_type = other DNA
  misc_feature 1..789: note = Synthetic
attttcaatatccgcaagatgacgttgccagcaagcttaaaaggattcgaaactctagacatattcaatatatcaagcgtccggaatatctgtgaactaaacaaacacgccgaacacgtttccattaaaaatttacctttaattgatatttcggttggaaatgatgatgtatggtttcatttggaagatggcacaattgtaaatggcaaatcctataaaagcatatgtgagaaaacattagggtttctaggcttcattggcattattcttcttgattccgaagatacgctagaagagattcggctgagtaaaactcaatgtaaacgaagaatcatttatttgattttaaaggaagacacggagtttttactctgtggtattgtatatgctctagaaaatctaccaataaaagggcagacactacttaaattacgagatattattaaaaaaatcagtgtaactctgccagtctctaaacttctagcctgcacctgtcaaaaattgattagtattttaagatacattttttacgatgacaaacagcaagacgtactggataaagttccacccattattcagctctattatgagtcaaaaacagcaaatatacacatgttaaatctttttttcaaatctcacgacaatgacgacacatgtactctatcactaaacacgagacgtttgcaagacgactctaaatatttaatagattttttaaaaagcgctatatgcgatgccttttcaaaggaatataagatgacagaaatagaaaaaactagtttacattaa

SEQ ID NO: 11890 - DNA, 36 bp, unidentified; identical to SEQ ID NO: 2862
  source 1..36: mol_type = other DNA
  misc_feature 1..36: note = Synthetic

SEQ ID NO: 11891 - DNA, 258 bp, unidentified
  misc_feature 1..258: note = Synthetic
  source 1..258: mol_type = other DNA
gtgctgttggaggtgctgtcgcagatgtggaacctgaacttagacatgggcctgacctcgtgtggcgagagtccgtgcgtggatgtcacggcggagcatatgagtcaattcttgcagtggtgccggagccttaaaaagaggttcaaggagagctacttcttcaactgtcgcccacggtttgagcaccctcatcttccaggtctggtagctgaactcttggcagacgacttctttggtccagatggccgacgtggatga

SEQ ID NO: 11892 - DNA, 258 bp, unidentified; identical to SEQ ID NO: 11891
  source 1..258: mol_type = other DNA
  misc_feature 1..258: note = Synthetic

SEQ ID NO: 11893 - DNA, 258 bp, unidentified; identical to SEQ ID NO: 11891
  source 1..258: mol_type = other DNA
  misc_feature 1..258: note = Synthetic

SEQ ID NO: 11894 - DNA, 1629 bp, unidentified
  source 1..1629: mol_type = other DNA
  misc_feature 1..1629: note = Synthetic
atcctcttggatgtgaaaaaaactattaacatccctcaaaagactcaaggaaagatggttcctcaggctctcctgtttgtaccccttctggtttttccattgtgttttgggaaattccctatttacacgataccagacaagcttggtccctggagcccgattgacatacatcacctcagctgcccaaacaatttggtagtggaggacgaaggatgcaccaacctgtcagggttctcctacatggaacttaaagttggatacatctcagccataaaaatgaacgggttcacttgcacaggcgttgtgacggaggctgaaacctacactaacttcgttggttatgtcacaaccacgttcaaaagaaagcatttccgcccaacaccagatgcatgtagagccgcgtacaactggaagatggccggtgaccccagatatgaagagtctctacacaatccgtaccctgactaccactggcttcgaactgtaaaaaccaccaaggagtctctcgttatcatatctccaagtgtggcagatttggacccatatgacagatcccttcactcgagggtcttccctggcgggaattgctcaggagtagcggtgtcttctacctactgctccactaaccacgattacaccatttggatgcccgagaatccgagactagggatgtcttgtgacatttttaccaatagtagagggaagagagcatccaaagggagtgagacttgcggctttgtagatgaaagaggcctatataagtctttaaaaggagcatgcaaactcaagttatgtggagttctaggacttagacttatggatggaacatgggtcgcgatgcaaacatcaaatgaaaccaaatggtgccctcccggtcagttggtgaatttgcacgactttcgctcagacgaaattgagcaccttgttgtagaggagttggtcaagaagagagaggagtgtctggatgcactagagtccatcatgaccaccaagtcagtgagtttcagacgtctcagtcatttaagaaaacttgtccctgggtttggaaaagcatataccatattcaacaagaccttgatggaagccgatgctcactacaagtcagtcagaacttggaatgagatcatcccttcaaaagggtgtttaagagttggggggaggtgtcatcctcatgtaaacggggtatttttcaatggtataatattaggacctgacggcaatgtcttaatcccagagatgcaatcatccctcctccagcaacatatggagttgttggtatcctcggttatcccccttatgcaccccctggcagacccgtctaccgttttcaagaacggtgacgaggctgaggattttgttgaagttcaccttcccgatgtgcacgaacggatctcaggagttgacttgggtctcccgaactgggggaagtatgtattactgagtgcaggggccctgactgccttgatgttgataattttcctgatgacatgctggagaagagtcaatcgatcggaacctacacaacacaatctcagagggacagggagggaggtgtcagtcactccccaaagcgggaagatcatatcttcatgggaatcatacaagagcgggggtgagaccggactgtga

SEQ ID NO: 11895 - DNA, 195 bp, unidentified; identical to SEQ ID NO: 7181
  misc_feature 1..195: note = Synthetic
  source 1..195: mol_type = other DNA

SEQ ID NO: 11896 - DNA, 69 bp, unidentified; identical to SEQ ID NO: 2873
  misc_feature 1..69: note = Synthetic
  source 1..69: mol_type = other DNA

SEQ ID NO: 11897 - DNA, 69 bp, unidentified; identical to SEQ ID NO: 2873
  source 1..69: mol_type = other DNA
  misc_feature 1..69: note = Synthetic

SEQ ID NO: 11898 - DNA, 18 bp, unidentified
  source 1..18: mol_type = other DNA
  misc_feature 1..18: note = Synthetic
atgttaattacaacctga

SEQ ID NO: 11899 - DNA, 18 bp, unidentified
  misc_feature 1..18: note = Synthetic
  source 1..18: mol_type = other DNA
aagatggcttcgaagtga

SEQ ID NO: 11900 - DNA, 126 bp, unidentified
  source 1..126: mol_type = other DNA
  misc_feature 1..126: note = Synthetic
atgcgtaaggcctcgaacatctcctcgccggcgctggtcttgacgtgcgtcagaaagtcagtgggaatgcctactttaggcaggagctcgagcgccgaccagttctccatcgcggcggcggcgtga

SEQ ID NO: 11901 - DNA, 45 bp, unidentified; identical to SEQ ID NO: 2877
  misc_feature 1..45: note = Synthetic
  source 1..45: mol_type = other DNA

SEQ ID NO: 11902 - DNA, 27 bp, unidentified
  misc_feature 1..27: note = Synthetic
  source 1..27: mol_type = other DNA
atgattctggggacgtgctgtttttga

SEQ ID NO: 11903 - DNA, 924 bp, unidentified
  source 1..924: mol_type = other DNA
  misc_feature 1..924: note = Synthetic
gtgctgtttttgagtgaactaagaatgaactctaaatcgagtgcacgagctgccattgtggatactgtggaagctgtgaagaagagaaaatatatatctatcgaggcgggaaccttaaataatgttgtagaaaaagaaaggaaatttctgaaacagtttttgtccggcagggagaatttacgtatagcggcaagggttttcacgccttgcgaattattggctccggagctcgaaaatttgggaatgttgatgtatcgttttgagactgatgtggacaaccctaaaattctgtttgtgggtctgtttttcctttgttcgaacgctttcaatgtgtctgcttgcgtgagaaccgctttaactaccatgtatacaaactcaatggttgataacgtgttatcgatgatcaacacgtgtaagtacctggaagacaaagtgtctttgtttggtgtgacgagcttagtttcttgcggcagcagttgtctgttgtcatgcgtcatgcaaggaaatgtctatgacgctaacaaagaaaacattcacgggcttacggtattaaaagagattttcctagagccagactgggaaccgcggcagcattccacccagtacgtttacgtggttcatgtttacaaagaggttttatcaaagctccagtatgggatctacgtagttctgaccagttttcagaacgaggacctggtagttgatatcttgcgacagtatttcgaaaaggagcggtttctgtttttgaactatctcattaatagcaataccacgctgagttactttggaagcgttcagcgcattggtcgttgcgcaacggaggacattaaatcgggttttctgcagtatcgtggaattaccctgccggtgataaagctagagaacatattcgttgacctttctgagaaaaaagtgttcgtatag

SEQ ID NO: 11904 - DNA, 666 bp, unidentified
  source 1..666: mol_type = other DNA
  misc_feature 1..666: note = Synthetic
ctggccacccacaaaagaaccccccaaaaaccagagactaaatggatcaggatgccttcttttctgaagaatctatggaggaacagaaggagggacgctcaacaaccagcacactcaccagtgcagtcggactcatcgacatcatccttgccagtgaacccacagacatcagaaaagatagaaaatacctttgtgagcccatcacagcttggggaaaatcagaagcaagcaagatttctaaggatgcagtctgtgaagaaaacccaagaacagaaagggaagattatggacaaagtgaagagagtggaattcttagggagtcaaacaagtttgaagcaaaagtttcttttagagaaactcatagctcagatacatcatggagggcttggagaagaagtagtgcagactctatacttgagaatatgggcaatggatccgactcctatggcaatgaaattactggaaatggaagaggaaatcagagacaaagtcttgaagctaaagttggagagatggatccgagttctaatacgaggagaaaagacaaaactgagagacttccagaagagatacgaggaggttcacccatacctaatgacagagaaagtagaagaaataataatggaggaagcctggagtctgtcagcacatataatccaagagtag

SEQ ID NO: 11905 - DNA, 666 bp, unidentified; identical to SEQ ID NO: 11904
  source 1..666: mol_type = other DNA
  misc_feature 1..666: note = Synthetic

SEQ ID NO: 11906 - DNA, 666 bp, unidentified; identical to SEQ ID NO: 11904
  misc_feature 1..666: note = Synthetic
  source 1..666: mol_type = other DNA

SEQ ID NO: 11907 - DNA, 1725 bp, unidentified
  misc_feature 1..1725: note = Synthetic
  source 1..1725: mol_type = other DNA
atggatcaggatgccttcttttctgaagaatctatggaggaacagaaggagggacgctcaacaaccagcacactcaccagtgcagtcggactcatcgacatcatccttgccagtgaacccacagacatcagaaaagatagaaaatacctttgtgagcccatcacagcttggggaaaatcagaagcaagcaagatttctaaggatgcagtctgtgaagaaaacccaagaacagaaagggaagattatggacaaagtgaagagagtggaattcttagggagtcaaacaagtttgaagcaaaagtttcttttagagaaactcatagctcagatacatcatggagggcttggagaagaagtagtgcagactctatacttgagaatatgggcaatggatccgactcctatggcaatgaaattactggaaatggaagaggaaatcagagacaaagtcttgaagctaaagttggagagatggatccgagttctaatacgaggagaaaagacaaaactgagagacttccagaagagatacgaggaggttcacccatacctaatgacagagaaagtagaagaaataataatggaggaagcctggagtctgtcagcacatataatccaagagtagaaaataatattatggatccaactcaccaccttgaagaagaggtacttaagaggaacaagccacgagagatgaatgctacaagtcaatggccaggcggacacaagactgatcaacaagatggtaggcatgaatcgacaaccaatctaatatcctcaaatcaaaacaggccacaaggcacaaaaaagggaaaagggaaagaatcagctgtaaagcccaagattagaaaatctaaaatgtcttttgaagacacaagaaacacagatcacatctatgaagactctcaagatcatataaggagaaagcaaacagataacgagccatcacaaaagattggtaaaaaaggcacagaagagaataccttatatacagaagaggtgatcaaattgttagtgagtcttggtgtaatcccatctgcagccgcattcaaccaatcccgaaacgtatgccatgtatttgcgaaacgtgtcctcaattctgtgaactttgcagaaatgacagctaatatgtgcggattattgctatctgttgagaaatcagtatcagaccggattgaagaaaataagacactaataaatcagattataagtgatttaagtacaggtagggaagtgcagaaacgtttcactgagtatcaaaaggaacagaactcattgattatgtcaaatctggcgacactccatatcataacagatagaggaggaaagaacaacagcgtggatacaggagagagaaaaccatcaatcaggaccaagggcaaggagctaacacagaaaacacaaaggtttgatccatctatggaattcaccgaagagatgaagtacaaacccgatctatacagggaagacacattgagacaaagaataacaaatcctgtccttgatgagagcgcagacaaaatcgacaattcgaatgccgcgagactgataccttgcaaagaaaaatcaacactgcgttcacttaaattgattattgagaacagcaatttaagtaaagcagacaaaattgcctatatcaggtcattatcaaaatgcaaagatgacaaagaggtagaatcagtaatgaaactatttgaggaagatatagaatcaagtaatgaataa

SEQ ID NO: 11908 - DNA, 1326 bp, unidentified
  source 1..1326: mol_type = other DNA
  misc_feature 1..1326: note = Synthetic
atggatcaggatgccttcttttctgaagaatctatggaggaacagaaggagggacgctcaacaaccagcacactcaccagtgcagtcggactcatcgacatcatccttgccagtgaacccacagacatcagaaaagatagaaaatacctttgtgagcccatcacagcttggggaaaatcagaagcaagcaagatttctaaggatgcagtctgtgaagaaaacccaagaacagaaagggaagattatggacaaagtgaagagagtggaattcttagggagtcaaacaagtttgaagcaaaagtttcttttagagaaactcatagctcagatacatcatggagggcttggagaagaagtagtgcagactctatacttgagaatatgggcaatggatccgactcctatggcaatgaaattactggaaatggaagaggaaatcagagacaaagtcttgaagctaaagttggagagatggatccgagttctaatacgaggagaaaagacaaaactgagagacttccagaagagatacgaggaggttcacccatacctaatgacagagaaagtagaagaaataataatggaggaagcctggagtctgtcagcacatataatccaagagtagaaaataatattatggatccaactcaccaccttgaagaagaggtacttaagaggaacaagccacgagagatgaatgctacaagtcaatggccaggcggacacaagactgatcaacaagatggtaggcatgaatcgacaaccaatctaatatcctcaaatcaaaacaggccacaaggcacaaaaaagggaaaagggaaagaatcagctgtaaagcccaagattagaaaatctaaaatgtcttttgaagacacaagaaacacagatcacatctatgaagactctcaagatcatataaggagaaagcaaacagataacgagccatcacaaaagattggtaaaaaaggcacagaagagaataccttatatacagaagaggtgatcaaattgttagtgagtcttggtgtaatcccatctgcagccgcattcaaccaatcccgaaacgtatgccatgtatttgcgaaacgtgtcctcaattctgtgaactttgcagaaatgacagctaatatgtgcggattattgctatctgttgagaaatcagtatcagaccggattgaagaaaataagacactaataaatcagattataagtgatttaagtacaggtagggaagtgcagaaacgtttcactgagtatcaaaaggaacagaactcattgattatgtcaaatctggcgacactccatatcataacagatagaggagga

SEQ ID NO: 11909 - DNA, 1203 bp, unidentified
  source 1..1203: mol_type = other DNA
  misc_feature 1..1203: note = Synthetic
atggatcaggatgccttcttttctgaagaatctatggaggaacagaaggagggacgctcaacaaccagcacactcaccagtgcagtcggactcatcgacatcatccttgccagtgaacccacagacatcagaaaagatagaaaatacctttgtgagcccatcacagcttggggaaaatcagaagcaagcaagatttctaaggatgcagtctgtgaagaaaacccaagaacagaaagggaagattatggacaaagtgaagagagtggaattcttagggagtcaaacaagtttgaagcaaaagtttcttttagagaaactcatagctcagatacatcatggagggcttggagaagaagtagtgcagactctatacttgagaatatgggcaatggatccgactcctatggcaatgaaattactggaaatggaagaggaaatcagagacaaagtcttgaagctaaagttggagagatggatccgagttctaatacgaggagaaaagacaaaactgagagacttccagaagagatacgaggaggttcacccatacctaatgacagagaaagtagaagaaataataatggaggaagcctggagtctgtcagcacatataatccaagagtagaaaataatattatggatccaactcaccaccttgaagaagaggtacttaagaggaacaagccacgagagatgaatgctacaagtcaatggccaggcggacacaagactgatcaacaagatggtaggcatgaatcgacaaccaatctaatatcctcaaatcaaaacaggccacaaggcacaaaaaagggaaaagggaaagaatcagctgtaaagcccaagattagaaaatctaaaatgtcttttgaagacacaagaaacacagatcacatctatgaagactctcaagatcatataaggagaaagcaaacagataacgagccatcacaaaagattggtaaaaaaggcacagaagagaataccttatatacagaagaggtgatcaaattgttagtgagtcttggtgtaatcccatctgcagccgcattcaaccaatcccgaaacgtatgccatgtatttgcgaaacgtgtcctcaattctgtgaactttgcagaaatgacagctaatatgtgcggattattgctatctgttgagaaatcagtatcagaccggattgaagaaaataagacactaataaatcag

SEQ ID NO: 11910 - DNA, 1029 bp, unidentified
  source 1..1029: mol_type = other DNA
  misc_feature 1..1029: note = Synthetic
atctataataatattcaagacatgaacagcaacgcaacaaaaaagccaataagtggcaaaaacttcttactcacttacaatgacccagaagacaccattgacacgcccacaaacctagctgagcacctaacaaacagtttcgccgaaaacctagactttattgcagttggaagagagacagctccaacaactggtacaatacactatcacgctatattactattaaagaatagacttttcacaagaaataacgctgtatttgactacaaatcaattcatccaaattaccaaactattagaaataatgtaagaaagacatatttatacgtaattaaaggaggaaactatacacaatcagacctaaaaagatttgaactagaggatgagaagaagttaagagatagaatagagaagaacaaattgctgatgaaaggtgatatattaaaagcttatgaagaaggagaaattggagcaatagagttcataagagctcagaaaataagaagtataaagattcaaattgaacccaccatgatgaaaagagacatgccattagtattatggttttatggtaaaacaggttcaggaaagacaagaatgacattagagatagctgaagatttacacctcaacgcatggataagcggagataccctaaaatggttcgatgggtataatggacaggaagtcgcaataatagatgatttgagaaaggaaatacttcctaattgggcgttcttactccgtttgttggatagatattctttaatagtgcagatcaaaggtggttttacaaggtggaatccaaaaattataataataacatgcccagtagaaccacacgaatgctttagctggtacaacaaacaaggggaacaacaagcatgggatagtgaagagcagctattaagaaggctcacatgggaaggagttgaacaaatttatgaattcccattatccacaggagaccaagaagctttggaagaaactattgaaagctggaaagctaaacaaggtagaagtaattga

SEQ ID NO: 11911 - DNA, 39 bp, unidentified; identical to SEQ ID NO: 2887
  source 1..39: mol_type = other DNA
  misc_feature 1..39: note = Synthetic

SEQ ID NO: 11912 - DNA, 204 bp, unidentified
  misc_feature 1..204: note = Synthetic
  source 1..204: mol_type = other DNA
atgagatcgaagcacaacgagctgaaaagtccaattatgagttgttccaagaggatggagtggaagagcatactaagccctcttattttcaggcagcagatgattctgacacagaatctgaaccagaaattgaagacaatcaaggtttgtatgcacaggatccagaagctgagcaagttgaaggctttatacaggggcctttag

SEQ ID NO: 11913 - DNA, 84 bp, unidentified; identical to SEQ ID NO: 101
  source 1..84: mol_type = other DNA
  misc_feature 1..84: note = Synthetic

SEQ ID NO: 11914 - DNA, 246 bp, unidentified
  misc_feature 1..246: note = Synthetic
  source 1..246: mol_type = other DNA
atgacgctcgtcatgggatcctgttgtggtagattctgtgacaagaataagaataagaataagaaggaagatgtagaagcgggaggagaaggatattacgattataagaacattaatgatctggatgaattcgaagcacgtgtagaatttggaccattatatatgataaatgaagaaaaatcagacataaatacattggatataaaaagaagatatagacacacgatagagtctgtatatttctaa

SEQ ID NO: 11915 - DNA, 48 bp, unidentified; identical to SEQ ID NO: 8628
  misc_feature 1..48: note = Synthetic
  source 1..48: mol_type = other DNA

SEQ ID NO: 11916 - DNA, 27 bp, unidentified
  source 1..27: mol_type = other DNA
  misc_feature 1..27: note = Synthetic
atgattctggagacgtgctgtttttga

SEQ ID NO: 11917 - DNA, 900 bp, unidentified
  misc_feature 1..900: note = Synthetic
  source 1..900: mol_type = other DNA
atgaactctaaatcgagtgcacgagctgccattgtggatactgtggaagctgtgaagaagagaaaatatatatctatcgatgagggaaccttaaataatgttgtagaaaaagaaaggaaatttctgaaacagtttttgtccggcaggcagaatttacgtatagcggcaagggttttcactccttgtgaattactggcaccggagctggaaaatttgggaatgttgatgtatcgttttgagactgatgtggacaaccctaaaattctgtttgtgggtctgtttttcctttgttctaacgcattcaatgtgtctacttgtgtgagaaccgctttaactgccatgtatacaaactcaatggttgataacgtgttatcgatgatcaatacgtgtaggtacctggaagacaaagtgtctttgtttggtgtgacgagcttagtttcttgcggcagcagttgtctgttgtcatgcgtcatgcaaggaaatgtctatgacgttaacaaagaaaacatttacgggctcacggtattaaaagagattatactagaaccagactgggaaccgcggcagcattccacccagtatgtttacgtggttcatgtttacaaggaggttttagcaaagctccagtatgggatctacgtagttctgactagttttcagaacgaagatctgatagttgacatcttgcgacagtatttcgaaaaggagcggtttctgttcttgaactatcttattaatagcaataccacgctgagttactttggaagcgttcagcgtattggtcgttgcgcgacggaggacattaaatcgggttttctgcagtatcgtggaattaccctgtcagtgataaagctagagaacatattcgttgacctttctgagaaaaaagtgtttgtatag

SEQ ID NO: 11918 - DNA, 123 bp, unidentified; identical to SEQ ID NO: 2897
  misc_feature 1..123: note = Synthetic
  source 1..123: mol_type = other DNA

SEQ ID NO: 11919 - DNA, 141 bp, unidentified; identical to SEQ ID NO: 2898
  source 1..141: mol_type = other DNA
  misc_feature 1..141: note = Synthetic

SEQ ID NO: 11920 - DNA, 54 bp, unidentified
  misc_feature 1..54: note = Synthetic
  source 1..54: mol_type = other DNA
atggacgcattgggtgatattctatcatctattggtgtattgagaacttgttaa

SEQ ID NO: 11921 - DNA, 33 bp, unidentified; identical to SEQ ID NO: 2905
  misc_feature 1..33: note = Synthetic
  source 1..33: mol_type = other DNA

SEQ ID NO: 11922 - DNA, 1035 bp, unidentified
  source 1..1035: mol_type = other DNA
  misc_feature 1..1035: note = Synthetic
atatctataataatattcgtaaatatgaactccactaacgtctctaaaccaatctctggaaagaactttctgctgacctataatgacagtgaagataaaattggaattggtgttgatatagcagaacatttaatagaaaaattccaagaaaaagttttattcatagcagtcggaagagaaatagcaccaaccacaggaatgattcactatcattgcctactaatgctaaaagacagattctttagtaggaacacttcttgctttgactttaaaaacatacaccccaacttccaaacagtgaggaacaacacaagaaaaacgtatttatatgttataaaagataatgattattgggaaactaatccaagattctttgaaaaagaagatgatttgaaaaataaagagaggataagaaaaaataagttgctaatggagggggatatcatgaaagcctacctagatggtgaaattgggccagttgaacttataagagcccaaaagataagagctataaagctacaaactgaaccaacgatgataaagagagaagctccactagtaatctggttctacggtaaaacaggaaccggtaaaacaagaaaaacgatagaaatggctgaagaattgaagttgaaaacctggatgagcagcgacagcctgaaatggttcgatggctactgcaaccaagagcttgctataattgacgacctaagaaaggaaatcctccccaactgggcttttctactaagattattggacaggtatgctctaatagtgcaaataaagggaggtttcaccagatggaacccaaaaattattatcatcacgtccccagtagaaccacatgaatgctttagctggttcaacagacaaggtgagcaacaagcatgggacagtgaagaccaattgctcagaaggcttacatgggatggaatagaacaagtttatgaattcccattatcaacaggagatgaagaagctttggaagaaacattagaaagttggaaagctaaacaagctgatgaagaaaattaa

SEQ ID NO: 11923 - DNA, 1050 bp, unidentified
  misc_feature 1..1050: note = Synthetic
  source 1..1050: mol_type = other DNA
atgtcactacatttagactgtgtaaatttgctattaacgtacaacgatccagaaggaaagatctttggtgatatgagcctcttagaccaactaattgagaatttcaaagagtatgaaccaatatacggagtatgcagtaaagagaaagcacccaccacgggaatgactcattatcatgtctatatcaaattaaaaagaagatgtcaaaaaaaagatggaaggagtttgctaatagtagaaacaataagaccaaatattgaaagggtacgaaacaacatcaaagctgtaattaagtatgttatgaaaggtggttattacgcagaatatggaacatgtccagttaacttgaaggaagaagagaataataaagtaaagaaagcacaaatgatgatgactggtaacctggaagaactatttttaaatggagaattaggtgcagtggatgtaatacgagcacaaaagctaaaaacaatctttcaattagcaagaccgatggaaaaatatagtaaaaagcttgttctctggtttaaaggagaaaccggagaaggaaagacccgcaaagcacttgaaatagcagaaatgtttaacctgagcttttggatgacgaatgatagcttgaaatggttcgatggatacacaggacaagaattagtcataatggacgattttagaaaaaatatgctaggggactggaattatttgctaagattactagacggctatggtctagcagtacaagtcaaaggaggtttcgctatatggaagcctaagataataatcattacaagcccggcaacaccacatgaagccttcagctgggtcaataaagaaggcgaagagcaaggctgggacaaggaggagcaactcatcagaaggctaacacacgaagatgaagaacaaatttatcaattcccgctatggaaagaagatgaagaaaggatgacacttacgatcaagaagtttctaggattaccaatattggaagaagagaacatgctcccagaagaatggagcaccatattaccagaaggattcataactccaagctaa

SEQ ID NO: 11924 - DNA, 1044 bp, unidentified
  misc_feature 1..1044: note = Synthetic
  source 1..1044: mol_type = other DNA
atgtcactacgtttagactgtgtaaatttgctattaacgtataacgacccagaaggaaagatctttggtgatatgagcctcttagaccaactaattgagaatttcaaagagtatgaaccaatatacggagtatcctgtaaagagaaagcacccaccacgggaatgactcattaccatgtctatatcaaattaaaaaaaagatgtcaaaaaaaagatggaagaagcttgctaatagtagaaacaataagaccaaatattgaaagggtacgaaacaacatcaaagctataattaagtatgttaagaaaggtggttattacgcagaatatggaacatgtccggttgagttaaaggatactaagatcagtaatattgataaagctaatataatgataaatggtaatttagaagaattatacttaaacggtacacttggtgctgtcgatgtaatcagggcgcaaaaattaagaagcatctttcaattagcaagaccggtagaaaaatatagtaaaaagcttgttctctggtttaaaggagaaaccggagaaggaaagacgcgcaaagcatttgaaatagcagaaaagtttaacctgagcttttggatgacgaatgatagcttaaaatggtacgatggatacacaggtcaagaattagtaatcatagacgactttagaaaaaatatgctaggggactggaattatttgctaagattactagacggctatggtctagcagtacaagtaaaaggcggttttactacatggaagcctaagataatcatcattacaagcccagcaacaccacatgaagccttcagctgggtcaataaagaaggcgaggagcaaggctgggacaaggaggatcagctcatcagaaggctaacacacgaagatgaagaacagatttatcaattcccgctttgggaacaggatgagaagaggttagaagctacaataagaagatttctaggattgccagaagaagagaacatgttcccagaagactggagcatcattgaaccagaaggattcataacccctggttaa

SEQ ID NO: 11925 - DNA, 1044 bp, unidentified
  source 1..1044: mol_type = other DNA
  misc_feature 1..1044: note = Synthetic
atgtcactacgtttagactgtgtaaatttgctattaacgtataacgacccagaaggaaagatctttggtgatatgagcctcttagaccaactaattgagaatttcaaagagtatgaaccaatatacggagtatcctgtaaagagaaagcacccaccacgggaatgactcattatcatgtctatatcaaattaaaaagaagatgtcaaaaaaaagatggaagaagcttgctaatagtagaaacaataagaccaaatattgaaagggtacgaaacaacatcaaagctataattaagtatgttaagaaaggtggttattacgcagaatatggaacatgtccggttgagttaaatgatactaagatcagtaaaattgataaagctaatgtaatgataaatggtaatttagaagaattatacttaaacggtacacttggtgctgtcgatgtaatcagggcgcaaaaattaagaagcatctttcaattagcaagaccggtagaaaaatatagtaaaaagcttgttctctggtttaaaggagaaaccggagaaggaaagacgcgcaaagcatttgaaatagcagaaaagtttaacctgagcttttggatgacgaatgatagcttaaaatggtacgatggatacacaggtcaagaattagtaatcatagacgactttagaaaaaatatgctaggggactggaattatttgctaagattactagacggctatggtctagcagtacaagtcaaaggcggttttactacatggaagcctaagataattatcattacaagcccggcaacaccacatgaagccttcagctgggtcaataaagaaggcgaggagcaaggctgggacaaggaggatcagctcatcagaaggctaacacacgaagatgaagaacagatttatcaattcccgctttgggaacaggatgagaagaggctagaagctacaataagacaattccttgggctaccagaagaggaattcttaacagctgaagactggagcatcattgaacctgagggcttcataaccccaagttaa

SEQ ID NO: 11926 - DNA, 189 bp, unidentified
  source 1..189: mol_type = other DNA
  misc_feature 1..189: note = Synthetic
aggatcatagggacgcgcccgcaccgcggcgacagcgccacgaccggcagcggggcctggtgtgggacgacgaggactcggccgacgatagcagcgtgttggacttgggcgggagcggtggtggggccaacccgttcgcgcatctgcagcccagactggggcaacggatgttttgaatgcataaaataa

SEQ ID NO: 11927 - DNA, 42 bp, unidentified; identical to SEQ ID NO: 2916
  source 1..42: mol_type = other DNA
  misc_feature 1..42: note = Synthetic

SEQ ID NO: 11928 - DNA, 30 bp, unidentified; identical to SEQ ID NO: 2917
  misc_feature 1..30: note = Synthetic
  source 1..30: mol_type = other DNA

SEQ ID NO: 11929 - DNA, 15 bp, unidentified
  misc_feature 1..15: note = Synthetic
  source 1..15: mol_type = other DNA
atgaggttctcatag

SEQ ID NO: 11930 - DNA, 57 bp, unidentified; identical to SEQ ID NO: 2919
  source 1..57: mol_type = other DNA
  misc_feature 1..57: note = Synthetic

SEQ ID NO: 11931 - DNA, 15 bp, unidentified
  misc_feature 1..15: note = Synthetic
  source 1..15: mol_type = other DNA
atggtaaaattataa

SEQ ID NO: 11932 - DNA, 1047 bp, unidentified
  source 1..1047: mol_type = other DNA
  misc_feature 1..1047: note = Synthetic
ttgagattaaagatgttgaagagaggatctagaaaattctcttccatgctggctaggcgtcatactcctaaaaaaatgaacatagttactgatttggaaaatcgtttaaagaagaatagctatatagaaaatactaatcagggaaacattctgatggatagtatcttcgtatccactatgtcggtagaaacattgtttggatcgtacataactgatgacagtgatgattatgaacttaaggatttacttaatgttacatataacattaaaccggtcatagttcctgacatcaagttggatgctgtattagatagagatggaaattttagaccagctgactgtttcttggttaaactgaaacatagagatggattcaccaaaggagctctctatcttggacatagtgcaggatttacggcaacaatctgcttaaaaaatgagggggtttcagggctttacattccaggtacttctgtaattcggaccaatatctgtcaaggagatactatcgtcagtagatcatctagaggagttcaatttcttctacaaataggaggagaagctatcttcttgattgtttcactttgtcctaccaaaaagttagtagaaacaggattcgtcattccaaacatatcatcaaatgataacgccaaaatcgctgctcgcattctatcagaaaaacgcaaggacaccattactcatatcgatactctaatacaatacggacagcaattggaattggcttactataattcctgtatgttaactgagtttctgcattattgtaatttgtatgctaacaccatcaaagaatcacttctaaaagaaacaattcaaaaagatatcaatatcactcatacaaatatcactaccctattgaatgagacagccaaggttatcaagttagtaaaatctctggtagataaagaagatactgatatagtgaataattttattaccaaagaaattaaaaactgtggaggtgttaaaaacagagacacgatagttaatagtttgtctctatcaaacctggacttttatttgtaa

SEQ ID NO: 11933 - DNA, 1575 bp, unidentified
  misc_feature 1..1575: note = Synthetic
  source 1..1575: mol_type = other DNA
attccaactttatatatgccgcaatatatttctctatccggagttatgacaaacgatgggcccgacaatcaggctatcgctagcttcgaaattagggatcagtatattactgcgcttaatcatttggttctgagtttggaacttccagaagttaaaggtatgggaagattcggttacgtaccatatgttggatataaatgtattaatcatgtatctgtctcttcgtgtaacggtgttatttgggaaattgatggcgaagaattatataataattgtatcaataatacaattgctttgaaacattctggatattctagtgaacttaatgatatttctattggtctaactcctaatgacactattaaagaaccatctacagtatacgtttatattaaaactccgtttgatgtggaagatacattcagtagtcttaaactatccgattcaaaaattacggtaacggtgaccttcaatccagtatccgatatcgttattcgtgactcttcgttcgactttgaaacgttcaacaaagaatttgtttatgttcctgaattgagctttattggatatatggttaagaatgtacaaattaaaccatcatttatagagaaacctaggagagtaataggtcaaataaaccaaccaacggcgacagtaaccgaagttcatgcagcaacatctctctctgtttatactaaaccttattatggaaatacggataacaaatttatttcgtatccagggtactcacaagatgaaaaagattatatagacgcatatgtgagtagattgttggatgatctagttattgttagtgatggtccaccgactggttatccggaatctgccgagatcgtagaggttccagaagatggtgttgtttctattcaagatgccgatgtttatgtaaaaattgataatgttcctgataatatgagtgtttatcttcatactaatctgttaatgtttggaacccgaaaaaattcttttatatataacatttctaaaaagttttccgctattactggaacatatagcgacgccaccaagagaacagtctttgctcacatatcacatactatcaacatcatcgatacatctattcctgtaagtctttggactagtcaacgtaacgtctataacggagataatagatcagccgaatcaaaggccaaggatttgtttattaacgatccattcatcaagggaatagattttaaaaataagaccgatattatttctagactagaagttagatttggaaatgatgttctatattcagagaacgggcccatctcgagaatttataacgaactactgacaaaaagcaataatggaacaagaaccctaacttttaactttacaccaaagatattctttaggccgacaactattacggccaatgtatctagggggaaagataaactatctgttcgagtagtttattccaccatggatgtcaatcatccaatctattatgtacaaaaacaattggtagttgtatgtaatgacctgtataaggtatcttatgatcaaggtgtaagtattaccaagattatgggagataataactaa

SEQ ID NO: 11934 - DNA, 18 bp, unidentified
  source 1..18: mol_type = other DNA
  misc_feature 1..18: note = Synthetic
atattaagactatcctaa

SEQ ID NO: 11935 - DNA, 1590 bp, unidentified
  source 1..1590: mol_type = other DNA
  misc_feature 1..1590: note = Synthetic
atgggtactataattcaatttctggtggtctcctgtctattggcaggagcaggcagccttgatccagcagccctcatgcaaatcggtgtcattccaacaaatgtccggcaacttatgtattatactgaggcctcatcagcattcattgttgtgaagttaatgcctacaattgactcgccgattagtggatgtaatataacatcaatttcaagctataatgcaacagtgacaaaactcctacagccgatcggtgagaatttggagacgattaggaaccagttgattccaactcggaggagacgccggtttgcaggggtggtgattggattagctgcattaggagtagctactgccgcacaggtcactgccgcagtggcactagtaaaggcaaatgaaaatgctgcggctatactcaatctcaaaaatgcaatccaaaaaacaaatgcagcagttgcagatgtggtccaggccacacaatcactaggaacggcagttcaagcagttcaagatcacataaacagtgtggtaagtccagcaattacagcagccaattgtaaggcccaagatgctatcattggctcaatcctcaatctctatttgaccgagttgacaaccatcttccacaatcaaattacaaaccctgcattgagtcccattacaattcaagctttaaggatcctactggggagtaccttgccgactgtggtcgaaaaatctttcaatacccagataagtgcagctgagcttctctcatcagggttattgacaggccagattgtgggattagatttgacctatatgcagatggtcataaaaattgagctgccaactttaactgtacaacctgcaacccagatcatagatctggccaccatttctgcattcattaacaatcaagaagtcatggcccaattaccaacacgtgttatggtgactggcagcttgatccaagcctatcccgcatcgcaatgcaccattacacccaacactgtgtactgtaggtataatgatgcccaagtactctcagatgatactatggcttgcctccaaggtaacttgacaagatgcaccttctctccagtggttgggagctttctcactcgattcgtgctgttcgatggaatagtttatgcaaattgcaggtcgatgttgtgcaagtgcatgcaacctgctgctgtgatcctacagccgagttcatcccctgtaactgtcattgacatgtacaaatgtgtgagtctgcagcttgacaatctcagattcaccatcactcaattggccaatgtaacctacaatagcaccatcaagcttgaatcatcccagatcttgtctattgatccgttggatatatcccaaaatctagctgcggtgaataagagtctaagtgatgcactacaacacttagcacaaagtgacacatatctttctgcaatcacatcagctacgactacaagtgtattatccataatagcaatctgtcttggatcgttaggtttaatattaataatcttgctcagtgtagttgtgtggaagttattgaccattgtcgttgctaatcgaaatagaatggagaattttgtttatcataaataa

SEQ ID NO: 11936 - DNA, 93 bp, unidentified
  misc_feature 1..93: note = Synthetic
  source 1..93: mol_type = other DNA
atccagcagccctcatgcaaatcggtgtcattccaacaaatgtccggcaacttatgtattatactgaggcctcatcagcattcattgttgtga

SEQ ID NO: 11937 - DNA, 234 bp, unidentified
  misc_feature 1..234: note = Synthetic
  source 1..234: mol_type = other DNA
atgttaactcccgcggtctttccggccgtgctctacctcctggcgcttgtcgtctgggttgagatgttctgcctcgtcgccgtagccgtcgtcgagcgcgagatcgcctgggcgctgctgttgcggatgctggtcgttggcctgatggtggaagtcggcgccgccgccgcttggaccttcgtgcgttgtctcgcctatcagcgttccttccccgtgcttacagccttcccctga

SEQ ID NO: 11938 - DNA, 21 bp, unidentified
  source 1..21: mol_type = other DNA
  misc_feature 1..21: note = Synthetic
atgaagtcgtcactgggctaa

SEQ ID NO: 11939 - DNA, 21 bp, unidentified
  misc_feature 1..21: note = Synthetic
  source 1..21: mol_type = other DNA
atgaagtcgtcactgggctaa

SEQ ID NO: 11940 - DNA, 21 bp, unidentified
  misc_feature 1..21: note = Synthetic
  source 1..21: mol_type = other DNA
atgaagtcgtcactgggctaa

SEQ ID NO: 11941 - DNA, 45 bp, unidentified; identical to SEQ ID NO: 2926
  misc_feature 1..45: note = Synthetic
  source 1..45: mol_type = other DNA

SEQ ID NO: 11942 - DNA, 207 bp, unidentified
  misc_feature 1..207: note = Synthetic
  source 1..207: mol_type = other DNA
ctggcgtatgacgtgccggagggcatccggcgccaccttcgcaatcccaagattcggcgcgcgttcacggagcagtgtataaattaccagcgcacgcacaaggccgtcctgtcgtcggtgtcgctgccgcccgagctgaggccgctgctggtgctggtctcccgcctctgtcacgccaacccggccgcgcgccactctctgtcgtga

SEQ ID NO: 11943 - DNA, 42 bp, unidentified; identical to SEQ ID NO: 2928
  misc_feature 1..42: note = Synthetic
  source 1..42: mol_type = other DNA

SEQ ID NO: 11944 - DNA, 87 bp, unidentified; identical to SEQ ID NO: 2379
  source 1..87: mol_type = other DNA
  misc_feature 1..87: note = Synthetic

SEQ ID NO: 11945 - DNA, 72 bp, unidentified
  source 1..72: mol_type = other DNA
  misc_feature 1..72: note = Synthetic
atgttcttgaagaccagacccttgtcaagaatattaggtatagactggggtgcggtttttcaaatcaaatga

SEQ ID NO: 11946 - DNA, 162 bp, unidentified; identical to SEQ ID NO: 2932
  source 1..162: mol_type = other DNA
  misc_feature 1..162: note = Synthetic

SEQ ID NO: 11947 - DNA, 144 bp, unidentified; identical to SEQ ID NO: 2933
  source 1..144: mol_type = other DNA
  misc_feature 1..144: note = Synthetic

SEQ ID NO: 11948 - DNA, 144 bp, unidentified; identical to SEQ ID NO: 2934
  source 1..144: mol_type = other DNA
  misc_feature 1..144: note = Synthetic

SEQ ID NO: 11949 - DNA, 144 bp, unidentified; identical to SEQ ID NO: 2935
  source 1..144: mol_type = other DNA
  misc_feature 1..144: note = Synthetic

SEQ ID NO: 11950 - DNA, 237 bp, unidentified
  misc_feature 1..237: note = Synthetic
  source 1..237: mol_type = other DNA
acgcggacgaagacgaggatgagatcgaagaagagtacgaggaggaggacgaggacgaggaggaagagtctgccgagggcgccgccgactcctcagtcagcgacgtggcgctctctgccgccgagaagctggtggcctcggaggtcccggacgacgcggctgccgcggacaccaacgtgcgtcaacgcgtcaccgcgcgcgtggaggagcttaaggcgcgctacacacggcggatga

SEQ ID NO: 11951 - DNA, 18 bp, unidentified
  misc_feature 1..18: note = Synthetic
  source 1..18: mol_type = other DNA
atggccttccaggactag

SEQ ID NO: 11952 - DNA, 1029 bp, unidentified
  misc_feature 1..1029: note = Synthetic
  source 1..1029: mol_type = other DNA
atgggaaactccgtacagctccccgcgcaagagccgccggggcccatgctcaccgccgagatggagctcacgctcatggacatgctcgacgtgatcgcgcaggcgcgccatggcgagctagtgcacaccggcgcgctgatcaccgaggagccgcgcttcacggagatcaggcagctgctgcgctccatgctgccggagtttgaccttgtcgagacaggccggggcctgttcggcatgcagcgcagggtcttctcgggggaactcggcttctgctgcacacaccgcgagcaccactactgggaggacacgcgcacgcgcgagcatgccgccgcgtacgcgccggggcgcgcgctgcgcacgtgcgcgccgtggacgctaaccaaggcctctccgtgcgaccagacccttttcgcgtggtgcgtccgcgaggattccgacacagagctctgcaagcagtggctgggggccgccttcgcgcgccacgagcttgtcccgccaggggcgtccagctcgctggacaagttggtggggctcttcgcgcggcgctgcgcacaggacgtgcgcgcgcacggctgcgaggactggctgcacgccatgcgcgtggctaacgagccccgcttcgatcgcgtgatcgatgcggtgctggcgcagcaggaccccgagttcaagcgcacgcacatggcttgcagctaccctagccaccgctcgctggagctggcgcgccgcgtggccgagccgcgcgagtgctgggatccgcagtgccagcgtgccaacccgaacttccttctcagcgagaactaccacgcgctcgcgggctgccacatttaccgctgcaacgtgagcatcggcacgctgctcatggacaagcgctccaaactgcgcatctcgtgccacgacccgagtacgcgcgtgcagctgaacaagctgggcgtggtgcaggacaacgtgcgccgcgcgccgcgcgtgcgcacgcacttgctggccgccctggcgctgttcctcgtgtgggtcttaattgtggcactttaa

SEQ ID NO: 11953 - DNA, 39 bp, unidentified; identical to SEQ ID NO: 2947
  source 1..39: mol_type = other DNA
  misc_feature 1..39: note = Synthetic

SEQ ID NO: 11954 - DNA, 30 bp, unidentified; identical to SEQ ID NO: 2953
  source 1..30: mol_type = other DNA
  misc_feature 1..30: note = Synthetic

SEQ ID NO: 11955 - DNA, 33 bp, unidentified; identical to SEQ ID NO: 2954
  source 1..33: mol_type = other DNA
  misc_feature 1..33: note = Synthetic

SEQ ID NO: 11956 - DNA, 120 bp, unidentified
  source 1..120: mol_type = other DNA
  misc_feature 1..120: note = Synthetic
atgcgatcagtaacttttaataaggttattacaattttagaatacatagctattttaatttttgttcctggaactattgcactatattccgcatatattaaaacacttatagtaggttaa

SEQ ID NO: 11957 - DNA, 33 bp, unidentified; identical to SEQ ID NO: 2965
  misc_feature 1..33: note = Synthetic
  source 1..33: mol_type = other DNA

SEQ ID NO: 11958 - DNA, 30 bp, unidentified; identical to SEQ ID NO: 2967
  source 1..30: mol_type = other DNA
  misc_feature 1..30: note = Synthetic

SEQ ID NO: 11959 - DNA, 60 bp, unidentified; identical to SEQ ID NO: 2971
  misc_feature 1..60: note = Synthetic
  source 1..60: mol_type = other DNA

SEQ ID NO: 11960 - DNA, 60 bp, unidentified; identical to SEQ ID NO: 2971
  source 1..60: mol_type = other DNA
  misc_feature 1..60: note = Synthetic

SEQ ID NO: 11961 - DNA, 111 bp, unidentified; identical to SEQ ID NO: 2972
  misc_feature 1..111: note = Synthetic
  source 1..111: mol_type = other DNA

SEQ ID NO: 11962 - DNA, 48 bp, unidentified
  source 1..48: mol_type = other DNA
  misc_feature 1..48: note = Synthetic
atgtgtagacagacaaagaacctcctaaccaagattgtgtactcctga

SEQ ID NO: 11963 - DNA, 12 bp, unidentified
  source 1..12: mol_type = other DNA
  misc_feature 1..12: note = Synthetic
aagatactttaa

SEQ ID NO: 11964 - DNA, 105 bp, unidentified; identical to SEQ ID NO: 2975
  source 1..105: mol_type = other DNA
  misc_feature 1..105: note = Synthetic

SEQ ID NO: 11965 - DNA, 15 bp, unidentified
  source 1..15: mol_type = other DNA
  misc_feature 1..15: note = Synthetic
atgaaccttatataa

SEQ ID NO: 11966 - DNA, 144 bp, unidentified
  misc_feature 1..144: note = Synthetic
  source 1..144: mol_type = other DNA
attcaagataaagaaacaatgaaaattatgttagaatctcagcctgaaaaaatgcagactttaaaaaaatttttatctactactagaaataaacattttacatataaaatactagacgaagaagttaggagagtgttaacatga

SEQ ID NO: 11967 - DNA, 246 bp, unidentified
  misc_feature 1..246: note = Synthetic
  source 1..246: mol_type = other DNA
atgttaccccaccagaatcgcgccacacaattgatggccctgttgggcgagtcagcactccatggtcaaaacttctacaaaaagattagtggcatggtaatcaaagaagtgaagaatggtgggcatgagttctatgtgccaaagtttgagtccatgtacaagtggatgcggttctcagacttgagcacttgggagggggatcgcgatctcgctcccgattttgtgaatgaagatggcgtcgagtga

SEQ ID NO: 11968 - DNA, 246 bp, unidentified; identical to SEQ ID NO: 11967
  source 1..246: mol_type = other DNA
  misc_feature 1..246: note = Synthetic

SEQ ID NO: 11969 - DNA, 27 bp, unidentified
  source 1..27: mol_type = other DNA
  misc_feature 1..27: note = Synthetic
aggagattgcagaattactcgagctga

SEQ ID NO: 11970 - DNA, 309 bp, unidentified
  source 1..309: mol_type = other DNA
  misc_feature 1..309: note = Synthetic
atgagcatgacttccccgtctccagtcaccggaggaatggtggacggctccgtcctggtgcgaatggccaccaagcctcccgtgattggtcttataacagtgctcttcctcctagtcataggcgcctgcgtctactgctgcattcgcgtgttcctggcggctcgactgtggcgcgccaccccactaggcagggccaccgtggcgtatcaggtccttcgcaccctgggaccgcaggccgggtcacatgcaccgccgacggtgggcatagctacccaggagccctaccgtacaatatacatgccagattag

SEQ ID NO: 11971 - DNA, 309 bp, unidentified; identical to SEQ ID NO: 11970
  source 1..309: mol_type = other DNA
  misc_feature 1..309: note = Synthetic

SEQ ID NO: 11972 - DNA, 1110 bp, unidentified
  source 1..1110: mol_type = other DNA
  misc_feature 1..1110: note = Synthetic
atggcatatacaacattgaaactgtgggtggatgagggtgacatgtcgtcttcgctcctatcattcccgttggtactaaaagagacagacagaggcacaaaggagcttcaaccacaggtaagggtagattcaattggcgatgtgcagaacgccaaagagtcctcgatattcgtgactctatatggtttcatccaagcaattaaggagagtacagatcgatcgaaattcttccatccaaaagatgacttcaaacctgagacagtcactgcaggactggtagtggtaggtgcgatccgaatgatggctgatgttaataccatctctaatgacgcactagcgctggagatcactgttaagaaatctgcaacttctcaagagaaaatgacggtgatgttccacaatagccccccttcattgagaactgcaataactatccgagcaggaggtttcatctcgaatgcagacgagaatataaaatgtgccagcaagttgactgcaggagtgcagtacatattccgcccaatgtttgtttcaatcactaaattacacaatggcaaactatatagggtgcccaaaagcatccacagcatctcgtccactctactgtatagtgtgatgttggaggtaggattcaaagtggatattgggaaggatcatccccaggcaaagatgctgaagaaggtcacaatcggcgatgcagacacatactgggggtttgcatggttccacctgtgcaatttcaaaaagacatcctctaagggaaagccaagaacgctagacgaactaaagacaaaagtcaaaaacatggggttgaaattggagttacatgacttgtggggtccgactattgtggtccaaatcactggcaagagcagcaaatatgctcaaggatttttttcctccaatggtacttgttgcctcccaatcagcagatctgcaccagggcttgggaagcttctgtggtcctgttcagcaactatcggtgacgcaacagttgttatccagtcaagcgagaaaggggaactcctaaggtctgatgacctcgagatacgaggtgctgtggcctccaagaaaggtagactgagctcatttcaccccttcaagaaatga

SEQ ID NO: 11973 - DNA, 639 bp, unidentified
  source 1..639: mol_type = other DNA
  misc_feature 1..639: note = Synthetic
atgaaaaaaacaggcaacaccactgataaaatgaactttctacgtaagatagtgaaaaattgcagggacgaggacactcaaaaaccctctcccgtgtcagcccctctggatgacgatgacttgtggcttccaccccctgaatacgtcccgctaaaagaacttacaagcaagaagaacaggaggaacttttgtatcaacggaggggttaaagtgtgtagcccgaatggttactcgttcgggatcctgcggcacattctgagatcattcgacgagatatattctgggaatcataggatggtcgggttagtcaaagtagttattggactggctttgtcaggagctccagtccctgagggcatgaactgggtatacaagttgaggagaacccttatcttccagtgggctgattccaggggccctcttgaaggggaggagttggaatactctcaggagatcacttgggatgataatactgagttcgtcggattgcaaataagagtgagtgcaaaacagtgtcatatccggggcagaatctggtgtatcaacatgaactcgagagcaggtcaactatggtctgacatgtctcttcagacacaaaggtccgaagaggacaaagattcctctctgcttctagaataa

SEQ ID NO: 11974 - DNA, 150 bp, unidentified
  misc_feature 1..150: note = Synthetic
  source 1..150: mol_type = other DNA
atgtataataagatcaagaactcacaaaatccgaatccaagtccgaatttaaattcgcctcctccagaaacaagaaataccaagtttgtaaataatctggaaaaggatcatattagttcattgtataatctagttaaatcttcagcataa

SEQ ID NO: 11975 - DNA, 198 bp, unidentified
  misc_feature 1..198: note = Synthetic
  source 1..198: mol_type = other DNA
ttgttgatcggtatttgtgtagcagttaccgtcgccatcctatactcgatgtataataagatcaagaactcacaaaatccgaatccaagtccgaatttaaattcgcctcctccagaaccaaaaaataccaagtttgtaaataatctggaaaaggatcatattagttcattgtataatctagttaaatcttctgtataa

SEQ ID NO: 11976 - DNA, 78 bp, unidentified; identical to SEQ ID NO: 2996
  source 1..78: mol_type = other DNA
  misc_feature 1..78: note = Synthetic

SEQ ID NO: 11977 - DNA, 6735 bp, unidentified
  misc_feature 1..6735: note = Synthetic
  source 1..6735: mol_type = other DNA
ataaaaaacttaggagcaaagcgtgctcgaaaaatggacactgaatctagcaatggcactgtatctgacatactctatcctgagtgtcaccttaactctcctatcgttaaaggtaaaatagcacaattacacacgattatgagtctacctcagccttacgatatggatgacgactcaatactagttatcactagacagaaaataaaactcaataaattggataaaagacaacgatctattagaagattaaaattaatattaactgagaaagtgaatgacttaggaaaatacacatttatcagatatccagaaatgtcaaaagaaatgttcaaattacatatacctggtattaacagtaaagtgactgaattattacttaaagcagatagaacatatagtcaaatgactgatggattaagagatctatggattaatgtgctatcgaaattagcctcaaaaaatgatggaagcaattatgatcttaatgaagaaattaataatatatcaaaagttcacacaacctataaatcagataaatggtataatccattcaaaacatggtttactatcaagtatgatatgagaagattacaaaaagctcgaaatgaggtcacttttaatatggggaaagattataacttgttagaagaccaaaagaatttcttattgatacatccagaattggttttaatattagataaacaaaactataatggttatctaattactcctgaattagtattgatgtattgtgacgtagtcgaaggccgatggaatataagtgcatgtgctaagttagatccaaaattacaatctatgtatcagaaaggtaataatctgtgggaagtgatagataaactgtttccaattatgggagaaaagacatttgatgtgatatcattattagaaccacttgcattatccctaattcaaactcatgatcctgttaaacaactaagaggagcttttttaaatcatgtgttatccgagatggaattgatatttgaatctagagaatcgattaaggaatttctgagtgtagattacattgataaaatcttagatatatttaataaatctacaatagatgaaatagcagagattttctctttttttagaacatttgggcatcctccattagaggctagtattgcagcagaaaaggttagaaaatatatgtatattgagaaacaattaaaatttgacactattaataaatgtcatgctatcttctgtacaataataattaacggatatagagagaggcatggtggacagtggcctcctgtgacattacctgatcatgcacacgaattcatcataaatgcttacggttcaaactctgcaatatcatatgaaaatgctgttgattattaccagagctttataggaataaaatttaataaatttatagagcctcagttagatgaggatttgacaatttatatgaaagataaagcattatctccaaaaaaatcaaactgggacacagtttatcctgcatctaatttactgtaccgtactaacgcatccaatgaatcacgaagattagttgaagtatttatagcagatagtaaatttgatcctcatcagatattggattatgtagaatctggggactggttagatgatccagaatttaatatttcttatagtcttaaagaaaaagagatcaaacaagaaggtagactctttgcaaaaatgacatacaaaatgagagctacacaagttttatcagagacgctacttgcaaataatataggaaaattctttcaagaaaatgggatggtgaagggagagattgaattacttaagagattaacgaccatatcaatatcaggagttccacggtataatgaagtgtacaataattctaaaagccatacagatgatcttaaaacctacaataaaataagtaatcttaatttgtcttctaatcagaaatcaaagaaatttgaattcaagtcaacggatatttacaatgatggatacgagactgtgagctgtttcctaacaacagatctcaaaaaatactgtcttaattggagatatgaatcaacagctctatttggagaaacttgcaaccaaatatttggattaaataaattgtttaattggttacaccctcgtcttgaaggaagtacaatctatgtaggtgatccttactgtcctccatcagataaagaacatatatcattagaggatcaccctgattctggattttacgttcataacccaagagggggtatagaaggattttgtcaaaaattatggacactcatatctataagtgcaatacatctagcagctgttagaataggcgtgagggtgactgcaatggttcaaggagacaatcaagctatagctgtaaccacaagagtacccaataattatgactacagagttaagaaggagatagtttataaagatgtggtgagattttttaattcattaagagaagtgatggatgatctaggtcatgaacttaaattaaatgaaacaattataagtagcaagatgttcatatatagcaaaagaatatattatgatgggagaattcttcctcaagctctgaaagcattatctagatgtgtcttctggtcagagacagtaatagacgaaacaagatcagcatcttcaaacttggcaacatcatttgcaaaagcaattgagaatggttattcacctgttctaggatatgcatgctcaatttttaagaatattcagcaactgtatattgcccttgggatgaatatcaatccaactataacacagaatatcaaagatcaatattttaggaatccaaattggatgcaatatgcctctttaatacctgctagtgttgggggattcaattacatggctatgtcaagatgttttgtaaggaatattggtgatccatcagttgccgcattagctgatattaaaagatttattaaggcgaatctattagaccgaagtgttctttataggattatgaatcaagaacctggtgagtcatcttttttggactgggcttcagacccatattcatgcaatttaccacaatctcaaaatataaccaccatgataaaaaatataacagcaaggaatgtactacaagattcaccaaatccattattatctggattattcacaaatacaatgatagaagaagatgaagaattagctgagttcctgatggacaggaaggtaattctccctagagttgcacatgatattctagataattctctcacaggaatcagaaatgctatagctggaatgttagatacgacaaaatccctaatccgggttggcataaatagaggaggactgacatatagtttgttgaggaaaatcagtaattacgatctagtacaatatgaaacactaagtaggactttgcgactaattgtaagcgataaaatcaggtatgaagatatgtgttcagtagaccttgccatagcattgcgacaaaagatgtggattcatttatcaggaggaaggatgataagtggactcgaaacacctgacccattagaattactatctggggtagtaataacaggatcagaacattgtaaaatatgttattcttcagatggcacaaacccatatacttggatgtatttaccgggtaatattaaaataggatcagcagaaacaggtatatcatcattaagagttccttattttggatcagtcactgatgaaagatctgaggcacaattaggatatatcaagaatcttagtaaacctgcaaaagctgcaataagaatagcaatgatatatacatgggcattcggtaatgatgagatatcttggatggaagcctcacaaatagcacaaacacgtgcaaatttcacactagatagtctcaaaattctaacaccggtagctacatcaacaaatttatcacacagattaaaggatactgcaactcagatgaaattctccagtacatcattgatcagagtcagcagattcataacaatgtccaatgataacatgtctatcaaggaagctaatgaaaccaaagataccaatcttatttatcaacaaataatgttaacaggattaagtgttttcgaatatttatttagattaaaagaaaccacaggacacaaccccatagttatgcatctgcacatagaggatgagtgctgtatcaaagaaagttttaatgatgagcatattaatccagagtctacattagaattaattagatatcctgaaagtaatgaatttatttatgataaagacccgctcaaagacgtggacttatcaaaacttatggttattaaagaccattcttatacaattgatatgaattattgggatgatactgacatcatacatgcaatttcaatatgtactgcaattacaatagcagatactatgtcacaattagatcgagataatttaaaagagataatagtcattgcaaatgatgatgatattaatagcttaatcactgaatttttgactcttgatatacttgtatttcttaagacatttggtggattattagtaaatcaatttgcatacactctttatagtttaaaaatagaaggtagggacctcatttgggattatataatgagaacactgagagatacttcccattcaatattaaaagtattatctaatgcattatctcatcctaaagtattcaagaggttctgggattgtggagtcttaaatcctatttatggtcctaatactgctagtcaagaccagataaaacttgccctctctatatgtgaatattcactagatctatttatgagagaatggttgaatggtgtatcacttgaaatatacatttgtgacagcgatatggaagttgcaaatgataggaaacaagcctttatttctagacacctttcatttgtttgttgtttagcagaaattgcatcttttggacctaacctgttaaacttaacatacttagaaagacttgatctattgaaacaatatcttgaattaaatattaaagaagaccctactcttaaatatgtacaaatatctggattattaattaaatcgttcccatcaactgtaacatacgtaagaaagactgcaatcaaatatttaaggattcgcggtattagtccacctgaggtaattgatgattgggatccgatagaagatgaaaatatgctggataacattgtcaaaactataaatgataactgtaataaagataataaagggaataaaattaacaatttctggggactagcacttaagaactatcaagtccttaaaatcagatctataacaagtgattctgataataatgatagactagatgctagtacaagtggtttgacacttcctcagggagggaattatctatcgcatcaattgagattattcggaatcaacagcactagttgtctgaaagctcttgagttatcacaaattttaatgaaggaagttaataaggacaaggacaggctcttcctgggagaaggagcaggagctatgctagcatgttatgatgccacattagggcctgcagttaattattataattcaggtttgaatataacagatgtaattggtcaacgagaattgaaaatattcccttcagaggtatcattagtaggtaaaaaattaggaaatgtgacacagattcttaacagggtaaaagtactgttcaatgggaatccaaattcaacatggataggaaatatggaatgtgagagcttaatatggagtgaattaaatgataagtctattggattagtacattgtgatatggaaggagctatcggtaaatcagaagaaactgttctacatgaacactatagtgttataagaattacatacttgattggggatgatgatgttgttttagtttccaaaattatacctacaatcactccgaattggtctagaatactttatctatataaattatattggaaagatgtaagtataatatcacttaaaacttctaatcctgcatcaacagaattatatctaatttcgaaagatgcatattgtactataatggaacctagtgaagttgttttatcaaaacttaaaagattgtcactcttggaagagaataatctattaaaatggatcattttatcaaagaagaggaataatgaatggttacatcatgaaatcaaagaaggggaaagagattatggagttatgagaccatatcatatggcactacaaatctttggatttcaaatcaatttaaatcatctggcgaaagaatttttatcaactccagatctgactaatatcaacaatataatccaaagttttcagagaacaatcaaggatgttttgtttgagtggattaatataactcatgatgataggagacataaattaggtgggagatataacatattcccactgaaaaataagggaaagttaagactgctatcgagaagactagtattaagttggatttcattatcattatcgactcgattacttacaggtcgctttcctgatgaaaaatttgaacatagagcacagactggatatgtgtcattagctgatactgatttagaatcattaaagttattgtcgaaaaacatcattaagaattacagagagtgtatagggtcaatatcatattggtttctaaccaaagaagttaaaatacttatgaaattgattggtggtgctaaattattaggaattcccagacaatataaagaacccgaagaacagttattagaaaactacaatcaacatgatgaatttgatatcgattaa

SEQ ID NO: 11978 - DNA, 54 bp, unidentified; identical to SEQ ID NO: 3000
  source 1..54: mol_type = other DNA
  misc_feature 1..54: note = Synthetic

SEQ ID NO: 11979 - DNA, 2058 bp, unidentified
  misc_feature 1..2058: note = Synthetic
  source 1..2058: mol_type = other DNA
atgtcggggctgctggcggcggcgtacagccaggtgtacgccctggcggttgagctgagcgtgtgcacccggctggacccccggagtctggacgtggctgcggtggtgcgcaacgccggcctgctggccgagctggaggccatcctccttccccgtttgagacggcagaatgaccgtgcatgcagcgccctgtccctggagctggtgcacctgctagagaactcgagagaggcctctgccgcgctgctcgcccctggtagaaagggtacccgggtcccgcctctccgtaccccctcagtcgcgtactctgtggagttttacggggggcataaagtcgatgtaagtttgtgcctaataaatgacatagagattttaatgaagagaatcaatagcgtgttttattgcatgtctcacaccatggggctggagagcctggaacgggccctggatctgctgggccgctttcggggcgtaagtcccatcccagacccgcgcctctacatcacctctgtgccctgctggcgctgtgtgggcgagctgatggttctgcccaaccacggcaacccttccacggcagaggggacccacgtctcctgtaaccacctggcggtgccggtgaatccggagccggtctcgggactgtttgagaatgaagtccgccaggcggggctcgggcacctgttggaggctgaggagaaggcgaggccgggcggcccagaggagggcgcggtcccgggcccggggcggccggaggcagagggggcgaccagagcgctggacacctacaacgtcttctcgacagtgcccccggaggtggcggagctctcggagctcctctattggaactctggcggccatgctatcggtgcaacggggcagggggagggtggcggccattcccgcctctctgccctgtttgcccgggagcgtcgcctggccctggtgcggggggcctgcgaggaggcgctggcgggggcaaggctgactcacctgtttgacgccgtggctcccggggccacggagcggctcttctgcggcggggtctacagctcctcgggcgacgcggtggaggcgctgaaggcggactgcgccgccgccttcacggcgcacccccagtaccgggccatcctgcaaaagaggaacgagctgtacacgcggctcaaccgagccatgcagcggttgggccgaggcgaggaggaggcgtcccgggagagcccggaggtgccccggccggctggggcacgagagcccggcccgtccggcgccctctcggacgcgctcaagcgcaaggagcagtacctgcgccaggtggccaccgagggtctggccaagctgcagtcctgcctggcgcaacagagcgagaccctgaccgagaccctgtgcctgcgcgtctggggggacgtggtctactgggagctggcccgcatgcgcaaccacttcctctacagacgggccttcgtctcgggtccctgggaggacaggcgcgccggcgagggtgccgcctttgagaattccaagtacatcaaaacacacctgtttacccagaccctgagctcggagcacctgcacgcgctgacgcacagcctgtacaccttcatcacggggcccctggcggaggagagcgggctctttcccccacccagcaacgtggccctggctcgctgctgtgacgccgcaggtacgctgccccaccagaaggcattcctgacttccctgatatggccaggcatcgagccgagcgactggatagagacctccttcaacagcttctacagcgtacccgggggctcactggcatctagccagcaaattctgtgccgggcgctgcgcgaggccgtcctaaccgtgtccctctacaacaagacctgggggcggtccttgatcctgcgccgggcggacgcggtcagccccggccaggccctgcccccggatgggctttacctcacgtacgactctgaccgccccctaattcttctgtataagggcagggggtgggtatttaaggatctatatgcccttctctacctgcacctccaaatgagagatgactcggcgtag

SEQ ID NO: 11980 - DNA, 2058 bp, unidentified
  misc_feature 1..2058: note = Synthetic
  source 1..2058: mol_type = other DNA
atgtcggggctgctggcggcggcgtacagccaggtgtacgccctggcggttgagctgagcgtgtgcgcccggctggaccccaggagtctggacgtggctgcggtggtgcgcaacgccggcctgctggccgagctggaggccatcctccttccccgtttgagacggcagaatgaccgtgcatgcagcgccctgtccctggagctggtgcacctgctagagaactcgagagaggcctctgccgcgctgctcgcccctggtagaaagggtacccgggtcccgcctctccgcaccccctcagtcgcgtactctgtggagttttacggggggcataaagtcgatgtaagtttgtgcctaataaatgacatagagattttaatgaagagaatcaatagcgtgttttattgcatgtctcacaccatggggctggagagcctggaacgggccctggatctgctgggccgctttcggggcgtaagtcccatcccagacccgcgcctctacatcacctctgtgccctgctggcgctgtgtgggcgagctgatggttctgcccaaccacggcaacccttccacggcagaggggacccacgtctcctgtaaccacctggcggtgccggtgaatccggagccggtctcgggactgtttgagaatgaagtccggcaggctgggctcgggcacctgttggaggctgaggagaaggcgaggccgggcggcccagaggagggcgcggtcccgggcccggggcggccggaggcagagggggcgaccagagcgctggacacctacaacgtcttctcgacagtgcccccggaggtggcggaactctcggagctcctctattggaactctggcggccatgctatcggtgcaacggggcagggggagggtggcggacattcccgcctctctgccctgtttgcccgggagcgtcgcctggccctggtgcggcgggcctgcgaggaggcgctggcgggggcaaggctgactcacctgtttgatgccgtggctcccggggccacagagcggctcttctgcggcggggtctacagctcctcgggcgacgcggtggaggcgctgaaggcggactgcgccgccgccttcacggcgcacccccagtaccgggccatcctgcaaaagaggaacgagctctacacgcggctcaaccgagccatgcagcggttgggccgaggcgaggaggaggcgtcccgggagagcccggaggtgccccggccggctggggcacgagagcccggcccgtccggcgccctctcggacgcgctcaagcgcaaggagcagtacctgcgccaggtggccaccgagggtctggccaagctgcagtcctgcctggcgcaacagagcgagaccctgaccgagaccctgtgcctgcgcgtctggggggacgtggtctactgggagctggcccgcatgcgcaaccacttcctctacagacgggccttcgtctcgggtccctgggaggacaggcgcgccggcgagggtgccgcctttgagaattccaagtacatcaaaacacacctgtttacccagaccctgagctcggagcacctgcacgcgctgacgcacagcctgtacaccttcatcacggggcccctggcggaggagagcgggctctttcccccacccagcaacgtggccctggctcgctgctgtgacgccgcaggtacgctgcctcaccagaaggcgttcctgacttccctgatatggccaggcatcgagccgagcgactggatagagacctccttcaacagcttctacagcgtacccgggggctcactggcatctagccagcaaattctgtgccgggcgctgcgcgaggccgtcctaaccgtgtccctctacaacaagacctgggggcggtccttgatcctgcgccgggcggacgcggtcagccccggccaggccctgcccccggatgggctttacctcacgtacgactctgaccggcccctaattcttctgtataagggcagggggtgggtatttaaggatctatatgcccttctctacctgcacctccaaatgagagatgactcggcgtag

SEQ ID NO: 11981 - DNA, 2271 bp, unidentified
  source 1..2271: mol_type = other DNA
  misc_feature 1..2271: note = Synthetic
atggctaatgccagtaaaggtgttacagtcaacatcaacaatgcaaaacggaagcctcgcttcaccaataaccagcgagctagatctactaggccaaattttacaccagcacccaaatttaggaaacgtcggtttattcctaataggaatcgccgtcgtaggcaaaatactagtacaactgggcctaaacctgcggtgtcgcagacaattacagcaacactcggcaccgttggatcaaatttgagtgatgttgttgaaactgaatgtgcagtctttttgaatcccattatagcaaaagattctggtgccagtgcaacttttgggccccttcaatctctgggtgcacagtatgcactatggaggctcaagtggctggaagtcagactccagcctttggtgggtaactcagctgtgagtggcactgtagctcgtgttagtcttaacatgactactggtcccactctcaactcatggtctggtcttggagcccgaattcacaaggatgttagagttggttcaaatcttgtttggcgcattaaacagcgtctagtgagtggaccttgtgaaacttggtggaaaactaatacagctgaggacccatcattatctcttggacctgcactggaagtacataccataggtaagactatgagtacttacaaaaatgaagtgttttccagtggactatttcttcttgagataactggccactgggaatttgcaaattatgctgcttctccagcccttgctacactcacacaacataaggatgacagtgagactacaaaaacacttgcaatcagttctgatggtgccaatgaaccagttgagatgctaatacctgtgaatgaatggaatatgaaggcacagtatggtggaaatggcacgcttggtgaagcaatttaccaagttgttgatactagtgtcacagttgtgacagacctctttccaccaccattttcatggattggtaaagcttcatggtggtttatcagaaaaatgattggcaaaacaaaacaattccaggttgttgttaatggtcaaaaccaaacacttacagcggatgtctatcgtgtttacacttcagcttctgctgctagagatgataaaccagcaatttccagcaaggcacatgaagcaaagcatctaactggtgcagtggttatcacacaaatttctacagacaacattctttcagaaaccacatatactggcccaaggtctattgtcacaccagagactcctattggtccgtctagctatccaatgacaccaagttctttggtacttatggctggatattttagtggaccagaaattagtgataattttggcaagtacatgcccttgcttttccaacagaatacctctaaggttacatttaggagtggtagtcataccataaaaattgtaagcatggttcttgtggaccggcttatgtggttggataagcattttaatcagtacactaatgaaccagatggagtctttggagacgttggcaacgttttcgttgacaatgataatgtagccaaggttattactatgagtgggtcatcagcaccagctaatagaggtgccactttaatgttatgcagagccacaaaaaacatccagacttttaattttgcagcaacagtatatataccagcctataaagttaaagatggtgcaggtggcaaagatgttgttctgaatgtggcccagtgggaagcaaataaaactttgacatacccagctatacctaaggacacgtattttatggttgtaacaatgggaggtgctagttttaccattcaaaggtatgtggtatacaatgagggcattggtgacggcctagaattaccagcattctggggcaaatatttatcccagctatatggctttagctggagttcaccaacctatgcatgtgtaacttgggagcccatctatgctgaagaaggtataccacatagaagtgcattaaatgatgatgaaataagcagtgatggtgacactgatgatgacactgacacagaagacgaagatgagttcttcggtgaggatcccattgctgcattgcacgcccttgatgaaaagagaccagctaggcgtgcaatgtttgatgcacttgttaaaactggtgtcagtgttgaagaagcatctaggtgtgtccttagagcatgtcctacaaaacttcagattaagaaaaggaacctttatgaaagcctcctgtgcgatggcttatcacctgagtcgtcgtacgaggaagcatacaattgtaaataa

SEQ ID NO: 11982 - DNA, 39 bp, unidentified; identical to SEQ ID NO: 3009
  misc_feature 1..39: note = Synthetic
  source 1..39: mol_type = other DNA

SEQ ID NO: 11983 - DNA, 42 bp, unidentified; identical to SEQ ID NO: 3010
  source 1..42: mol_type = other DNA
  misc_feature 1..42: note = Synthetic

SEQ ID NO: 11984 - DNA, 78 bp, unidentified; identical to SEQ ID NO: 2996
  misc_feature 1..78: note = Synthetic
  source 1..78: mol_type = other DNA

SEQ ID NO: 11985 - DNA, 819 bp, unidentified
  misc_feature 1..819: note = Synthetic
  source 1..819: mol_type = other DNA
atggcactggcacctatccctgaatacaacttggaaactggaattccaggggtcccggactgggtattcaacttcattgcatcccacctgcccgagttgcctagcctgcaggacgtgttcaatagaattgcctatggaatctggacatcatattacaatacggggagaacagtagttaatagagcagttagtgaagaattacaaagactactaggagatttagaatatggatttagaactgcacttgccaccattggggaatctgacccagtaaatgctatagttgaacaagtaagaagctttgttagtggaggaagagaaagagaactgttacaaatagctgcaggtcaacctgtagacatttctgaaggtgtatcaagaggcacagctactatttcaaatgctgtagaagctgtaagagatgcaactcaaagactatcacaagcaacctacaactttgtttatgatgcttctacccttccaagggatggctttaatgcacttagtgatggagttcacagactaggccagtggatttcaatgcctggggctacagggggtactccccattatgcagcccctgactggattttatatgtacttgaagagctaaacagtgacatttctaaaattcctacacagggaattaaaagaaaactacaacaaaatggcctgcacagcaaagccagcctgcacagcaaaaccaggaaggtcaccaagaagtcaacccacaagagtgcaaagccttccaaaacaagtcagaaaaggaggggtagacgtgctggccgccgtaccactgtcagaagaaacagagtttaa

SEQ ID NO: 11986 - DNA, 90 bp, unidentified
  source 1..90: mol_type = other DNA
  misc_feature 1..90: note = Synthetic
acgcactcgctgctctacgaaagcatgacctccgagtccaagagcatcgagaacgagagccagcgcaagctcaagctgctgctgcagtag

SEQ ID NO: 11987 - DNA, 48 bp, unidentified; identical to SEQ ID NO: 3016
  misc_feature 1..48: note = Synthetic
  source 1..48: mol_type = other DNA

SEQ ID NO: 11988 - DNA, 138 bp, unidentified
  source 1..138: mol_type = other DNA
  misc_feature 1..138: note = Synthetic
ctgcccttcctcccaactttcgtacgggatgtgccaacgggcggcaaactttctccacgtcctaaagggtatatcggtgttcacctttttaccctgacccacaatcttcatcttgcagatgaaaagaaccagaattga

SEQ ID NO: 11989 - DNA, 18 bp, unidentified
  misc_feature 1..18: note = Synthetic
  source 1..18: mol_type = other DNA
ctgtgtcgggtggaatga

SEQ ID NO: 11990 - DNA, 372 bp, unidentified
  source 1..372: mol_type = other DNA
  misc_feature 1..372: note = Synthetic
atgaataacatgtcttctgctgcgcccatgggttcgcgaccatgcgccctcggcctattttgctgttgctcctcatgtttctgcctatgctgcccgcgccaccgcccggtcagccgtctggccgccgccgtgggcggcgcagcggcggttccggcggtggtttctggggtgaccgggctgattctcagcccttcgcaatcccctatattcatccaaccaaccccttcgcccccgatgtcaccgctgcggccggggctggacctcgtgttcgccaacccgcccgaccactcggctccgcttggcgtgaccaggcccagcgccccgccgctgcctcacgtcgtagacctaccacagctggggccgcgccgctaa

SEQ ID NO: 11991 - DNA, 21 bp, unidentified
  source 1..21: mol_type = other DNA
  misc_feature 1..21: note = Synthetic
atgaaattatcgattgtatag

SEQ ID NO: 11992 - DNA, 21 bp, unidentified
  misc_feature 1..21: note = Synthetic
  source 1..21: mol_type = other DNA
atgaagaagtatctgaattaa

SEQ ID NO: 11993 - DNA, 36 bp, unidentified
  misc_feature 1..36: note = Synthetic
  source 1..36: mol_type = other DNA
atggggcagtatatacattttcaaataataaactaa

SEQ ID NO: 11994 - DNA, 75 bp, unidentified; identical to SEQ ID NO: 3029
  source 1..75: mol_type = other DNA
  misc_feature 1..75: note = Synthetic

SEQ ID NO: 11995 - DNA, 33 bp, unidentified; identical to SEQ ID NO: 3030
  source 1..33: mol_type = other DNA
  misc_feature 1..33: note = Synthetic

SEQ ID NO: 11996 - DNA, 45 bp, unidentified; identical to SEQ ID NO: 3031
  misc_feature 1..45: note = Synthetic
  source 1..45: mol_type = other DNA

SEQ ID NO: 11997 - DNA, 897 bp, unidentified
  misc_feature 1..897: note = Synthetic
  source 1..897: mol_type = other DNA
atgagcaagatttttatcaatcctagtgacattcgatcaggacttgcagatcttgagatggctgaagagaccgtcgaattggtcaaccggaacatggaagacagtcaagctcatctccaaggggtccccatagatgtggagaccctccctgaggatattcagagactccatatcacagatcctcaagccagcctccgacaggatatggttgatgagcaaaaacaccaggaggatgaggacttttaccttacaggaagagaaaaccctctttctccgtttcagacacatcttgatgctataggacttcgcattgtgaggaagatgaagacaggggaaggttttttcaagatatggtcacaggcagtggaggacatcgtctcttatgtagcccttaacttctccattccagtgaacaagctgtttgaagacaagtccacccagactgttactgaaaagtctcaacaggcctctgcctcgtcggctccaaatcggcatgagaaatcatctcagaacgccagggtcaactccaaggatgcatcaggtcctgcagctctagactggactgccagcaatgaagcagatgacgagtcagtcgaagctgagatagctcatcagattgcagaaagcttctctaaaaagtacaagttcccgtctagatcctcagggattttcttatggaactttgaacaattgaaaatgaacttggatgaaatagttcgggaggtcaaggaaattcccggagtgatcaagatggcgaaagacgggatgaagctgcctctcaggtgtatgctgggaggagtggcttctacccactctcgaaggttccagattctcgtgaatccggaaaaacttggaaaagttatgcaggaggatcttgacaaatacctgacctattag

SEQ ID NO: 11998 - DNA, 39 bp, unidentified; identical to SEQ ID NO: 3037
  misc_feature 1..39: note = Synthetic
  source 1..39: mol_type = other DNA

SEQ ID NO: 11999 - DNA, 60 bp, unidentified; identical to SEQ ID NO: 3038
  source 1..60: mol_type = other DNA
  misc_feature 1..60: note = Synthetic

SEQ ID NO: 12000 - DNA, 1062 bp, unidentified
  misc_feature 1..1062: note = Synthetic
  source 1..1062: mol_type = other DNA
atctttaaagaactaatcttaaaacacacggatgaaaatgttttgatttctccagtttccattttatctactttatctattctgaatcatggagcagctggttctacggctgaacaactatcaaaatatatagagaataagaatacaccaaaggatgacaaggatgacaataatgacatggacgtagatattccatattgtgcgacactagctaccgcaaataaaatatactgtagcgatagtatcgagttccacgcctccttcctacaaaaaataaaagacgattttcaaactgtaaactttaataatgctaaccaaacaaaggaactaatcaatgaatgggttaagacgatgacaaatggtaaaattaattccttattgactactccactgcccattaatactcgcatgacagttgttagcgccgtccattttaaagcaatgtggaaatatccattttctaaacatcttacatatacagacaagttttatatttctaagaatatagttaccagtgttgatatgatggtgagtactaaaaatgacttacaatatgtacatattaatgaattattcggaggattctctattatcgatattccatacgagggaaactctagtatggtaattatactaccagacgacatagaaggtctatataacatagaaaaacatataactgatgaaaattttaaaaaatggtgtagtaagttatccactaaaagtatagacttgtatatgccaaagtttaaagtggaaatgacagaaccgtataatctggtacctattctagaaaatttaggacttactaatatattcggatattattcagattttagcaagatgtgtaatgaaactatcactgtagaaaaatttctacacaagacgtttatagatgttaatgaggagtatacagaagcatcggctattacaggagtgtttatgactaacttttcgatggtatatcgtacgaaggtctacataaaccatccattcatgtacatgattaaagacaacacaggacgtatactttttatagggaaatactgttatccgcaataa

SEQ ID NO: 12001 - DNA, 21 bp, unidentified
  source 1..21: mol_type = other DNA
  misc_feature 1..21: note = Synthetic
atggacaaaaggaaaatataa

SEQ ID NO: 12002 - DNA, 666 bp, unidentified
  misc_feature 1..666: note = Synthetic
  source 1..666: mol_type = other DNA
acggaaggacaaatccagaatccaaccacaactcaatcaaccaaagattcatggaagacaatgttcaaaacaatcaaatcatggattcttgggaagagggatcaggagataaatcatctgacatctcatcggccctcgacatcattgaattcatactcagcaccgactcccaagagaacacggcagacagcaatgaaatcaacacaggaaccacaagacttagcacgacaatctaccaacctgaatccaaaacaacagaaacaagcaaggaaaatagtggaccagctaacaaaaatcgacagtttggggcatcacacgaacgtgccacagagacaaaagatagaaatgttaatcaggagactgtacagggaggatataggagaggaagcagcccagatagtagaactgagactatggtcactcgaagaatctccagaagcagcccagatcctaacaatggaacccaaatccaggaagatattgattacaatgaagttggagagatggataaggactctactaagagggaaatgcgacaatttaaagatgttccagtcaaggtatcaggaagtgatgccattcctccaacaaaacaagatggagacggtgatgatggaagaggcctggaatctatcagtacatttgattcaggatataccagtatag

SEQ ID NO: 12003 - DNA, 33 bp, unidentified; identical to SEQ ID NO: 3030
  source 1..33: mol_type = other DNA
  misc_feature 1..33: note = Synthetic

SEQ ID NO: 12004 - DNA, 33 bp, unidentified; identical to SEQ ID NO: 3030
  source 1..33: mol_type = other DNA
  misc_feature 1..33: note = Synthetic

SEQ ID NO: 12005 - DNA, 33 bp, unidentified; identical to SEQ ID NO: 3030
  source 1..33: mol_type = other DNA
  misc_feature 1..33: note = Synthetic

SEQ ID NO: 12006 - DNA, 297 bp, unidentified
  misc_feature 1..297: note = Synthetic
  source 1..297: mol_type = other DNA
atcaccaaatcagcagcctgctacagcctgtacaacattataaaacagctccaggaaaatgatgtgaaaacatccagagattcaatgcttgaagaccctaaacatgtggcgctacacaatctgatactatcttatgttgatatgagtaaaaatccggcaagtttgatcaacagcctcaagcggcttcccagagaaaaactcaaaaagcttgccaagatcatactacagctatctgcagggccagagagtgacaatgccagtggtaataccctgcagaagggtgacagcaataattaa

SEQ ID NO: 12007 - DNA, 639 bp, unidentified
  source 1..639: mol_type = other DNA
  misc_feature 1..639: note = Synthetic
atggaaaaaacaggcaacaccactgacgcaatgaattttttccgaaagatagtgaaaagttgcaaagatgaggaggatcaaaagccagctctgatgtcggctccaccagatgatgacgatctgtggcttcccccgccggagtatgtacctttgaccgagatcacagctaaaaagaatatgaggaacttttgtgtcaatggcgagattaagatttgcagccccaacgggtattcctttaggatcctgagacatattctgaggtcttttgatggagtctattctggaaatcggagaatgataggacttgtcaaggttgtgatcggtctagccctctcaggtgctccggtcccggaggggatgaactgggtctacaagataagacgcacccttgttttccaatgggcagagtctcacggcccactagatggagaagagctagaatactcacaggagataacctgggatgatgattcagagttcataggtttgcaaataaggataagtgcaaggcaatgtcatatccaaggacggatctggtgcatcaacatgaactccagggcatgtcagttatggtcagatatgtctctcaagacccagcaggctgacgaggacaggaacacctctttgttgctagaatga

SEQ ID NO: 12008 - DNA, 15 bp, unidentified
  misc_feature 1..15: note = Synthetic
  source 1..15: mol_type = other DNA
ctggagctaaagtaa

SEQ ID NO: 12009 - DNA, 180 bp, unidentified; identical to SEQ ID NO: 3051
  source 1..180: mol_type = other DNA
  misc_feature 1..180: note = Synthetic

SEQ ID NO: 12010 - DNA, 54 bp, unidentified; identical to SEQ ID NO: 3052
  misc_feature 1..54: note = Synthetic
  source 1..54: mol_type = other DNA

SEQ ID NO: 12011 - DNA, 54 bp, unidentified; identical to SEQ ID NO: 3052
  source 1..54: mol_type = other DNA
  misc_feature 1..54: note = Synthetic

SEQ ID NO: 12012 - DNA, 909 bp, unidentified
  misc_feature 1..909: note = Synthetic
  source 1..909: mol_type = other DNA
atgacatcgagaaggccccttaaagatcacctgttcaaccatctgtttaggtatcattacccgtcctgggatcagatacttcaggagttagataccctgtccgtcgccaccctcaatccagactgccacgtacccgctctaaacgttgagaagaccctataccttgcaaagaccattcagatattggtccagcaccgacaaagcgagccgtacctggttcccgcggctagggcgaatttggcttattccctgcagcagttgtacaaacttggcaacgacaagataaggggtgttattaacggcatgctgccactagtggacgctggctgcataggttttgagagagagctcattaagggactgcccagagttttgactctccaatacccccacacggcgcccctggaatcagaacccccgaccgcggactgcacagagtggtgcctctcccattttgtgggagcgtccggccgtctccgctccgaagttagggatatcctaacaacgcacaacgggacgtgtgctccctcctttcagtggatggccagcgtggtaaaaaagtttttcttggtagaaactgtcatttacgaggactttcaggatacagattttaacgtgcagctgaacctttgttttttttggacagctgtcgttcagatgtaccagcggtgcatttacgagcagaagcttgtccacataatcagcacgtccctaactctcctgaaaagcaccgcccgatccttttttgcctggtacgacctgtacagacccaacctaggttccgcggctttggtcaagtacaccgaacacttaataagagccctgacacccgactgttcggacgtagagcttggcgaactctgctcccacctacaccattgtaaacacgcattgttcagtatacaataa

SEQ ID NO: 12013 - DNA, 909 bp, unidentified; identical to SEQ ID NO: 12012
  source 1..909: mol_type = other DNA
  misc_feature 1..909: note = Synthetic

SEQ ID NO: 12014 - DNA, 747 bp, unidentified
  misc_feature 1..747: note = Synthetic
  source 1..747: mol_type = other DNA
atgactcatttagtgcttctattgtgctgctgtgtggggtctgtttgtgcatttttctcagatctggttaaatttgaaaatgtcaccgcccatgcaggtgctagagtgaatctcacctgcagcgttcctagcaatgagtcggtctctcggatcgagttgggccggggatacactcccggggatggacaactgcccttggccgtagctacttccaacaacggaactcatataactaacgggggttacaattatagccttaccctagaatgggtaaatgactccaacacctccgtctctctgataatccccaatgtgacccttgcgcatgcaggttactacacgtgcaatgtgacactgagaaattgcagtgtggcctccggggtccactgcaattactctgcaggggaagaagacgaccaataccatgccaaccggaccctcactcagcgtatgcatcttactgttatcccagccactaccatagcccccaccacattagtctcccacaccacaagcaccagtcacaggccccataggcggcctgtttctaaacgtcccacgcataagccagtgaccctgggcccttttccaatcgatccctggcgccctaagaccacctgggtgcactgggccctgctcctaatcacttgtgctgtggtggctccggtgctcctcatcattatcatctcctgtctggggtggctggcgggctgggggaggcggcgcaagggctggatacccctgtga

SEQ ID NO: 12015 - DNA, 1662 bp, unidentified
  source 1..1662: mol_type = other DNA
  misc_feature 1..1662: note = Synthetic
atgagcctcctaagccccgggctcagcggctcggtctcacacacgtattttccgagcatggcacagggcctgtacgtcggagggtttgtagatgttgtgtcctgccccaagctggagcaagagctctatctcgatccggatcaggtgacggattatctcccagtcacagaaccccttccaataacaatcgaacacctaccagagacagaagtgggctggacactgggtctatttcaagtgtcccacggtattttctgcaccggagccatcacgtcgccagccttcctagagctggcatccaggctggcggacacctcccacgtggccagagcccccgtgaaaaatctccctaaggaaccactgttggagatactccacacgtggctcccggggctgtctttatcgtctatacatccccgcgagttatcccagactcccagcggtcccgtgtttcaacacgtatcactatgcgccctggggcgccgacgcggcacagtggccgtgtacggacacgacgccgagtgggtggtttccagattctcatcagtatctaagtcggagcgcgcccacatcctccagcacgtaagtagctgcaggctggaggacctttccacaccaaatttcgtcagtcccctggagaccttaatggcaaaagctatagatgccagcttcatacgggaccgcctcgacctattgaaaactgacagaggtgtggccagcatattgagcccggcgtatttaaaggccagccaattcccggtcggcatccaagccgtcacaccacccagaccagccatgaacagctctggtcaagaggatatcatatccatccccaaatccgccttcctgagcatgctacaaagcagcatcgatggaatgaagaccacagcggcaaaaatgtcacatacactttcagggccaggcctaatggggtgtgggggccagatgttccccaccgaccatcacctaccttcgtatgtttcaaacccagcgccaccatacggctacgcttacaagaacccatacgatccatggtattactcgccacagctgcctggatataggacggggaagcgcaagcgcggcgcagaggacgacgaaggacacctctttccaggagaggagccggcgtatcacaaggatatcttgtccatgtcaaagaacatagcggaaatacagtctgaactcaaagagatgaaactgaacggttggcacgcagggccaccgccgtcctcctctgcagcagcagccgcagtagatccacactacaggccccacgccaattcagcggccccgtgtcaattcccgacaatgaaggagcacggaggaacctacgtacacccacccatttacgtgcaggcgccacacggtcagttccagcaagcggcgcccatcctttttgctcagccacatgtgagccacccgccagtctctacaggactcgcggtagttggcgcaccacccgctgaacccacccccgcctccagcacgcagagcatccaacaacaggcaccggagaccacgcatacaccatgcgcggcggtggagaaagacgctcctacgccgaaccctacatcgaaccgcgttgaagccagcagtcgctctagtccaaaatctaaaattcgcaagatgttctgcgaggagctcctgaacaagcagtag

SEQ ID NO: 12016 - DNA, 2034 bp, unidentified
  misc_feature 1..2034: note = Synthetic
  source 1..2034: mol_type = other DNA
atggggtcaggatatcaacttctccaattgcctcgggaacgttttcgtaaaacttcgttcttagtatgggtaatcatcctcttccagcgagcaatctccatgccgcttggtatagtgacaaatagcactctcaaagcaacagaaattgatcaattggtttgtcgggacaaactgtcatcaaccagtcagctcaagtctgtggggctgaatctggaaggaaatggaattgcaaccgatgtcccatcagcaacaaaacgctggggatttcgttcaggtgtgcctcccaaggtggtcagctatgaagccggagaatgggcagaaaattgctacaatctggagatcaaaaagtcagacggaagtgaatgcctccctctccctcccgacggtgtacgaggattccctagatgtcgctatgtccacaaagttcaaggaacaggtccttgtcctggtgacttagctttccataaaaatggggcttttttcttgtatgatagattggcctcaactgtcatctaccgagggacaacttttgctgaaggtgtcgtagcttttttaattctgtcagagcccaagaagcatttttggaaggctacaccagctcatgaaccggtgaacacaacagatgattccacaagctactacatgaccctgacactcagctacgagatgtcaaattttgggggcaatgaaagcaacaccctttttaaggtagacaaccacacatatgtgcaactagatcgtccacacactccgcagttccttgttcagctcaatgaaacacttcgaagaaataatcgccttagcaacagtacagggagattgacttggacattggatcctaaaattgaaccagatgttggtgagtgggccttctgggaaactaaaaaaaacttttcccaacaacttcatggagaaaacttgcatttccaaattccatcaacccacaccaacaactcctcagatcagagcccggcgggaactgtccaaggaaaaattagctaccacccacccgccaacaactccgagctggttccaacggattcccctccagtggtttcagtgctcactgcaggacggacagaggaaatgtcgacccaaggtctaaccaacggagagacaatcacaggtttcaccgcgaacccaatgacaaccaccattgccccaagtccaaccatgacaagcgaggttgataacaatgtaccaagtgaacagccgaacaacacagcatccattgaagactcccccccatcggcaagcaacgagacaatttaccactccgagatggatccgatccaaggctcgaacaactccgcccagagcccacagaccaagaccacgccagcacccacaacatccccgatgacccaggacccgcaagagacggccaacagcagcaaaccaggaaccagcccaggaagcgcagccggaccaagtcagcccggactcactataaatacagtaagtaaggtagctgattcactgagtcccaccaggaaacaaaagcgatcggttcgacaaaacaccgctaataaatgtaacccagatctttactattggacagctgttgatgagggggcagcagtaggattggcatggattccatatttcggacctgcagcagaaggcatctacattgagggtgtaatgcataatcagaatgggcttatttgcgggctacgtcagctagccaatgaaactacccaggctcttcaattatttctgcgggccacaacagaactgaggacttactcacttcttaacagaaaagctattgattttcttcttcaacgatggggaggtacctgtcgaatcctaggaccatcttgttgcattgagccacatgattggacaaaaaatattactgatgaaattaaccaaattaaacatgactttattgacaatcccctaccagaccacggagatgatcttaatctatggacaggttggagacaatggatcccggctggaattgggattattggagttataattgctataatagccctactttgtatatgtaagattttgtgttga

SEQ ID NO: 12017 - DNA, 1104 bp, unidentified
  misc_feature 1..1104: note = Synthetic
  source 1..1104: mol_type = other DNA
atggggtcaggatatcaacttctccaattgcctcgggaacgttttcgtaaaacttcgttcttagtatgggtaatcatcctcttccagcgagcaatctccatgccgcttggtatagtgacaaatagcactctcaaagcaacagaaattgatcaattggtttgtcgggacaaactgtcatcaaccagtcagctcaagtctgtggggctgaatctggaaggaaatggaattgcaaccgatgtcccatcagcaacaaaacgctggggatttcgttcaggtgtgcctcccaaggtggtcagctatgaagccggagaatgggcagaaaattgctacaatctggagatcaaaaagtcagacggaagtgaatgcctccctctccctcccgacggtgtacgaggattccctagatgtcgctatgtccacaaagttcaaggaacaggtccttgtcctggtgacttagctttccataaaaatggggcttttttcttgtatgatagattggcctcaactgtcatctaccgagggacaacttttgctgaaggtgtcgtagcttttttaattctgtcagagcccaagaagcatttttggaaggctacaccagctcatgaaccggtgaacacaacagatgattccacaagctactacatgaccctgacactcagctacgagatgtcaaattttgggggcaatgaaagcaacaccctttttaaggtagacaaccacacatatgtgcaactagatcgtccacacactccgcagttccttgttcagctcaatgaaacacttcgaagaaataatcgccttagcaacagtacagggagattgacttggacattggatcctaaaattgaaccagatgttggtgagtgggccttctgggaaactaaaaaaacttttcccaacaacttcatggagaaaacttgcatttccaaattccatcaacccacaccaacaactcctcagatcagagcccggcgggaactgtccaaggaaaaattagctaccacccacccgccaacaactccgagctggttccaacggattcccctccagtggtttcagtgctcactgcaggacggacagaggaaatgtcgacccaaggtctaa

SEQ ID NO: 12018 - DNA, 996 bp, unidentified
  misc_feature 1..996: note = Synthetic
  source 1..996: mol_type = other DNA
atggggtcaggatatcaacttctccaattgcctcgggaacgttttcgtaaaacttcgttcttagtatgggtaatcatcctcttccagcgagcaatctccatgccgcttggtatagtgacaaatagcactctcaaagcaacagaaattgatcaattggtttgtcgggacaaactgtcatcaaccagtcagctcaagtctgtggggctgaatctggaaggaaatggaattgcaaccgatgtcccatcagcaacaaaacgctggggatttcgttcaggtgtgcctcccaaggtggtcagctatgaagccggagaatgggcagaaaattgctacaatctggagatcaaaaagtcagacggaagtgaatgcctccctctccctcccgacggtgtacgaggattccctagatgtcgctatgtccacaaagttcaaggaacaggtccttgtcctggtgacttagctttccataaaaatggggcttttttcttgtatgatagattggcctcaactgtcatctaccgagggacaacttttgctgaaggtgtcgtagcttttttaattctgtcagagcccaagaagcatttttggaaggctacaccagctcatgaaccggtgaacacaacagatgattccacaagctactacatgaccctgacactcagctacgagatgtcaaattttgggggcaatgaaagcaacaccctttttaaggtagacaaccacacatatgtgcaactagatcgtccacacactccgcagttccttgttcagctcaatgaaacacttcgaagaaataatcgccttagcaacagtacagggagattgacttggacattggatcctaaaattgaaccagatgttggtgagtgggccttctgggaaactaaaaaacttttcccaacaacttcatggagaaaacttgcatttccaaattccatcaacccacaccaacaactcctcagatcagagcccggcgggaactgtccaaggaaaaattag

SEQ ID NO: 12019 - DNA, 171 bp, unidentified; identical to SEQ ID NO: 3077
  misc_feature 1..171: note = Synthetic
  source 1..171: mol_type = other DNA

SEQ ID NO: 12020 - DNA, 54 bp, unidentified; identical to SEQ ID NO: 3078
  source 1..54: mol_type = other DNA
  misc_feature 1..54: note = Synthetic

SEQ ID NO: 12021 - DNA, 1656 bp, unidentified
  source 1..1656: mol_type = other DNA
  misc_feature 1..1656: note = Synthetic
ttgttatctgtgtctagtacgatgaggagacgagccgtgctaggcggagcggtggtgtatccggagggtcctcctccttcttacgagagcgtgatgcagcaacaggcggcgatgatacagcccccactggaggctcccttcgtacccccacggtacctggcgcctacggaagggagaaacagcattcgttactcggagctgtcgcccctgtacgataccaccaagttgtatctggtggacaacaagtcggcggacatcgcctccctgaactatcagaacgaccacagcaacttcctgaccacggtggtgcagaacaatgactttacccccacggaggctagcacccagaccatcaactttgacgagcggtcgcgatggggcggtcagctgaagaccatcatgcacaccaacatgcccaacgtgaacgagtacatgttcagcaacaagttcaaggcgagggtgatggtgtccagaaaagctcctgaaggtgttacagtaaatgacacctatgatcataaagaggatatcttgaagtatgagtggtttgagttcattttaccagaaggcaacttttcagccaccatgacgatcgacctgatgaacaatgccatcattgacaactacctggaaattggcagacagaatggagtgctggaaagtgacattggtgttaagtttgacactagaaatttcaggctcgggtgggaccccgaaactaagttgattatgccaggtgtctacacttatgaggcattccatcctgacattgtattgctgcctggttgcggggtagactttactgaaagccgacttagcaacttgcttggcatcaggaagagacatccattccaggagggtttcaaaatcatgtatgaagatcttgaagggggtaatattcctgcccttttggatgtcactgcctatgaggaaagcaaaaaggataccactactgaaacaaccacactggctgttgcagaggaaactagtgaagatgatgatataactagaggagatacctatataactgaaaaacaaaaacgtgaagctgcagctgctgaagttaaaaaagagttaaagatccaacctctagaaaaagacagcaagagtagaagctacaatgtcttggaagacaaaatcaacacagcctaccgcagttggtacctgtcctacaattacggtaaccctgagaaaggaataaggtcttggacactgctcaccacttcagatgtcacctgtggggcagagcaggtctactggtcgctccctgacatgatgcaagacccagtcaccttccgctccacaagacaagtcaacaactacccagtggtgggtgcagagcttatgcccgtcttctcaaagagtttctacaatgagcaagccgtgtactctcagcagctccgacaggccacttcgctcacgcacgtcttcaaccgcttccctgagaaccagatcctcatccgcccgccggcgcccacaattaccaccgtcagtgaaaacgttcctgctctcacagatcacgggaccctgccgttacgcagcagtatccggggagtccagcgcgtgaccgttactgacgccagacgccgcacctgtccctacgtttacaaggccctgggcatagtcgcgccgcgcgttctttcaagccgcactttctaa

SEQ ID NO: 12022 - DNA, 2376 bp, unidentified
  misc_feature 1..2376: note = Synthetic
  source 1..2376: mol_type = other DNA
atgaacaccaaggagtccgtgctgctggagatcatcccgaagatccgcgcgtacctgcgcgagggtgctggcgagaagtcgtactccgacttcatctcgcgcaacaagagcatcttcgtgtgcaacctgtacaacgtgaacgcgctgacggacgacgacgtgcgcctgctctacctgaccatcgagcaaaacatggacgcggacgaccaggctctggtctccatcttctcgtacatcgggtacaagttcgagcgcagcgtgcaggaggacgcgggcgagagcgcgggcgcgggcgcgcagatcacggacgacatgacctacaacctgtacgacctgttcttcagcacgctggacatgtacgtgcggcagcggcgcgtgagcgtgctggttaacgacgacgcgcacaacgacgtggccatcccgcgccacacgagcgacctgcgctccagcttcgacgcggcgcgcgagcccgaggtgcgcgagatccccttcaacatgcgcgacctgctgccgtacgtggcgaagaacctggaccagctgcgcttctcgaagaagtacctggagttcgcgtatctgtgccgcaacatcggcattcccatctcgaagcgcaagttcaacgtgcgctacgtgtacctgctgcgcgtggacgacctgcagatcccggtggtgatcaaggactacctggacgtgaagttcgtgtacctgcgcgagaccggcaaggtctaccgcaaccgcttctcggacgagcgcaacgacagcctgctggagtgggggcgcctgctcatcccgcggctgcagaaccgcgcgctgtacagctacctgttcctgtccagttaccacctgtgcgacctgttcctggagctgcgcgagctgggctcggcgagcttccgcgcggcgcccgcgcgctcgcgcgtgcccgtggccgagccgcgcgcctggcgcgccgcggtgagcgtggaagtacagccgtgtgagcaccaggtgcggctggccgaggcgctgcgcgtggacctggactactacagcaaggtgaaccgctttgccaccgagttcctggagtacgaggacgggcttgcctactgcgtgctgtgcggcatgaacgtgccggtgttcaacgtgggcgcggcggacgtgaccaagagcagcgtgctggtgtccacctacagcaagtccatcttcctgagcgagccctacaactacttcgtgcacagccagcgcttcattttcaacatcatcatgtccttcgacaccatcatgaaggcgcagacctgggccatgaagtacaacatcaacaggctcatcctgaacttcctcatcagcattaacaaccggcgccaggagtatgagaagcgcttcgccgccgagatcaagcgcggcatcttcttcctgcgcctggccgccaacctcttcgacatccacgtctcgtcgatggagctgttctactctgcgaagatcctgaacctgaacttcctggtggtactggtgatcgtgctcaacagcagcgccgacttcatcatgtcctacatggccggcaagaagcgcgcgctgagcgaggacactctcgaccaggccattgccgtcatcatctacgacttcttgctgaagacgcgcatctgcgagaagaacgcgctggacaccatcgtcttcttcgcgcgcgtgtacatgtccatcatgcccgaggagctggtagcacaccacgcgcgcatccgcgccgagctgcgcaggctcatctccatccagcgctcgcgccgcaagcccgactacgacgtggacaaccgcgcgcccgtgcccgcgctgcgcccgcgcttcttcccgctgcgcgccacctgtacgcagttcttccccgcgccaccgccgcgcgcgcagggcacggggctggtcacgcccgccgagcccgtgcccgcaacgcctgagcacgtgcgccgcttcgaggccatgacgggcgccgacacgcgcgtgctcatccgcgtgaacgacaccaatgccaccaaccccgtcttcttcaccacacacctcaagatcgaggtcgagaagaagaagctgattatcccgctcaagaagctcttcgtgagcaacacgctcaagtactactcgagcacggccttctacgtgttcaagttcggggacccgttccctttcgactcggagctcatcgacgcggagcacgtgcagtacaaggtcaacggctacaaccttctgcggcacgcgctgctgccgcggagcgagctcttcgtgtacttcggcagctctctgcacaggcacgagctggagctggccttctacatgtttctctgcaattacgtggacgtgcagcagtggatggacgaaaacaccagcctgattcgggatctgtacctgattaattttaacaattaa

SEQ ID NO: 12023 - DNA, 108 bp, unidentified; identical to SEQ ID NO: 3086
  misc_feature 1..108: note = Synthetic
  source 1..108: mol_type = other DNA

SEQ ID NO: 12024 - DNA, 63 bp, unidentified; identical to SEQ ID NO: 3087
  misc_feature 1..63: note = Synthetic
  source 1..63: mol_type = other DNA

SEQ ID NO: 12025 - DNA, 33 bp, unidentified; identical to SEQ ID NO: 3088
  misc_feature 1..33: note = Synthetic
  source 1..33: mol_type = other DNA

SEQ ID NO: 12026 - DNA, 48 bp, unidentified; identical to SEQ ID NO: 3089
  misc_feature 1..48: note = Synthetic
  source 1..48: mol_type = other DNA

SEQ ID NO: 12027 - DNA, 1434 bp, unidentified
  source 1..1434: mol_type = other DNA
  misc_feature 1..1434: note = Synthetic
acgatccagggaaaccaccgtccagtggccatgtttgttccctggcaactcggtacaattacccgtcaccgagatgagctccaaaaactactggcagcctccctgctcccggagcacccggaggagagcctcggtaaccccataatgacacagattcaccagtcgctccaaccatcttccccctgcagggtctgtcagctcctattttctctggtccgcgattcgtccacccccatgggtttcttcgaggactatgcctgcctctgcttcttctgtctatacgccccacactgctggacctcgaccatggcggcagcggcagacctgtgcgagatcatgcatctgcactttccagaagaggaggcgacatacgggctattcggaccgggtcgccttatgggtatcgacttgcagctgcacttctttgttcaaaagtgctttaagaccaccgccgccgaaaaaatactgggaatatccaacctgcaatttttaaaatcagaattcatccggggcatgctcacaggcaccatcacctgcaacttctgcttcaaaacgtcctggcccaggacagacaaggaggaggccaccggccccaccccatgctgccagattacagacaccaccaccgcacccgcgagcggcataccggaactagcccgggccacattctgcggcgcaagtcgccccacaaagcccagcctacttcccgcgctaatagatatctggtccacgagctcagagctccttgacgagccgcgccctcgactgatcgcaagcgacatgagtgaactcaaatccgtggtcgcatcccacgatccgttcttctctcccccgcttcaggcagacacctcacagggtccatgtctgatgcacccaaccctggggctacgatacaaaaacgggactgcatccgtctgcctcctctgcgagtgccttgcggcacacccagaggcacccaaggcgctgcagacccttcagtgcgaggtaatgggccatatagaaaacaacgtaaagctggtagacagaattgcctttgtgttggacaacccattcgccatgccatatgtctcagatccgctacttagagagctgatccggggctgtaccccacaggaaattcacaagcacctgttctgcgacccgctgtgcgccctcaatgctaaggtggtgtcagaggacgtactattccgcctgcccagggagcaggagtataaaaagctcagggcatccgcggccgccggacagctcctcgatgccaacaccctgttcgactgcgaggtcgtgcagactttggtctttctctttaagggtctccaaaacgccagggtggggaaaaccacctcactagacattattcgggagctaaccgcacaactaaaaagacaccgcctagacctggcccacccctcacagacgtcacacttgtacgcttga

SEQ ID NO: 12028 - DNA, 72 bp, unidentified; identical to SEQ ID NO: 3093
  misc_feature 1..72: note = Synthetic
  source 1..72: mol_type = other DNA

SEQ ID NO: 12029 - DNA, 243 bp, unidentified
  misc_feature 1..243: note = Synthetic
  source 1..243: mol_type = other DNA
ctgcgctgcatctacacttacttccgcttcctcgcggacaagaagatgacgctgctcaagagcatcctcttcgacccgacagcgcccaagctggaggccgtcgaagtactcagcgacggcatgaaggagtacatgaagatggagcgctggacgcggaagtccgtgcaggtgctttcggaaaggataacctcccgaataaatagtctgctcccgccggagcccgagaagccggcggcgccatga

SEQ ID NO: 12030 - DNA, 33 bp, unidentified; identical to SEQ ID NO: 3098
  source 1..33: mol_type = other DNA
  misc_feature 1..33: note = Synthetic

SEQ ID NO: 12031 - DNA, 33 bp, unidentified; identical to SEQ ID NO: 3098
  misc_feature 1..33: note = Synthetic
  source 1..33: mol_type = other DNA

SEQ ID NO: 12032 - DNA, 747 bp, unidentified
  misc_feature 1..747: note = Synthetic
  source 1..747: mol_type = other DNA
atgactcatttagtgcttctattgtgctgctgtgtggggtctgtttgtgcatttttctcagatctggttaaatttgaaaatgtcaccgcccatgcaggtgctagagtgaatctcacctgcagcgttcctagcaatgagtcggtctctcggatcgagttgggccggggatacactcccggggatggacaactgcccttggccgtagctacttccaacaacggaactcatataactaacgggggttacaattatagccttaccctagaatgggtaaatgactccaacacctccgtctctctgataatccccaatgtgacccttgcgcatgcaggttactacacgtgcaatgtgacgctgagaaattgcagtgtggcctccggggtccactgcaattactctgcaggggaagaagacgaccaataccatgccaaccggacgctcactcagcgtatgcatcttactgttatcccagccactaccatagcccccaccacattagtctcccacaccacaagcaccagtcacaggccccataggcggcctgtttctaaacgtcccacgcataagccagtgaccctgggcccttttccaatcgatccctggcgccctaagaccacctgggtgcactgggccctgctcctaatcacttgtgctgtggtggctccggtgctcctcatcattatcatctcctgtctggggtggctggcgggctgggggaggcggcgcaagggctggatacccctgtga

SEQ ID NO: 12033 - DNA, 747 bp, unidentified
  source 1..747: mol_type = other DNA
  misc_feature 1..747: note = Synthetic
atgactcatttagtgcttctattgtgctgctgtgtggggtctgtttgtgcatttttctcagatctggttaaatttgaaaatgtcaccgcccatgcaggtgctagagtgaatctcacctgcagcgttcctagcaatgagtcggtctctcggatcgagttgggccggggatacactcccggggatggacaactgcccttggccgtagctacttccaacaacggaactcatataactaacgggggttacaattatagccttaccctagaatgggtaaatgactccaacacctccgtctctctgataatccccaatgtgacccttgcgcatgcaggttactacacgtgcaatgtgacactgagaaattgcagtgtggcctccggggtccactgcaattactctgcaggggaagaagacgaccaataccatgccaaccggacgctcactcagcgtatgcatcttactgttatcccagccactaccatagcccccaccacattagtctcccacaccacaagcaccagtcacaggccccataggcggcctgtttctaaacgtcccacgcataagccagtgaccctgggcccttttccaatcgatccctggcgccctaagaccacctgggtgcactgggccctgctcctaatcacttgtgctgtggtggctccggtgctcctcatcattatcatctcctgtctggggtggctggcgggctgggggaggcggcgcaagggctggatacccctgtga

SEQ ID NO: 12034 - DNA, 480 bp, unidentified
  misc_feature 1..480: note = Synthetic
  source 1..480: mol_type = other DNA
atgcagaagaacatgaagacgaagaagacgaagaaacgaggacgaaaggaggggaatacaccggagaccgagcggcggatggagcccgctcggtctcgcacgtccgcgataccgagcgggctccgtcgccgctccggaccctccacgcccctccgtccaggacccgaggtccgacacgcccccacctggcgcaccgcctccgccaccaccgctgacagtcaccgcatatcacccccatacacacccagcagcagaggccggcacatacacacgcgcggagcacgcacgagaacacgcgagacatcggccgccgagattaacggagtctatgcgcgcgccgtgacacggaaaaccaagcggagcgagacgatcgaccgactcctgctatccgtcctccctgggcacggtccacacgccagtctgcggagtcacctgagggccagatccgctctgcgccccccgcccgatccgccccgataa

SEQ ID NO: 12035 - DNA, 480 bp, unidentified; identical to SEQ ID NO: 12034
  misc_feature 1..480: note = Synthetic
  source 1..480: mol_type = other DNA

SEQ ID NO: 12036 - DNA, 879 bp, unidentified
  source 1..879: mol_type = other DNA
  misc_feature 1..879: note = Synthetic
aagaagttaactatggagtccttgtcagtttatatcttcgtaatgggagtctgctttacatcgaatttcacatgcgagcaaaaaatagtcttaattcaggaacataaacttagatctatatgcatctctacttgttatgtgaatggagtgttagctgggaattctagctgtgtttctgtcaaaacttcatatctgatcaaccttgcgatgttaacaaatggctttaaagccatgagagttggaaatattacatctatctctgaaaaaacggcttttctgcgtgtgattattaattattattttagaggagtgatgcttagagctttgatcgctcaaaggcttccaaatgccgctaatttatcgagtactgtaaattgctggctggatgatcatagcgcaggaggtgtgatgactctattttatggaacggaacggattgttctcaattccagcactgaaatcaatgcgagtcgatggataagtgacgggcaggatgccaatggcactttgaacattttaaatgagagagtgtctttggatatctattttctgagcaagatctgtcctcagttgtcgtctgaaatttacaagaaaaaggttgcgcatccgaaatatttttcattaatcaaaaatgatacgaagccgaaaaaattcttaagaaatacatggaggtctgcatggagtaattggtataaatataaggagatcaaagagtttttggatttttcaagcgattacgagaatttctctgaaattacgtattcaatgtcggctgctgggttgttctttttggccgggggtgcatttacgatgctgttattgctatgctgtttgtcaatgattacgcggaaacatattgtgaaagatttaggatattaa

SEQ ID NO: 12037 - DNA, 48 bp, unidentified; identical to SEQ ID NO: 3115
  misc_feature 1..48: note = Synthetic
  source 1..48: mol_type = other DNA

SEQ ID NO: 12038 - DNA, 885 bp, unidentified
  source 1..885: mol_type = other DNA
  misc_feature 1..885: note = Synthetic
atgaagaagttaactatggagtccttgttagtttatacctttgtaatgggagtctgctttacatcgaatctcacatgcgagcaaaaaatagttttaattcaggaacagaaacttggagctatatgcatctctacttgttatgtgaatggagtgttagctgggaattccagctgtgtttctgtcagaacttcatatctgatcaaccttgcgatgctaacagatggctttaaagccatgaaagttggaaatatcacatctatctctgaaaaaacggcttttctacgtgtgattattaattattattttagaggagtgatgctcagagctttgatcgctaaaaggcttccaaatgccgctcagctatcgagtactgtaaattgctggctagaaggtcatagcgcaggaggtgtgatgactctattttatggaacggaacggattgttctcaagtccagcactgaaatgaatgcgagtcaatggacaagtgacgggccagatgccaatggcactttgaacattttaaatgagagagtgtctctggatagctatttcctgagcatgatctgtcctcaattgtcggatgaaatttacaagaaaaaggttgtgcattcgaaatatttttcattaattaaaaatgatacgatgccgaaaaaattcttaagaaatacatggaagtctgcatggactaattggtataaatacaaggagattgaagcgttgttggatttttcaagggattacgagaatgtgtctgaaattacgcattcaatgtcggctgctgggttgttctttttggctgggggtgcatttacgatgctgttattgctatgctgtttatcaatgattacgcggaaacatgttgtgaaagatttaggatacaaataa

SEQ ID NO: 12039 - DNA, 27 bp, unidentified
  source 1..27: mol_type = other DNA
  misc_feature 1..27: note = Synthetic
ttgatccattctattttgttgcagtag

SEQ ID NO: 12040 - DNA, 18 bp, unidentified
  misc_feature 1..18: note = Synthetic
  source 1..18: mol_type = other DNA
atgccaatggcgccatag

SEQ ID NO: 12041 - DNA, 96 bp, unidentified; identical to SEQ ID NO: 3122
  source 1..96: mol_type = other DNA
  misc_feature 1..96: note = Synthetic

SEQ ID NO: 12042 - DNA, 3732 bp, unidentified
  source 1..3732: mol_type = other DNA
  misc_feature 1..3732: note = Synthetic
acgcacctacccaccggcagaatgtttccataccctcagctgaactttccaccagtttaccctacaaatccgatggcttaccgagatccaaaccctcctaggcgccgctggaggccgtttcggcccccgctggctgctcaaatcgaagatcttaggaggtcgatagtcaacttgactttcaaacaacgatcacctaatccgccgccaggtccaccgccaaagaagaagaagagtgctcctaagccaaaacctactcagcctaaaaagaagaagcagcaagccaagaggacgaaacgcaagcctaaaccagggaaacgacaacgtatgtgtatgaagttggagtcggacaagacatttccgatcatgctgaacggccaagtgaatggatatgcctgcgttgtcggaggaaggctgatgaaaccactccacgttgaaggaaaaattgataatgagcaattagcggccgtgaaattgaagaaggctagcatgtacgacttggagtacggcgacgttccccagaacatgaaatcagacacgctgcagtacaccagcgacaaaccaccgggcttctacaactggcaccacggcgcagtccagtatgagaatgggagatttaccgtaccgagaggagtgggcgggaaaggcgacagcggaagaccgatcctggacaacagaggcagagttgtggctattgttctaggaggtgcaaatgagggcacgcgtacggcgctttcagtggtcacttggaaccagaaaggggtgaccattagggatacccccgaaggttctgaaccgtggtcactagttacagcgctatgcgtgctttcgaatgtcacgttcccatgcgacaaaccacccgtgtgctattcactgacgccagaacgaacactcgacgtgctcgaagagaacgtcgacaatccaaattacgacacgctgctggagaacgtcttgaaatgtccatcacgccggcccaaacgaagcattaccgatgacttcacactgaccagtccctacctggggttctgcccgtattgcagacactcaacgccgtgtttcagcccaataaaaattgagaacgtgtgggacgaatctgatgatggatcgattagaatccaggtctcggcacaattcggctacaatcaggcaggcactgcggatgtcaccaaattccgttacatgtctttcgaccacgaccatgacatcaaggaagacagtatggagaaaatagctatcagcacatctggaccctgccgtcgtcttggccacaaagggtacttcctgttagctcaatgtcctccaggtgacagtgtaaccgtcagtatcacgagcggagcatctgagaattcatgcaccgtggagaaaaagatcaggaggaagtttgtcggtagagaggagtacttgttcccacccgtccatggaaagctggtaaagtgccacgtttacgatcacttgaaggagacgtctgccgggtacataaccatgcacaggccaggcccacacgcgtataagtcctatctggaggaagcgtcaggcgaagtgtacattaaaccaccttctggcaagaacgtcacctacgaatgtaagtgtggcgactacagcacaggtatcgtgagcacgcgaacgaagatgaacggctgcactaaagcaaaacagtgcattgcctacaagagcgaccaaacgaaatgggtcttcaactcgccggatcttattaggcacacagaccactcagtgcaaggtaaattgcacattccattccgcttgacaccgacagtctgcccggttccgttagctcacacgcctacagtcacgaagtggttcaaaggcatcaccctccacctgactgcaatgcgaccaacattgctgacaacgagaaaattggggctgcgagcagacgcaacagcagaatggattacagggtctacatccaggaatttttctgtggggcgagaagggctggagtacgtatggggtaaccatgaaccagtcagagtctgggcccaggagtcggcaccaggcgacccacatggatggccgcatgagatcatcatccactattatcatcggcatccagtctacactgtcattgtgctgtgtggtgtcgctcttgctatcctggtaggcactgcatcatcagcagcttgcatcgccaaagcaagaagagactgcctgacgccatacgcgcttgcaccgaacgcaacggtacccacagcattagcggttttgtgctgcattcggccaaccaacgctgaaacatttggagaaactttgaaccatctgtggtttaacaaccaaccgtttctctgggcacagttgtgcattcctctggcagcgcttgttattctgttccgctgcttttcatgctgcatgccttttttattggttgcaggcgtctgcctggggaaggtagacgccttcgaacatgcgaccactgtgccaaatgttccggggatcccgtataaggcgttggtcgaacgcgcaggttacgcgccacttaacctggagatcacggtcgtctcatcggaattaacaccttcaactaacaaggagtacgtgacctgcaaattccacacagtcattccttcaccacaagttaaatgctgcgggtccctcgagtgcaaggcatcctcaaaggcggattacacatgccgcgtttttggcggtgtgtaccctttcatgtggggaggcgcacaatgcttctgtgacagtgagaacacacaactgagtgaggcgtacgtcgagttcgctccagactgcactatagatcacgcagtcgcactaaaagttcacacagctgctctgaaagtcggcctgcgtatagtatacggcaacaccaccgcgcacctggatacgtttgtcaatggcgtcacgccaggttcctcacgggacctgaaggtcatagcagggccgatatcagccgctttttcaccctttgaccataaggtcgtcatcagaaaggggcttgtttacaactacgacttccctgagtatggagctatgaaaccaggagcgttcggcgatattcaagcatcctcgcttgatgctacagacatagtagcccgcactgacatacggctgctgaagccttctgtcaagaacatccacgtcccctacacccaagcagtatcagggtatgaaatgtggaagaacaactcaggacgacccctgcaagaaacagcaccatttggatgtaaaattgaagtggagcctctgcgagcgtctaactgtgcttacgggcacatccctatctcgattgacatccctgatgcagcttttgtgagatcatcagaatcaccaacaattttagaagttagctgcacagtagcagactgcatttattctgcagactttggtggttctctaacattacagtacaaagctgacagggagggacattgtccagttcactcccactccacgacagctgttttgaaggaagcgaccacacatgtgactgccgtaggcagcataacactacattttagcacatcgagcccacaagcaaattttatagtttcgctatgcggcaagaagtccacctgcaatgctgaatgtaaaccaccggccgaccacataattggagaaccacataaagtcgaccaagaattccaggcggcagtttccaaaacatcttggaactggctgcttgcactgtttgggggagcatcatccctcattgttgtaggacttatagtgttggtctgcagctctatgcttataaacacacgtagatga

SEQ ID NO: 12043 - DNA, 2460 bp, unidentified
  source 1..2460: mol_type = other DNA
  misc_feature 1..2460: note = Synthetic
acgcacctacccaccggcagaatgtttccataccctcagctgaactttccaccagtttaccctacaaatccgatggcttaccgagatccaaaccctcctaggcgccgctggaggccgtttcggcccccgctggctgctcaaatcgaagatcttaggaggtcgatagtcaacttgactttcaaacaacgatcacctaatccgccgccaggtccaccgccaaagaagaagaagagtgctcctaagccaaaacctactcagcctaaaaagaagaagcagcaagccaagaggacgaaacgcaagcctaaaccagggaaacgacaacgtatgtgtatgaagttggagtcggacaagacatttccgatcatgctgaacggccaagtgaatggatatgcctgcgttgtcggaggaaggctgatgaaaccactccacgttgaaggaaaaattgataatgagcaattagcggccgtgaaattgaagaaggctagcatgtacgacttggagtacggcgacgttccccagaacatgaaatcagacacgctgcagtacaccagcgacaaaccaccgggcttctacaactggcaccacggcgcagtccagtatgagaatgggagatttaccgtaccgagaggagtgggcgggaaaggcgacagcggaagaccgatcctggacaacagaggcagagttgtggctattgttctaggaggtgcaaatgagggcacgcgtacggcgctttcagtggtcacttggaaccagaaaggggtgaccattagggatacccccgaaggttctgaaccgtggtcactagttacagcgctatgcgtgctttcgaatgtcacgttcccatgcgacaaaccacccgtgtgctattcactgacgccagaacgaacactcgacgtgctcgaagagaacgtcgacaatccaaattacgacacgctgctggagaacgtcttgaaatgtccatcacgccggcccaaacgaagcattaccgatgacttcacactgaccagtccctacctggggttctgcccgtattgcagacactcaacgccgtgtttcagcccaataaaaattgagaacgtgtgggacgaatctgatgatggatcgattagaatccaggtctcggcacaattcggctacaatcaggcaggcactgcggatgtcaccaaattccgttacatgtctttcgaccacgaccatgacatcaaggaagacagtatggagaaaatagctatcagcacatctggaccctgccgtcgtcttggccacaaagggtacttcctgttagctcaatgtcctccaggtgacagtgtaaccgtcagtatcacgagcggagcatctgagaattcatgcaccgtggagaaaaagatcaggaggaagtttgtcggtagagaggagtacttgttcccacccgtccatggaaagctggtaaagtgccacgtttacgatcacttgaaggagacgtctgccgggtacataaccatgcacaggccaggcccacacgcgtataagtcctatctggaggaagcgtcaggcgaagtgtacattaaaccaccttctggcaagaacgtcacctacgaatgtaagtgtggcgactacagcacaggtatcgtgagcacgcgaacgaagatgaacggctgcactaaagcaaaacagtgcattgcctacaagagcgaccaaacgaaatgggtcttcaactcgccggatcttattaggcacacagaccactcagtgcaaggtaaattgcacattccattccgcttgacaccgacagtctgcccggttccgttagctcacacgcctacagtcacgaagtggttcaaaggcatcaccctccacctgactgcaatgcgaccaacattgctgacaacgagaaaattggggctgcgagcagacgcaacagcagaatggattacagggtctacatccaggaatttttctgtggggcgagaagggctggagtacgtatggggtaaccatgaaccagtcagagtctgggcccaggagtcggcaccaggcgacccacatggatggccgcatgagatcatcatccactattatcatcggcatccagtctacactgtcattgtgctgtgtggtgtcgctcttgctatcctggtaggcactgcatcatcagcagcttgcatcgccaaagcaagaagagactgcctgacgccatacgcgcttgcaccgaacgcaacggtacccacagcattagcggttttgtgctgcattcggccaaccaacgctgaaacatttggagaaactttgaaccatctgtggtttaacaaccaaccgtttctctgggcacagttgtgcattcctctggcagcgcttgttattctgttccgctgcttttcatgctgcatgccttttttaattggttgcaggcgtctgcctggggaaggtagacgccttcgaacatgcgaccactgtgccaaatgttccggggatcccgtataa

SEQ ID NO: 12044 - DNA, 48 bp, unidentified; identical to SEQ ID NO: 3126
  misc_feature 1..48: note = Synthetic
  source 1..48: mol_type = other DNA

SEQ ID NO: 12045 - DNA, 144 bp, unidentified; identical to SEQ ID NO: 3127
  source 1..144: mol_type = other DNA
  misc_feature 1..144: note = Synthetic

SEQ ID NO: 12046 - DNA, 48 bp, unidentified; identical to SEQ ID NO: 3126
  misc_feature 1..48: note = Synthetic
  source 1..48: mol_type = other DNA

SEQ ID NO: 12047 - DNA, 144 bp, unidentified; identical to SEQ ID NO: 3127
  misc_feature 1..144: note = Synthetic
  source 1..144: mol_type = other DNA

SEQ ID NO: 12048 - DNA, 966 bp, unidentified
  misc_feature 1..966: note = Synthetic
  source 1..966: mol_type = other DNA
atcggcgccatgctggcggacggctttgaaactgacatcgcgataccctcgggcatctcgcgccccgatgcggcggcgctgcagcgctgcgaagggcgggtggtattcctgccgaccatccgccggcaactgacgctggccgacgtggcgcacgaatccttcgtctccggaggcgtcagtcccgacacgttggggttgttgctggcgtaccgaaggcgcttccccgcggtcatcacccgggtgcttcccacgcgaatcgtcgcctgccccctggacgtgggcctcacccacgccggcaccgttaaccttcgcaacacctcccccgtagatctctgtaacggggaccccatcagcctcgtcccgcccgtgttcgagggccaagcgacggacgtgcgcctggattcgctggacctcacgttgcggtttcccgttccgcttccatcgcccctggcgcgcgaaatcgtggcgcggctcgtggccaggggcatccgggacctgaaccccagccccagaaaccccggagggctgccagacctcaacgtgctgtactacaacgggagtcgcctctcgctgctggcggacgtccaacaactcggtcccgtaaacgccgagctgcgatcgctggtccttaacatggtttactcgatcacggagggaaccaccatcatccttacgctaatcccccggctctttgcgctaagtgcccaggacgggtacgtgaacgctctactgcagatgcagagtgtcacgcgggaggccgcccagctcattcaccccgaagccccggccctgatgcaggatggagagcgaaggctgccgctttacgaggcgctcgtcgcctggctgacccacgcgggccaactaggagacaccttggccctggctcccgtggttcgggtgtgcacctttgacggcgcggccgttgtgcggtccggagacatggcccccgttatacgctatccctaa

SEQ ID NO: 12049 - DNA, 27 bp, unidentified
  source 1..27: mol_type = other DNA
  misc_feature 1..27: note = Synthetic
gtgctgcccatgcttgacataagctga

SEQ ID NO: 12050 - DNA, 558 bp, unidentified
  misc_feature 1..558: note = Synthetic
  source 1..558: mol_type = other DNA
atgcgcgagttcggactcgcggcgcgcatggcccgcgccatcgaggacgtgtgtccgcgcggcgcggtgatattcgtatccagcgccgcgtccatgaccgactgtctgaacccgtcggtgtttaagcacgcggcgatatacgcggggcgcgtggaccgcgcgctgctactgccgcccctgccggtcccggcggaggccgtgacggagccctgcgcgatagacgccatagcgccttacggcgcgcgcgtggtcctgctctcagagctgctgcggagctgcgtagccgtacaggcttaccgcctggcagttcccggcgccctcgctctcatgaacctcgcggccgacgcggccttcgagctcgtgggcacgccctacggctttaacagcgaccggacgtactgcttcaagctcgttgccgactgctttgctagcgtgggcgtgataacgaaaaccaggcgcattatgggtcgcgacgtcgtgctcagccaggacttcttggaaagcggcatgtggaccaaggtgctggactccgccgcggagccgccgtggctggtctaa

SEQ ID NO: 12051 - DNA, 369 bp, unidentified
  source 1..369: mol_type = other DNA
  misc_feature 1..369: note = Synthetic
atgtctgaccaactagaaatcgacgggcagtgcactgagcagcttatccttgctcggcgaaaactcaaacaacaaaatcaggaactgttcaaccttcaagccctacaccaatgcaaaaagggtcttttttgtctggttaaacaagctgaactttgttatgatgtaacccaacagggacacgagctgtcatatactttaaacaagcaaagacagagctttatgactatggtgggggttaagcccattaaggttactcagcaatccggcccagttgagggaagcattctttgtcagtgtaccaatcctgaatgcatgtacactatggtaaaaaccctgtgtggtctaagggaacttctcccctttaattaa

SEQ ID NO: 12052 - DNA, 90 bp, unidentified
  misc_feature 1..90: note = Synthetic
  source 1..90: mol_type = other DNA
atcaggaactgttcaaccttcaagccctacaccaatgcaaaaagggtcttttttgtctggttaaacaagctgaactttgttatgatgtaa

SEQ ID NO: 12053 - DNA, 78 bp, unidentified; identical to SEQ ID NO: 3135
  source 1..78: mol_type = other DNA
  misc_feature 1..78: note = Synthetic

SEQ ID NO: 12054 - DNA, 231 bp, unidentified
  misc_feature 1..231: note = Synthetic
  source 1..231: mol_type = other DNA
atggagaccaccgtgaacgcccaccaaatattgcccaaggtcttacataagaggactcttggactctcagcaatgtcaacgaccgaccttgaggcatacttcaaagactgtttgtttaaagactgggaggagttgggggaggagattaggttaaaggtctttgtactaggaggctgtaggcataaattggtctgcgcaccagcaccatgcaactttttcacctctgcctaa

SEQ ID NO: 12055 - DNA, 351 bp, unidentified
  misc_feature 1..351: note = Synthetic
  source 1..351: mol_type = other DNA
aagttaacacccgtggttgataatcaggggcagcgtctctacgtcagatactcgtcagacacgatctctatattattgggccccttcacctatctggtggcagagctttcaccggtggaactcgtgacagatgtctacgccaccctaggcatcgtggagatcatcgacgagctctaccggagcagtcgcctggccatctacatcgaggacctcggtcgaaaatactgccccgcgagcgcgaccgggggagatcatggcatccggcaagcaccatcagcccggggggacacggagcctgaccatgcaaaaagtaagcctgcgcgtgaccccccgcctggtgctggaagttaa

SEQ ID NO: 12056 - DNA, 351 bp, unidentified
  source 1..351: mol_type = other DNA
  misc_feature 1..351: note = Synthetic
aagttaacacccgtggttgataatcaggggcagcgtctctacgtcagatactcgtcagacacgatctctatattattgggccccttcacctatctggtggcagagctttcaccggtggaactcgtgacagatgtctacgccaccctaggcatcgtggagatcatcgacgagctctaccggagcagtcgcctggccatctacatcgaggacctcggtcgaaaatactgccccgcgagcgcgaccgggggagatcatggcatccggcaagcaccatcagcccggggggacgcggagcctgaccatgcaaaaagtaagcctgcgcgtgaccccccgcctggtgctggaagttaa

SEQ ID NO: 12057 - DNA, 351 bp, unidentified
  source 1..351: mol_type = other DNA
  misc_feature 1..351: note = Synthetic
aagttaacacccgtggttgataatcaggggcagcgtctctacgtcagatactcgtcagacacgatctctatattattgggccccttcacctatctggtggcagagctttcaccggtggaactcgtgacagatgtctacgccaccctaggcatcgtggagatcatcgacgagctctaccggagcagtcgcctggccatctacatcgaggacctcggtcgaaaatactgccccgcaagcgcgaccgggggagatcatggcatccggcaagcaccatcagcccggggggacgcggagcctgaccatgcaaaaagtaagcctgcgcgtgaccccccgcctggtgctggaagttaa

SEQ ID NO: 12058 - DNA, 48 bp, unidentified; identical to SEQ ID NO: 3126
  source 1..48: mol_type = other DNA
  misc_feature 1..48: note = Synthetic

SEQ ID NO: 12059 - DNA, 144 bp, unidentified; identical to SEQ ID NO: 3138
  source 1..144: mol_type = other DNA
  misc_feature 1..144: note = Synthetic

SEQ ID NO: 12060 - DNA, 294 bp, unidentified
  source 1..294: mol_type = other DNA
  misc_feature 1..294: note = Synthetic
atatcacctgtatttactgccgtttccaagatgggatcaattaccgcttcgttcatattaataacgatgcaaattttatttttttgtgaagacagcagtggggagccaaactttgcagaacggaatttttggcatgccagctgttcggctcgtggagtttatatcgacggatcaatgatcaccacccttttcttctacgcatcccttttgggggtgtgtgtagcccttatttcgttagcttatcatgcgtgtttccggttatttactcgttctgtattacgcagcacgtggtaa

SEQ ID NO: 12061 - DNA, 336 bp, unidentified
  source 1..336: mol_type = other DNA
  misc_feature 1..336: note = Synthetic
atgcgcgttccgcaggaacaaagagaacatgcaagcaaccacacgcgtgcaaagcaggaggtgttcgacatggccggtaagaagggggtattcgccgccttacgcgccagaaaaggtcttcgtcgtcccgcgagcccgagagtccggctcttggggacgaaagagagcaagtgtgtgcgcaagacggacagaatcgataggggctctggaacctcgcgtgccagcaaggccggcccgttggctagagcttccactccaggaagtttccgctccagggtagcattgtcgtcccgcgctccgagtcgtacacgcagagccagcgcggatcgcgcgtaa

SEQ ID NO: 12062 - DNA, 21 bp, unidentified
  misc_feature 1..21: note = Synthetic
  source 1..21: mol_type = other DNA
atgttacatccctacccatag

SEQ ID NO: 12063 - DNA, 24 bp, unidentified
  misc_feature 1..24: note = Synthetic
  source 1..24: mol_type = other DNA
atgaacggggacttggaatgttaa

SEQ ID NO: 12064 - DNA, 30 bp, unidentified; identical to SEQ ID NO: 3128
  misc_feature 1..30: note = Synthetic
  source 1..30: mol_type = other DNA

SEQ ID NO: 12065 - DNA, 1953 bp, unidentified
  misc_feature 1..1953: note = Synthetic
  source 1..1953: mol_type = other DNA
aggaaaataagacgaacactggtcgccatggctttgagcattcaagactgcgcacgcctgaccggtcaaagcgtggcaactattgaacgctttttacccctgcgcaatatttggaaccgagcccgcgaatttatgcgagcaacaactaccgctgccggcatcacatggatgtccagatacatatatgaataccaccgcctcatgttggaagatctcgctccaggtgctgcggctacgcttggctggccgttgtatcgcgaacctcctcctcatttccttgtgggctatcaatacctagtgcgcacctgcaatgactatgtttttgactctcgggcttactcacgcttgcgatacacagaaactgtacagccaggcacgcaaactgttaattggtcagtaatgacaaactgcagctacaccattaatgcaggagcttatcaccgctttgtagatgtggatgactttgcaaccacccttacccaaattcaacaggcagtgcttgcggaacgggtagtggcagatttagctttattacaaccgctgcaaggctacggaagcacgcacatggctgatcgcggaaaccgcgaggtagaggtggaaaggttaatgcaagactactacaaagatcttggacgatgtcaaagtgacgtgtggggaatggcagaccgcctgcgaattcaacaagccggacccaaagatgtggtgcttcttaaaaccattcgtgggcttaaaacagcttacttcaattacattattagtagcattgctcagcttcctggtactttagaagaaacaaaacttagcctaccttgtgactgtgactggctagatgcctttcttgaaaggttctccgacccggtggatatgcagacgcttagctccttgcgcggagttcctacgcagcaaataataaaatgcataatcagcgctgtatccctacctaacgcccctcgcaacgcctcatttcccattttacatgaaacagaacttagaggtggagtttttgagttacgaccacgtgaaaacggtcgagcagtaaccgaaactatgcgccgccgtcgcggcgaaatgattgaaagatttgtagacaggctgcccgttcgccggcgtcgaagaagacaacccccaccacctgtggtcgaggaagaaataatggaggtagaagaggaagaacaagaaatagttccgggcgcatttcagcaagaagtgcgcgagacggtggccgagcttattcgtctgttggaagaagaattgacggtggcagctcgcaactcccagtttttcaattttgcagtagacttttacgaagccatggaacgtcttgaagccttaggtgacatcaacgagctgacgcttcgtcggtggattctgtatttcttcgtctcagaacacgttgccaccaccttaaactacctgtttcagcgcttgcgcaactacggcgtgttcgcacggctcgtggaactcaacttggcgcaagtggttatgcgcgctcgggacagcgaaggaggggtagtatacagccgagtctggaacgaaattggactaaacgcattttcacagcttatgagtcggatatctaatgaccttgcagccactattgaacgtgcgggacatggagacctccaggaggaagaaattgatcaattaatggcagaaattgcctaccaagataactcaggcgacgttcaggagattttaagacaggctgcagtaaatgacactgagattgattctgttgaactttctttcaggttcaaaacaacagggccggtagtgtttacacaacgccgacagattcaagatatcaatcgccgggtagtcgcccatgccagtcaacttcgggctcaacaccttcccctgccagagcgtcaggccgacataccgcttcccccgcttcccgcaggacccgaaccgccgcttcctccgggagctcgtccgcgccgccgattttaa

SEQ ID NO: 12066 - DNA, 30 bp, unidentified; identical to SEQ ID NO: 3128
  source 1..30: mol_type = other DNA
  misc_feature 1..30: note = Synthetic

SEQ ID NO: 12067 - DNA, 3597 bp, unidentified
  misc_feature 1..3597: note = Synthetic
  source 1..3597: mol_type = other DNA
aggaaaataagacgaacactggtcgccatggctttggttcaaaacaacagggccggtagtgtttacacaacgccgacagattcaagatatcaatcgccgggtagtcgcccatgccagtcaacttcgggctcaacaccttcccctgccagagcgtcaggccgacataccgcttcccccgcttcccgcaggacccgaaccgccgcttcctccgggagctcgtccgcgccgccgattttaagcaggcgcattggaaaagtgcaccgtggaaccgtggttagtccccgggctcatggaatacttcacgcaatagactctgccaacggcacgcctctagaaattaagtattacctgcacctccagcctgctcttacccgcctgtgcgaagtcaacttgcgcgctgtccccgcggacatgcttttctctctgactgataccatggacagctccaggctgtacgccctgatttcccgtttccgcccctctcgtgctgaaatctggacatgcaggtcgaggggcaccgtcaccctctccgttctcgctttcgaggatccaaacggtagtggcaatgcagcagaagaggaagaggacgaacggcagctgccaagtggtattgattttcccatctgctttctggtgcgaggccgccaggtacacctcattcaacagatacagcccgtgcaacgatgcgaacactgcgcacgcttttacaaacatcagcatgaatgctctgtccgccgacgagatttctactttcatcacatcaacagccattcttccaactggtggcaggagatccactttttcccaatcggttcgcatcctcgcactgagcgcctttttattacctatgatgtagaaacctacacctggatgggggcatttggaaagcaacttgtcccatttatgctggtgatgaaactgtctggggatgacaatcttgtcaaacatgccttacaacttgcattagaacttggatgggaccaatgggaaaaagactctactactttctactgcttaaccccagaaaaaatgaaggtcggtcaacagtttcgtacctatagaaaccgcttacaaacctccttagctactgatctttggatgacttttttacaaaaaaatccacacttgtctcaatgggctcaagaagaaaacggactagtcgcgcttgaagatctttcctacgaagatcttaaaagagcccctgcaattaagggtgagccaagatttgtagagttgtatatagtaggacacaatattaatggatttgatgaaattgttcttgccgctcaggtaatcaataaccgcttggacgtccctggaccctttaaaatttctagaaattttattccaagagctggcaaaatattatttaatgatattacttttgcccttcccaatccccactacaaaaagcgaactaacttcctactgtgggaacacggagggtgtgacgaccaagattttaaataccagtatttaaaagtaatggtcagagatacctttgctcttactcatacatctttaagaaaggctgcacaagcgtatgccctgcctgtagaaaaaggatgttgtccgtacaaggcggtaaatcagttttatatgcttggttcttaccgtgcagatgcaaatgggtttcccctggaggagtactggaaggataaggaggaatacctcctaaatcaagaactatggaaaaaaaaaggagaaaaaaattacaatcttatcggggaaacattaaactattgtgccctggatgtacttgtgactgcctcattggtagaaaaactgcgtagctcatacgcccagtttgttactgacgcagtgggtcttgacgcggcacattttaatgtgtttcagcgtcctaccatttcctctaactctcatgcaattttcagacaaattttgtaccgcgccgaaaaaccacagcgcacacatcttgggcccaacatcctggcgccttcacatgagctatatgactacgttcgcgccagcattcgtggcggcaggtgctatcctacttacataggagtactaaaagagcccatatatgtatatgatatttgcggcatgtatgcatcggccctcacacaccccatgccttggggtcctccccttaacccctatgagcgggcattggccgtgcggcaatggcaggtggcgctggaaaattacacttgcaaaattgattattttgacaaaaatctttgtcctggcatttttactatagatgccgaccccccagatgaaaatcagttggatgttcttcctcctttttgttctagaaaaggcggtcgtttagcctggaccaatgaaagcttgcgcggtgaagtagttaccagcgtagatctggttacactgcataatcgcgggtggcgcttacgcttgctatctgacgagcgcaccaccattttccccacctggaaatgcctggcacgcgaatatgtgcaactcaatattgccgcaaaagaacgggccgatagggacaaaaatcaaaccctaagatctatagccaagctgctttccaatgccttgtacggatcttttgctaccaaactagataacaaaaaaatagttttttctgatcaaatggaagaaagcctaatgaaagaaattgcagcggggcgattaaacatcaaatcctcatcgtttatagaaactgacacgttgagtacagaggtaatgcctgcctttgagcgcgtgtactcacccaaccagttggcgctcgtaaacagcgaagcagaagaaagcgatgaagaccaaggacccgcccctttttatagcccaccaccagaaaattgtgaacacgtgacttacacctacaaaccaatcacattcatggacgctgaagaaggagacatgtgtttacacaccttagaaagttctaaccctttaattaacaacgatcggtacccttcccatgtggcttcctttgtacttgcttggactagagcttttgtgtcagagtggtcagaattcctgtacgaggaggaccgcggaataccactgaaggatagaccccttaaatctgtatacggagacactgacagtctttttgtcacagagaaaggacgccgccttatggagtcgcaaggtaagaaacgcatcaaaaagtacggagggaaacttgtttttgatccatcatgtcctgagctgacctggtcagttgaatgtgaaactgtttgtagttattgtggcgcagatgcttattctccagaatctgtttttttggctccaaaactgtacgcccttaaatgccttcagtgtcctcactgcgggagcacctccaaaggaaaaatacgggctaaaggccacgctacagaggctttgtcttatgatcttatgttaaaatgctaccttgccgaagcacagggagaagacacgcgcttcagcaccagccgcctcagtttaaagcgcacactggccagcgctcaaccaggagcgcatccattcaccgtgaccgaaacaaccctgacgcgcacattacgtccctggaaggacaaaaccctcgtccatttggatgctcaccgcctcgttccttacagcaacagccagccaaacccccgcaacgaggaagtttgctggatcgagatggcatag

SEQ ID NO: 12068 - DNA, 30 bp, unidentified; identical to SEQ ID NO: 3147
  misc_feature 1..30: note = Synthetic
  source 1..30: mol_type = other DNA

SEQ ID NO: 12069 - DNA, 27 bp, unidentified
  misc_feature 1..27: note = Synthetic
  source 1..27: mol_type = other DNA
attttcggctccgcggtagaacactga

SEQ ID NO: 12070 - DNA, 219 bp, unidentified
  misc_feature 1..219: note = Synthetic
  source 1..219: mol_type = other DNA
atggcccaaatgtttacagatccgcccaaggcggcaaaaatatacattaactcatccgttgagtctacatttatagacacttcttcactgaactctgaaaaatatgccacaatttggcgcagtttatcgatttttatacggatactcattttaaatttttgtaaattatttaaagttaaatggctgcagaacagcgtcgttctacaatttttgacatag

SEQ ID NO: 12071 - DNA, 45 bp, unidentified; identical to SEQ ID NO: 3150
  misc_feature 1..45: note = Synthetic
  source 1..45: mol_type = other DNA

SEQ ID NO: 12072 - DNA, 210 bp, unidentified; identical to SEQ ID NO: 10106
  source 1..210: mol_type = other DNA
  misc_feature 1..210: note = Synthetic

SEQ ID NO: 12073 - DNA, 219 bp, unidentified
  misc_feature 1..219: note = Synthetic
  source 1..219: mol_type = other DNA
atggcccaaatgtttacagatccgcccaaggcggcaaaaatatacattaactcatccgtcgagtctacatttatagacacttcttcgctgaactctgaaaaatatgccacaatttggcgcaatttatcgatttttatacggatgctcattttaaatttttgtaaattatttaaagttaaatggctacagaacagcgtcgttctacaatttttgacatag

SEQ ID NO: 12074 - DNA, 195 bp, unidentified
  source 1..195: mol_type = other DNA
  misc_feature 1..195: note = Synthetic
acgcgctctccagagatgcgtacgatgggcgcggatgcgaccggcaacaacgtcacgctcgaggaggaccacgccgaccatttcctgcgagtgtctcgaaccgaggccgcgctcttcgtggtgctcacgctgtttggaattgtgctgctgttggccttcctcgcgtacctactcgccgtgtctttgtcgcagtaa

SEQ ID NO: 12075 - DNA, 3201 bp, unidentified
  source 1..3201: mol_type = other DNA
  misc_feature 1..3201: note = Synthetic
atggggacggaagactgcgatcacgaagggcggtcggttgcggctcccgtggaggttacggcgctgtatgcgaccgacgggtgcgttatcacctcctcgctcgccctcctcacaaactgcctgctgggggccgagccgttgtatatattcagctacgacgcgtaccggtccgatgcgcccaatggccccacgggcgcgcccaccgaacaggagaggttcgaggggagccgggcgctctaccgggatgcgggggggctaaatggcgattcatttcgggtgaccttttgtttattggggacggaagtgggcgtgacccaccacccgaaagggcgcacccggcccatgtttgtgtgccgcttcgagcgagcggacgacgtcgccgtgctccaagacgccctgggccgcgggaccccattgctcccggcccacgtcacagcaactctggacttggaggcgacgtttgcgctccacgctaacatcatcatggctctcaccgtggccatcgtccacaacgcccccgcccgcatcggcagcggcagcaccgcccccctgtatgagcccggcgaatcgatgcgctcggtcgtcgggcgcatgtccctggggcagcgcggcctcaccacgctgttcgtgcaccacgaggcgcgcgtgctggcggcgtaccgccgggcgtattatgggagcgcccaaagccccttttggtttctgagcaaattcggcccggacgaaaagagcctggtgctggccgctaggtactacctactccaggctccgcgcttggggggcgccggagccacgtacgatctgcaggccgtgaaagacatctgcgcgacctacgcaatcccccacgacccacgccccgacaccctcagtgccgcgtccttgacctcgttcgccgccatcactcggttctgttgcacgagccagtactcccgcggggccgcggccgctgggtttccgctgtatgtggagcgccgcatcgccgccgacgtacgcgagaccggcgcgctggagaagttcatcgcccacgatcgcagctgcctgcgcgtgtccgaccgggaattcattacgtacatctacctggcccactttgagtgcttcagccccccgcgcctggccacgcatctccgggccgtgaccacccacgaccccagccccgcggccagcacggagcagccctcgcccctgggtcgggaggcggtggaacagttcttccggcacgtgcgcgcccagctgaacatccgcgagtacgtaaagcaaaacgtcacccccagggaaaccgccctggcgggagacgcggccgccgcctacctgcgcgcgcgcacgtatgccccggcggccctcacgcccgcccccgcgtactgcggggtcgcagactcgtccaccaaaatgatgggacgtctggcggaagcagaaaggctcctagtcccccacggctggcccgcgttcgcaccaacaacccccggggacgacgcggggggcggcactgccgccccccagacctgcggaatcgtcaagcgcctcctcaagctggccgccacggagcagcagggcacgacgcccccggcgatcgcggctctcatgcaggacgcgtcggtccaaacccccctgcccgtgtacaggattaccatgtccccgaccggccaggcgtttgccgcggcggcgcgggacgactgggcccgcgtgacgcgggacgcgcgcccgccggaagcgaccgtggtcgcggacgcggcggcggcgcccgagcccggcgcgctcggccggcggctcacgcgccgcatttgcgcccggggccccgcgctccccccgggcggcctggccgtcgggggccagatgtacgtgaaccgcaacgagatcttcaacgccgcgctggccgttacgaacatcatcctggatctggacatcgccctgaaggagcccgtcccctttccccggctccacgaggccctgggtcactttaggcgcggggcgctggcggcggttcagctgttgtttcccgcggcccgcgtagaccccgacgcctatccctgttattttttcaaaagcgcctgtcggccccgcgcgccgcccgtctgtgcgggcgacgggccctcggccggtggcgacgacggcgacggggactggttccccgacgccggtggtcccggcgacgaggagtgggaggaggacacggaccccatggacacgacccacggccccctcccggacgacgaggccgcgtacctcgacctgctacacgaacagataccagcggcgacgcccagcgaaccggactccgtcgtgtgttcctgcgccgacaagatcgggctgcgcgtgtgcctaccggtccccgccccgtacgttgtgcacggctccctgacgatgcgtggggtggcgagggtgatccagcaggcggtgctgttggaccgcgacttcgtggaggccgtagggagccacgtaaagaactttttgctgatcgatacgggcgtgtacgcccacggccacagcctgcgcttgccgtatttcgccaagatcggccccgacggctccgcgtgcggccggttattgcccgtcttcgtgatcccccccgcgtgcgaggacgttccggcgttcgtcgccgcgcacgccgacccgcggcgcttccactttcacgccccgcccatgttttccgcggccccgcgggagatccgcgtcctccacagcctgggcggggactatgtcagctttttcgagaagaaggcgtcgcgcaacgccctggagcactttgggcgacgcgagaccctgacggaggttctgggccgctacgatgtgcggcccgacgccggggagaccgtggaggggttcgcgtcagaactgctggggcgaatagtcgcgtgcatcgaggctcactttcccgagcacgcgcgggaatatcaggccgtgtccgttcgccgggccgtcattaaggacgactgggtcctgctgcagctgatccccggccgcggcgccctgaaccaaagcctctcgtgtctgcgcttcaagcacggcagggcaagtcgcgcgacggcccggacctttctcgcgctgagcgtcgggaccaacaaccgcctatgcgcgtccctgtgtcagcagtgctttgccactaaatgcgataacaaccgcctgcacacgctgtttaccgtcgatgcgggcacgccatgctcgcggtccgctccctccagcacctcacgaccgtcatcttcataa

SEQ ID NO: 12076 - DNA, 60 bp, unidentified; identical to SEQ ID NO: 3158
  misc_feature 1..60: note = Synthetic
  source 1..60: mol_type = other DNA

SEQ ID NO: 12077 - DNA, 582 bp, unidentified
  misc_feature 1..582: note = Synthetic
  source 1..582: mol_type = other DNA
atgggcatccgcgtgcagaagaggtccaacttccacgtgtcgaacaagctcatccacctgcggaacgtgctccggcggctgctctccaagcagtgctcggaggaggtcatccgcgacctgcgcgcgatgatggaccggcaccagatccggcccgaggacgtggacgccaactacgtctccagcttcctcaaggacagcgagatgatcaacaagaaggactacaagctggtcttcgagatcatcaaccaggtcaaaaacgagaagctggacctcagcaccgagaagatcaacgaggtcatcgagatattcaagcagctggtcttcttctgccaggagatcacgcccaccaaaaccatcaactactccttcttcctggacaagatcttcgaggtcacgggcgtgacgcgcaacctgcgtccgcagaccgtgaagaactacgcgaagaacaacagcaaccagctcacctgggagaacttcctcgcgcacatgcgcgcgcgcaagcgcgccgcgcagatcccggagttcggccacgagtacgtgttctcgcccgcgcgcttcgcggcgtgctcgctcgacctttga

SEQ ID NO: 12078 - DNA, 270 bp, unidentified
  source 1..270: mol_type = other DNA
  misc_feature 1..270: note = Synthetic
aagacacagatcgcgcccaagacaaggagtccggacacgagccccgcaagggccaaactgtggttttcgtcacgcggcgaactgccgcccgctttctccttgaccttggccgtgctcatcttcttcctgcatgttccgggcatgttatttcagttaatacacagcctccaaaaaagtgaagatcgagtctgcacaccttccgaaagccatggcgcacgagccaatccccttctctttcctgcggaatctgctggcagagctggacgctag

SEQ ID NO: 12079 - DNA, 57 bp, unidentified; identical to SEQ ID NO: 3163
  misc_feature 1..57: note = Synthetic
  source 1..57: mol_type = other DNA

SEQ ID NO: 12080 - DNA, 72 bp, unidentified; identical to SEQ ID NO: 3164
  source 1..72: mol_type = other DNA
  misc_feature 1..72: note = Synthetic

SEQ ID NO: 12081 - DNA, 57 bp, unidentified; identical to SEQ ID NO: 3165
  misc_feature 1..57: note = Synthetic
  source 1..57: mol_type = other DNA

SEQ ID NO: 12082 - DNA, 372 bp, unidentified
  source 1..372: mol_type = other DNA
  misc_feature 1..372: note = Synthetic
atgggaggtagccctgttccccagctcaccaccgtcactcaaggactcatgccatctgtgcgcatggactttcgggctcgccggcccttgcgccgcttggctttctacgcgccgcgagctcgtcggaggcttttccagaatcatatacatccagaacagcgccgagtgctggtcggtgagggagatgaagagatgttgccggatctgccgatggagatcgacatcgtcatcgaccgacctccgcagcaacccctacccaatccgctggtgctactgctggacgatgttcccccccatgtacccggttttgctccctaccgcgtcccccgtccccaccccatgattcccgaagaacattgggaccagttttaa

SEQ ID NO: 12083 - DNA, 78 bp, unidentified; identical to SEQ ID NO: 3168
  source 1..78: mol_type = other DNA
  misc_feature 1..78: note = Synthetic

SEQ ID NO: 12084 - DNA, 6600 bp, unidentified
  source 1..6600: mol_type = other DNA
  misc_feature 1..6600: note = Synthetic
atagacatcagaattaagaaaaacgtagggtccaagtggtttcccgttatggactcgctatctgtcaaccagatcttataccctgaagttcacctagatagcccgatagttaccaataagatagtagctatcctggagtatgctcgagtccctcacgcttacagcctggaggaccctacactgtgtcagaacatcaagcaccgcctaaaaaacggattctccaaccaaatgattataaacaatgtggaagttgggaatgtcatcaagtccaagcttaggagttatccggcccactctcatattccatatccaaattgtaatcaggatttatttaacatagaagacaaagagtcaacaaggaagatccgtgagctcctaaaaaagggaaattcgctgtactccaaagtcagtgataaggttttccaatgcctgagggacactaactcacggcttggcctaggctccgaattgagggaggacatcaaggagaaaattattaacttgggagtttacatgcacagctcccaatggtttgagccctttctgttttggtttacagtcaagactgagatgaggtcagtgattaaatcacaaacccatacttgccataggaggagacacacacctgtattcttcactggtagttcagttgagctgttaatctctcgtgaccttgttgctataatcagtaaggagtctcaacatgtatattacctgacgtttgaactggttttgatgtattgtgatgtcatagaggggaggttaatgacagagaccgctatgaccattgatgctaggtatgcagaacttctaggaagagtcagatacatgtggaaactgatagatggtttcttccctgcactcgggaatccaacttatcaaattgtagccatgctggagccactttcacttgcttacctgcaactgagggatataacagtagaactcagaggtgctttccttaaccactgctttactgaaatacatgatgttcttgaccaaaacgggttttctgatgaaggtacttatcatgagttaattgaagccctagattacattttcataactgatgacatacatctgacaggggagattttctcatttttcagaagtttcggccaccccagacttgaagcagtaacggctgctgaaaatgtcaggaaatacatgaatcagcctaaagtcattgtgtatgagactctgatgaaaggtcatgccatattttgtggaatcataatcaacggctatcgtgacaggcacggaggcagttggccacccctgaccctccccctgcatgctgcagacacaatccggaatgctcaagcttcaggtgaagggttaacacatgagcagtgcgttgataactggaaatcatttgctggagtgagatttggctgttttatgcctcttagcctggacagtgatctgacaatgtacctaaaggacaaggcacttgctgctctccaaagggaatgggattcagtttacccgaaagagttcctgcgttacgatcctcccaagggaaccgggtcacggaggcttgtagatgttttccttaatgattcgagctttgacccatatgatatgataatgtatgtcgtaagtggagcctacctccatgaccctgagttcaacctgtcttacagcctgaaagaaaaggagatcaaggaaacaggtagacttttcgctaaaatgacttacaaaatgagggcatgccaagtgatcgctgaaaatctaatctcaaacgggattggcaagtattttaaggacaatgggatggccaaggatgagcacgatttgactaaggcactccacactctggctgtctcaggagtccccaaagatctcaaagaaagtcacaggggggggccagtcttaaaaacctactcccgaagcccagtccacacaagtaccaggaacgttaaagcagaaaaagggtttgtaggattccctcatgtaattcggcagaatcaagacactgatcatccggagaatatagaaacctacgagacagtcagcgcatttatcacgactgatctcaagaagtactgccttaattggagatatgagaccatcagcttatttgcacagaggctaaatgagatttacggattaccctcattttttcagtggctgcataagaggcttgaaacctctgtcctctatgtaagtgaccctcattgcccccccgaccttgacgcccatgtcccgttatgcaaagtccccaatgaccaaatcttcatcaagtaccctatgggaggtatagaagggtattgtcagaagctgtggaccatcagcaccattccctacttatacctggctgcttatgagagcggggtaaggattgcttcgttagtgcaaggggacaatcagaccatagccgtaacaaaaagggtacccagcacatggccttacaaccttaagaaacgggaagctgctagagtaactagagattactttgtaattcttaggcaaaggctacatgacattggccatcacctcaaggcaaatgagacaattgtttcatcacatttttttgtctattcaaaaggaatatattatgatgggctacttgtgtcccaatcactcaagagcatcgcaagatgtgtattctggtcagagactatagttgatgaaacaagggcagcatgcagtaatattgctacaacaatggctaaaagcatcgagagaggttatgaccgttatcttgcatattccctgaacgtcctaaaagtgatacagcaaattttgatctctcttggcttcacaatcaattcaaccatgacccgagatgtagtcatacccctcctcacaaacaacgatctcttaataaggatggcactgttgcccgctcctattggggggatgaattatctgaatatgagcaggctgtttgtcagaaacatcggtgatccagtaacatcatcaattgctgatctcaagagaatgattctcgcatcactaatgcctgaagagaccctccatcaagtaatgacacaacaaccgggggactcttcattcctagactgggctagcgacccttactcagcaaatcttgtatgcgtccagagcatcactagactcctcaagaacataactgcaaggtttgtcctaatccatagtccaaacccaatgttaaaagggttattccatgatgacagtaaagaagaggacgagagactggcggcattcctcatggacaggcatattatagtacctagggcagctcatgaaatcctggatcatagtgtcacaggggcaagagagtctattgcaggcatgctagataccacaaaaggcctgattcgagccagcatgaggaagggggggttaacctctcgagtgataaccagattgtccaattatgactatgaacaatttagagcagggatggtgctattgacaggaagaaagagaaatgtcctcattgacaaagagtcatgttcagtgcagctggctagagccctaagaagccatatgtgggcaagactagctcgaggacggcctatttacggccttgaggtccctgatgtactagaatctatgcgaggccaccttattcggcgtcatgagacatgtgtcatctgcgagtgtggatcagtcaactacggatggttttttgtcccctcgggttgccaactggatgatattgacaaggaaacatcatccttgagagtcccatatattggttctaccactgatgagagaacagacatgaagctcgccttcgtaagagccccaagtagatccttgcgatctgccgttagaatagcaacagtgtactcatgggcttacggtgatgatgatagctcttggaacgaagcctggttgttggcaaggcaaagggccaatgtgagcctggaggagctaagggtgatcactcccatctcgacttcgactaatttagcgcataggttgagggatcgtagcactcaagtgaaatactcaggtacatcccttgtccgagtggcaaggtataccacaatctccaacgacaatctctcatttgtcatatcagataagaaggttgatactaactttatataccaacaaggaatgcttctagggttgggtgttttagaaacattgtttcgactcgagaaagatactggatcatctaacacggtattacatcttcacgtcgaaacagattgttgcgtgatcccgatgatagatcatcccaggatacccagctcccgcaagctagagctgagggcagagctatgtaccaacccattgatatatgataatgcacctttaattgacagagatgcaacaaggctatacacccagagccataggaggcaccttgtggaatttgttacatggtccacaccccaactatatcacattctagctaagtccacagcactatctatgattgacctggtaacaaaatttgagaaggaccatatgaatgaaatttcagctctcataggggatgacgatatcaatagtttcataactgagtttctgcttatagagccaagattattcaccatctacttgggccagtgtgcagccatcaattgggcatttgatgtacattatcatagaccatcagggaaatatcagatgggtgagctgttgtcttcgttcctttctagaatgagcaaaggagtgtttaaggtgcttgtcaatgctctaagccacccaaagatctacaagaaattctggcattgtggtattatagagcctatccatggtccttcacttgatgctcaaaacttgcacacaactgtgtgcaacatggtttacacatgctatatgacctacctcgacctgttgttgaatgaagagttagaagagttcacatttcttttgtgtgaaagcgatgaggatgtagtaccggacagattcgacaacatccaggcaaaacacttgtgtgttctggcagatttgtactgtcaaccagggacctgcccaccgattcgaggtctaaggccggtagagaaatgtgcagttctaaccgatcatatcaaggcagaggctaggttatctccagcaggatcttcgtggaacataaatccaattattgtagaccattactcatgctctctgacttatctccgtcgaggatctatcaaacagataagattgagagttgatccaggattcatttttgacgccctcgctgaggtaaatgtcagtcagccaaaggtcggcagcaacaacatctcaaatatgagcatcaaggatttcagacctccacacgatgatgttgcaaaattgctcaaagatatcaacacaagcaagcacaatcttcccatttcagggggtagtctcgccaattatgaaatccatgctttccgcagaatcgggttaaactcatctgcttgctacaaagctgttgagatatcaacattaattaggagatgccttgagccaggggaagacggcttgttcttgggtgaggggtcgggttctatgttgatcacttataaggagatactaaaactaaacaagtgcttctataatagtggggtttccgccaattctagatctggtcaaagggaattagcaccctatccctccgaagttggccttgtcgaacacagaatgggagtaggtaatattgtcaaggtgctctttaacgggaggcccgaagtcacgtgggtaggcagtatagattgcttcaatttcatagtcagtaatatccctacctctagtgtggggtttatccattcagatatagagaccttacctaacaaagatactatagagaagctagaggaattggcagccatcttatcgatggctctactccttggcaaaataggatcaatactggtgattaagcttatgcctttcagcggggattttgttcagggatttataagctatgtagggtctcattatagagaagtgaaccttgtctaccctaggtacagcaacttcatatctactgaatcttatttagttatgacagatctcaaagctaaccggctaatgaatcctgaaaagatcaagcagcagataattgaatcatctgtgcggacttcacctggacttataggtcacatcctatccattaagcaactaagctgcatacaagcaattgtgggaggcgcagttagtagaggtgatatcaaccctattctgaaaaaacttacacctatagagcaggtgctgatcagttgcgggttggcaattaacggacctaaactgtgcaaagaattaatccaccatgatgttgcctcagggcaagatggattgcttaactctatactcatcctctacagggagttggcaagattcaaagacaaccaaagaagtcaacaagggatgttccacgcttaccccgtattggtaagtagtaggcaacgagaacttgtatctaggatcactcgcaaattttgggggcatattcttctttactccgggaacagaaagttgataaatcggtttatccagaatctcaagtccggttatctagtactagacttacaccagaatatcttcgttaagaatctatccaagtcagagaaacagattattatgacggggggtttaaaacgtgagtgggtttttaaggtaacagtcaaggagaccaaagaatggtacaagttagtcggatacagcgctctgattaaggattaa

SEQ ID NO: 12085 - DNA, 69 bp, unidentified
  source 1..69: mol_type = other DNA
  misc_feature 1..69: note = Synthetic
atgctcgagtccctcacgcttacagcctggaggaccctacactgtgtcagaacatcaagcaccgcctaa

SEQ ID NO: 12086 - DNA, 27 bp, unidentified
  misc_feature 1..27: note = Synthetic
  source 1..27: mol_type = other DNA
gtgcgctaccaccccagcatcctttaa

SEQ ID NO: 12087 - DNA, 225 bp, unidentified
  misc_feature 1..225: note = Synthetic
  source 1..225: mol_type = other DNA
atggctctcacttgccgcctgcgcattcccgtcccgaattaccgaggaagatcccgccgcaggagaggcatggcaggcagcggcctaaaccgccgccggcggcgggccatgcgcaggcgcctgagtggcgggttcctgcctgcgcttatccccataatcgccgcggccattggcacgatcccgggcatagcttccgttgcgctgcaagcgtcgcagcgccgttaa

SEQ ID NO: 12088 - DNA, 27 bp, unidentified
  misc_feature 1..27: note = Synthetic
  source 1..27: mol_type = other DNA
gtgcgctaccaccccagcatcctttaa

SEQ ID NO: 12089 - DNA, 225 bp, unidentified
  source 1..225: mol_type = other DNA
  misc_feature 1..225: note = Synthetic
atggctctcacttgccgcctgcgcatccccgtcccgaattaccgaggaagatcccgccgcaggagaggcatggcaggcagcggcctgaaccgccgccggcggcgggccatgcgcaggcgcctgagtggcggctttctgcccgcgctcatccccataatcgccgcggccatcggcacgatcccgggcatagcttccgttgcgctgcaggcgtcgcagcgccgttga

SEQ ID NO: 12090 - DNA, 72 bp, unidentified
  misc_feature 1..72: note = Synthetic
  source 1..72: mol_type = other DNA
ttgaatcacagcaggtcacaccgaatgaccatgctaacgctagagcattttcgcatctggctactaaactga

SEQ ID NO: 12091 - DNA, 3039 bp, unidentified
  source 1..3039: mol_type = other DNA
  misc_feature 1..3039: note = Synthetic
atgaaattttattccggattcaaaatggagatccggtgtctcaactggttcgaggcacgcggcgaggagcgcgcgctctacctcaaggccaagacccgcgccggagacactctcttcgtacgcttcccgcattactactactatgtggtcgacgggggcacgctgagcacgctcgcgccgccaccgcgcgccgccagcgctctgggcgagttcgagctcgcctgcatcgacgagacgctggcgcgcgcggacgcgctgcacgcgcccacgcgcccgcgctcgcagctctggctgctggaggaggcgcagccgcggcagatcgcgggcgcgctgctggccgagttcatgcacattacctggttcttcttgcgcaacgaaatcgagcccaacggttgctaccgcgtgccggacgccgagctcgagcccgtgtgcgcgcgctgcttccactgcgccgcgccgcggcgcgcctttgccacgcgcgtgcccctcttcgaggtcacgcacacgtatctcttttttgatatcgagtgccagttcgacaagaagttcccctctgtcttcagtaaccccgtctcgcacatcagcttttgctacgtggacaggctcggtacggaagtacgctttagcttgctcaacagtgacctgctgtctgaggactcgctccgcggctgccgacgcattgccacccccgatgagttcgcgctggagccgggcgtgaccttctgcagcgaggtggtgcttctgcagctgaccaagcgcctgctggagcggcactttgacttcatcgtgaccttcaacggcaacaacttcgacattcgctacgtctcgaaccggctgcagctgctcacgcagagcagcgtgtgcttccgcttgccggaccagcgcgagcccgtgaagctggtcatctacgagcgcagcctggccagccaccgcggcgcgggcggtatggccaacacttccttccacgtgaacaacaacaacggcaccatcttcttcgacctctacactttcatccagaaggccgagcgcttggactcctacaagctcgacagcatctcgaagaatgtcttccactgccgcgcgcgcgtgctggacgcaggcgcgggcgagtgcacgctggcgggcggcccggacgccaacgccgaggaccgcctgcgcctcttctgcgaggtgctgcagaccggcaactacgtcacgctggacacggtgcacgtgtgccgcattctcggcaagcgcttcttcgagcacggattcgcgctacgcgtgcgctgcgcagagagttacgcgcccgggagcctgtgcgagctggcctttggcaaggacgacgtggacctgcgcgagctgtaccggcactacagcctggcggccgcgctcgagatggagcgctactgcatgcacgacgcctgcctctgcaagtacctctggagctactaccgcgtgcccagcaagatcgacgcagcggccgccacgtacctgctgccgcagtgcctggcgctggagtacagagccagcacgctcatcaaggggccgctgctgcgcttgatgctgcgcgagcgcgtggtctacgtgcgcacgcaggagccggcgcgctatacctacggcggcggcaaggtcttcctgccacggcagaaactcttcgataccaacgtcatggtctttgactacaacagcctctatcccaacgtctgcatcttcggcaacctgtccccggaaacgctggtgggggtggtggccaacgcgcaccgcctcgacgccgagatcaacatgcaggaactacgccgccgcttcccggagcccgcgttcctgcacgtgctgtgcgaagcgcgcgcgcgcgacggctacagcgagatcgccgtctttgaccggcgccgccagggcatcattcccaagctgctgggcaccttcatggagcagcgcgcgcgctacaaggcgctcatgcgcgccgccagcagcgggctggagcgcacgctctacgactccatgcagtacgtgtacaaggtggtggccaactcggtctatggactcatgggcttttacaacagctcgctgtactcgtacagctccgccaagtgctgcaccacgatcggacgcgtcatgatcacgtacctggaccgtgtggtggacggcgccacgctctgcgcgggcgtgctgcgcctggccgcggagccgcgaaacccgctcctggccagcgcgccgccgcgcgcgcgcgacgtggacgtgtctgccgcgctagggcacgagctcgagctgcgcttccgcagcgtctacggcgacacagactcgatcttcctagagctgaatctgcgcgaggtgcaaaccacgctggccgtggcacgcacgctcgagcgcgtgctgaacgagcacgtgctcttcgagaacttccgcgtcgagttcgaggcgatctaccagaaccttatcctgcagtccaaaaaaaagtacagcaccaccaagtacgcagcggaccaccgcgcaggcgacgcgcctgagcatgtgagcaagggcaccagtgagacgcggcgcgacgtctcgcgcttccacaagctcatgatctcgcgctacaaggcgcagctcgtggcgctgctggccgaggcgcggctcagctccaggcaggtttgcatcgagatgcttcgcagcctggaagtagacctgttcgccgagttcgcggcgcgcgcgcagccgctcgaaatgttcctactcagcaggatgcaccaccgcaactacaaagcgcccgacaaccccaacgtggagctggtcaaccgctacaaccgcgagaacctggagcccatcgagctgggcgagcgctactactacgcatacgtctgcgcctccgagctgccatggcagctcgccgtggccaacgtgcgcaaccacgagcgcatcgtggacgcgagctacgtgcttcccgagcgcgagcgcgtcttttacgagatctacttccggcgcctggctaccgagctcgtgaatctgctcgacaacaagccactatgtgcggagtttttcacgcggctcttcggcgtgcgccccgtcttctcgaactag

SEQ ID NO: 12092 - DNA, 21 bp, unidentified
  misc_feature 1..21: note = Synthetic
  source 1..21: mol_type = other DNA
atgacccgccgatgtcgttga

SEQ ID NO: 12093 - DNA, 15 bp, unidentified
  source 1..15: mol_type = other DNA
  misc_feature 1..15: note = Synthetic
atggaagatacttag

SEQ ID NO: 12094 - DNA, 354 bp, unidentified
  misc_feature 1..354: note = Synthetic
  source 1..354: mol_type = other DNA
atggaaaccttccatatgctgcgctccatggagcgcaagttctacgcggacctggctctcgcgctgcccgcgcacaagagcgccttcgcgcaccgcgacatgctcttcatcttctacgcgcccaaggcggctacggtggctcgctatctggccgcggccgacgtgtgccacagcgacatgaccgtgctgggcaagctgcacattggcgggcgcaagctgctgctagtacacatggacctgttctactacgggctttcgcgagcgggagccatgtacaggctgggccgcagcattgcgcgcctgtccctggatagcaggaaggtctacgcgcacatcagcgcagagtcagcgtaa

SEQ ID NO: 12095 - DNA, 7425 bp, unidentified; identical to SEQ ID NO: 11754
  source 1..7425: mol_type = other DNA
  misc_feature 1..7425: note = Synthetic

SEQ ID NO: 12096 - DNA, 1812 bp, unidentified
  source 1..1812: mol_type = other DNA
  misc_feature 1..1812: note = Synthetic
atgcgccagtcctatcgctacgcgtctggggccgttgttcggaggaccctcaagggtttacgaaagctcattctctgccaagacttgcggcaggacatccgccacttagttcgtagctatgctgatatgaacattagccttcccgtttcagcgccacccggatggcgtctagattttgtagagtttgaggacatctttggcagcgcggctgtcaccgacgggcccgaaacgccctggggtcagctcatctgctgcgaagagtcgctcgagtctctgggcgtcctgcagttctctaccaccgtgttgcccagagtacacgggccgcggtcctcttctgaggacgaggactcggacgatgacgactttttcgtatatgtagaggaaattgagccacctagccaggcccgtctggtgctcctgctaggacgttacgaaaccgtgtggtgtttagaccgcgattgcggggtgctttactacctggcgcacagtctggatgattttgcgcgacacggactgttgcactgcgaggccatctacggcgagcagatgcgcacgccgctgctaaccacgcaaccggatcatattatctgcgaccttcgcctgcacgacaacagcatcagcgaactgcagcgtgtgacctgtcgttatcgcggcgaatgcgtgcctctgcgcactccaggcgagatgacgcgtccgttgctgctctgcggccaggccgagaacctcaaaggcgtctggcccttcatctgtatggagacggagcaattcaacgacctgttgaagttctttgtggaccgcttatgctgcgaaaccatgataatgggtgtggtgggcgagtcgctaccctccggcgtctttcacgccgatttcgtgatcctggtcgaccgagcctgtgaatttttctattttgacgtgtctcgacgcgagatctggcggttggctgacagcgtggatatgttgttaaccgtgggtctgctcaaaatttaccaggccggccggcgttttcactacgccgtggacgacgccgaacgtctggaagtgccgggtcgctgccctcacgaaaactttcccttctgggaccgctttgggaccgtggagcgtgtacgggcctctacacgccatcacgaactacgttataaatggttaatccgcaaggacaggtttatcgtccgacccgactggtgctctatgcgtaacagtctggacgaagtctctggcaccgccgatgtcagttgggatccgcggatccgacccgactatccacaaacctccgatctggagtgtgccaaacaatattggcaagagctcaacgatcatgtacgcgaacaaacagcccgctacgggcccgtgcggcgttacagcgtctggtgcggcatgagctctcgcctggaacgggcggttaaacgtctacaacagcggattccccgtcagaacctgatgaatcccagcctgatgaaccagggactatgcgtctactactcggacgaagaagaggatcaagaggaagacgacacgtccgacgatgacgaccaagaaaaggaaaccgaaaatccacaaaacaacattggaagcctcactaggactccctcctccccaggatccctggagggcgtcgaggaacgcatgctgaacgtgatgaaagaggccgtcgcggaacaagataggaaaaagacacagaagaaacacaagatagatacggcgcaacgccgggtgctcacccgccgggcggcccgggccgccgtgctggagggccgccccacgcccaaacctaccatgcctcatcctgtttcttacttgcccttttggatgtaa

SEQ ID NO: 12097 - DNA, 2919 bp, unidentified
  misc_feature 1..2919: note = Synthetic
  source 1..2919: mol_type = other DNA
aagccgtgcagcaaccgcaggaagctcatcgtctggcccgtggggaaaatgtcgatgacggcctcgtcatccacgccgcggcccacgcccaagtacgacgacgccttgatcctcaacctctcgtcggccgccaagatcgaacggatcgtcgacaaggtcaagtccctctcgcgcgagcgctttgcgcccgaggatttttcgttccagtggtttcgctccatcagtcgcgttgaacgaacgacagataacaacccctctgccgcaactaccgccgcggcaacggcgaccgttcactcctccgtctcctcttctgccgccgctgccgcttcgtccgaggccggcggcacgcgcgtgccctgcgtcgaccgttggcccttctttcccttccgcgcgctgctcgtcaccggcacggcgggcgccggcaagacttccagcatccaggtgctggcggccaatctagattgcgtgatcaccggtaccacggtgatcgccgcgcagaacctcagcgcgatcctcaaccgcactcgctcggcgcaggtcaagaccatctaccgcgtcttcggcttcgtcagcaagcacgtgccgctggctgacagcgccgttagccacgagacgctggaacgctaccgcgtgtgcgagccgcacgaggagaccaccatccagcgcctgcagatcaacgatctgctcgcctactggccggtcatcgccgacatcgtggacaaatgcttaaatatgtgggagcgcaaggccgcttcggcctccgccgcggccgcggccgccgcctgcgaggacctctcggagctgtgcgagagcaatatcatcgtcatcgacgagtgcggccttatgctgcgctacatgctgcaggtggtggtgtttttttactacttttacaacgccctgggggacacgcgactttaccgcgaacgccgcgtgccctgcatcatctgcgtcggttcgcccacgcagaccgaggcgctggagagccgctacgaccactacacgcaaaacaagagcgtgcgcaagggcgttgacgtgctctcggcgctgattcagaacgaagtgctcatcaactactgcgacatcgccgacaactgggtcatgtttattcacaacaagcgttgcaccgacctggactttggcgacctgctcaagtacatggagttcggtatcccgctcaaggaggagcacgtggcctacgtggaccgcttcgtgcggccgcccagctccatccgcaacccctcgtacgccgccgagatgacgcggctttttctctcgcacgtcgaggtgcaggcttacttcaagcggctgcacgagcagatccgcctgagcgagcgccaccgtctctttgatctgcccgtctactgcgtggtcaacaaccgcgcgtaccaggagctctgcgagctggccgacccgctgggcgactcgccgcagcccgtcgagctctggttccgccagaacttggcgcgcatcattaactactcgcagtttgtcgaccacaacctctccagcgagatcaccaaggaggcgctgcgccccgcggccgacgtcgttgccaccaacaacccctccgtccaggctcacggagggggaggatctgtaatcgggagcaccggcggcaacgacgagacggcgtttttccaggacgatgataccaccaccgcgcccgatagccgtgagacgctgctcaccttgcgcattacctacatcaagggcagttcggtgggagtcaactctaaggtgcgggcctgtgttatcggataccagggcacggtcgaacgtttcgtggacatcttgcaaaaggacacgtttatcgaacgcacgccctgcgagcaggcggcctacgcctactcgttagtttcgggcctgctcttctcggccatgtactacttttacgtgtcgccctacacgaccgaggagatgttgcgtgagctggcgcgcgttgagctgcccgacgtgagttcgctctgcgccgctgccgccgccacggccgccgctcccgcttggagcgggggagagaatccgataaataatcacgtcgacgcggattcttctcagggcggccagagcgtgccggtatctcaacggatggaacatggccaagaggagacccacgacatcccctgcctgtccaaccaccatgacgactcggacgccatcacggacgccgaactcatggatcacaccagtctgtacgcggatcccttttttctcaaatacgtcaagccacctagcctggcgctgctttctttcgaggagacggtgcacatgtacactaccttccgcgacatttttctcaagcgctaccagctcatgcagcgtctcacgggcggtcgcttcgccacgttgccgctcgttacctacaatcgccgtaacgtggtgttcaaggccaactgtcagatcagctcgcagaccggctccttcgtgggcatgctttcgcatgtgtcgccggcgcagacgtacacgctcgagggctacaccagcgacaacgtgctcagtctgcccagtgaccgccaccgcatccaccccgaggtggtgcagcgcggcctttcgcggctggtgctacgcgatgcgctcgggttcctctttgtgctcgacgttaacgtctcgcgcttcgtcgagtcggcgcagggcaagagtctgcacgtgtgcaccaccgtggactacggcctcacttcgcgcacggccatgaccatcgccaagagtcagggcctgtcgctcgagaaggtggccgtggactttggggaccatcccaagaacctcaagatgagccacatctacgtggccatgtcgcgagtcacggaccccgagcacctcatgatgaacgtcaacccgttgcgacttccctatgagaagaacaccgctatcaccccctatatctgtcgcgcgctcaaagacaaacgcaccacgcttattttttga

SEQ ID NO: 12098 - DNA, 90 bp, unidentified; identical to SEQ ID NO: 3192
  source 1..90: mol_type = other DNA
  misc_feature 1..90: note = Synthetic

SEQ ID NO: 12099 - DNA, 39 bp, unidentified; identical to SEQ ID NO: 3193
  misc_feature 1..39: note = Synthetic
  source 1..39: mol_type = other DNA

SEQ ID NO: 12100 - DNA, 192 bp, unidentified
  misc_feature 1..192: note = Synthetic
  source 1..192: mol_type = other DNA
atctacttgctctccaggaaatacatggcaaccggaacttccaaaatgtgtacgctaataaacataaaacataaaaattatacaatggtttatgttagctactttgtgtccgttgatataaaatggatactattaaaatatttaatcatggagagtttgatactattagaaataaattggtcaacttgttaa

SEQ ID NO: 12101 - DNA, 33 bp, unidentified; identical to SEQ ID NO: 3195
  source 1..33: mol_type = other DNA
  misc_feature 1..33: note = Synthetic

SEQ ID NO: 12102 - DNA, 30 bp, unidentified; identical to SEQ ID NO: 3199
  source 1..30: mol_type = other DNA
  misc_feature 1..30: note = Synthetic

SEQ ID NO: 12103 - DNA, 3747 bp, unidentified
  misc_feature 1..3747: note = Synthetic
  source 1..3747: mol_type = other DNA
atggagttcatcccaacccaaactttttacaacaggaggtaccagcctcgaccctggactccgcgccctactatccaagtcatcaggcccagaccgcgcccgcagaggcaagctgggcaacttgcccagctgatctcagcagttaataaactgacaatgcgcgcggtaccccaacagaagccacgcaagaatcggaagaataagaagcaaaagcaaaagcagcaggcgccacaaaacaacacaaaccaaaagaagcagccacctaaaaagaaaccagctcaaaagaaaaagaagccgggccgcagagagaggatgtgcatgaaaatcgaaaatgactgtattttcgaagtcaagcacgaaggtaaggtaacaggttacgcgtgcttggtgggggacaaagtaatgaaaccagcacacgtaaaggggaccatcgataacgcggacctggccaaattggcctttaagcggtcatctaagtacgaccttgaatgcgcgcagatacccgtgcacatgaagtccgacgcttcgaagttcacccatgagaaaccggaggggtactacaactggcaccacggagcagtacagtactcaggaggccggttcaccatccctacaggtgcgggcaaaccaggggacagcggtagaccgatcttcgacaacaagggacgcgtggtggccatagtcttaggaggagctaatgaaggagcccgtacagccctctcagtggtgacctggaataaagacattgtcactaaaatcacccctgagggagccgaagagtggagtcttgccatcccagttatgtgcctgttggcaaataccacgttcccctgctcccagcccccttgcataccctgctgctacgaaaaggaaccggaggaaaccctacgcatgcttgaggacaacgtcatgagacctgggtactatcagctgctacaagcatcattaacatgttctccccaccgccagcgacgcagcaccaaggacaacttcaatgtctataaagccacaagaccatacctagctcactgtcccgactgtggagaagggcactcgtgccatagtcccgtagcactagaacgcatcagaaatgaagcgacagacgggacgctgaaaatccaggtctccttgcaaattggaatagggacggatgatagccatgattggaccaagctgcgttacatggacaatcacataccagcagacgcagggagggccgggctatttgtaagaacatcagcaccatgcacgattactggaacaatgggacacttcatcctggcccgatgtccgaaaggagaaactctgacggtgggattcactgacagtaggaagattagtcactcatgtacgcacccatttcaccacgaccctcctgtgataggccgggaaaaattccattcccgaccgcagcacggtaaagagctaccttgcagcacgtacgtgcagagcaacgccgcaactgccgaggagatagaggtacacatgcccccagacacccctgatcgcacattgctgtcacaacagtccggcaacgtaaagatcacagtcaatagtcagacggtgcggtataagtgtaattgcggtggctcaaatgaaggactaataactacagataaagtgattaataactgcaaggttgatcaatgtcatgccgcggtcaccaatcacaaaaagtggcagtataactcccctctggtcccgcgtaacgctgaactcggggaccgaaaaggaaaaattcacatcccgtttccgctggcaaatgtaacatgcatggtgcctaaagcaaggaaccccaccgtgacgtacgggaaaaaccaagtcatcatgctactgtatcctgaccacccaacactcctgtcctaccggagtatgggagaagaaccaaactatcaagaagagtgggtgacgcacaagaaggaggtcgtgctaaccgtgccgactgaagggctcgaggttacgtggggcaacaacgagccgtataagtattggccgcagttatctgcaaacggtacagcccacggccacccgcatgagataatcttgtactattatgagctgtaccctactatgactgtagtagttgtgtcagtggcctcgttcatactcctgtcgatggtgggtatggcagtggggatgtgcatgtgtgcacgacgcagatgcatcacaccatacgaactgacaccaggagctaccgtccctttcctgcttagcctaatatgctgcatcagaacagctaaagcggccacataccaagaggctgcggtatacctgtggaacgagcagcaacctttgttttggctacaagcccttattccgctggcagccctgattgtcctatgcaactgtctgagactcttaccatgctgttgtaaaacgttggcttttttagccgtaatgagcatcggtgcccacactgtgagcgcgtacgaacacgtaacagtgatcccgaacacggtgggagtaccgtataagactctagtcaacagaccgggctacagccccatggtactggagatggagctactgtcagtcactttggagccaacgctatcgcttgattacatcacgtgcgaatacaaaaccgtcatcccgtctccgtacgtgaaatgctgcggtacagcagagtgcaaggacaaaaacctacctgactacagctgtaaggtcttcaccggcgtctacccatttatgtggggcggcgcctactgcttctgcgacgctgaaaacacgcaattgagcgaagcacatgtggagaagtccgaatcatgcaaaacagaatttgcatcagcatacagggctcataccgcatccgcatcagctaagctccgcgtcctttaccaaggaaataacatcactgtaactgcctatgcaaacggcgaccatgccgtcacagttaaggacgccaaattcattgtggggccaatgtcttcagcctggacaccttttgacaacaaaatcgtggtgtacaaaggtgacgtttacaacatggactacccgccctttggcgcaggaagaccaggacaatttggcgatatccaaagtcgcacgcctgagagcaaagacgtctatgctaacacacaactggtactgcagagaccggctgcgggtacggtacacgtgccatactctcaggcaccatctggctttaagtattggttaaaagaacgaggggcgtcgctacagcacacagcaccatttggctgccaaatagcaacaaacccggtaagagcgatgaactgcgccgtagggaacatgcccatctccatcgacataccggatgcggccttcactagggtcgtcgacgcgccctctttaacggacatgtcatgcgaggtaccagcctgcacccattcctcagactttgggggcgtcgccattattaaatatgcagtcagcaagaaaggcaagtgtgcggtgcattcgatgaccaacgccgtcactatccgggaagctgagatagaagttgaagggaattctcagctgcaaatctctttctcgacggccttggccagcgccgaattccgcgtacaagtctgttctacacaagtacactgtgcagccgagtgccaccctccgaaggaccacatagtcaactacccggcgtcacataccaccctcggggtccaggacatttccgctacggcgatgtcatgggtgcagaagatcacgggaggtgtgggactggttgtcgctgttgcagcactgattctaatcgtggtgctatgcgtgtcgttcagcaggcactaa

SEQ ID NO: 12104 - DNA, 336 bp, unidentified
  source 1..336: mol_type = other DNA
  misc_feature 1..336: note = Synthetic
atagcctttacggttttctttagactgttgcgaacttggcacctccagatggcccccgtccacgttttatgctgcgttagcgtactgcttgccacgttttacctgacgcccacagaaagcgcggggtcactcgtgtcgtacacgcctaatagctgctgctacgggttccagcagcacccaccgcccgtccaaattctaaaagagtggtatcccacgtccccagcgtgcccaaaacccggagttattttgctgaccaagcgagggcgtcagatctgcgcagacccttccaaaaactgggttaggcagctgatgcagcggctgcctgccatagcttag

SEQ ID NO: 12105 - DNA, 336 bp, unidentified; identical to SEQ ID NO: 12104
  misc_feature 1..336: note = Synthetic
  source 1..336: mol_type = other DNA

SEQ ID NO: 12106 - DNA, 210 bp, unidentified
  source 1..210: mol_type = other DNA
  misc_feature 1..210: note = Synthetic
atgccatcaggccggaccctcgggtccattgcgtcctcaagttttcgcacccgtcgcccctctccaaggttccgttcggaacctgccagcatttcctcgtggcgaaccgatacctcgagacccggtcgatttcacccatcgactggtcggtttgaaaggcatcgacgtccggggtttttgtcggtgggggcttttgggtatttccgatga

SEQ ID NO: 12107 - DNA, 1929 bp, unidentified
  misc_feature 1..1929: note = Synthetic
  source 1..1929: mol_type = other DNA
atgcgcaccaaatctccgggagatggctcgactcgcaaagcaaatcgttgggctggacaggtgcaggtagcggcaactgcgcagccgccgagtatggcgtgtttataccccgcgtgtgctcgctcgtgctgccggtggtctgcgccgtgcctttctacacttgacgcggaccgtcagcctctgtgcggcgccgtggcgcgcgacgacgttgtgctccttgtccgagcgaaccgcggcagccttgcgagaattgaacatctatgcacggcacggcaagacgacacgagggccttggcggcgcggctagcaccgcatgggccctggcggctttcctgtcatcaccccgctgggccgcatgcacctacgcgccgacatgcgcacgcgcgtcatgtgcgtggactttggcgtgaccatggacacgctgcgcgtgctgggcccctacgtggtcatggtgcccatgctcgagcctgccagcgccagcctgctggcaccgcgcgcgctccgagactgctacgtcgcggcgcacggtgtgctactgcactgcagcgagctcgcgtacctgtgcgcgcccatgacacgcatcttcgccgtctttcgcgcgcgccgccgctacgtgctctgctgcgacgactacgacgtgctgcgcacgcacgtgggcggctctgccttcagcgtgcgcaggttcacagacgcggacttcgagcgcgtgcgcgtgctcgagctctacaactacaactactgcggcgagtaccagttggtgctgctgccctccgtgcgactcctgcgccagctgcagtcttgtgctacgtactgcttggacgacgggcacggctggctagcggtcgacgcgtgcgagtgcccgctctcgcgcttccgcttcgcgctgccttcgtcgccgcgcgcgaacgcgccgccagccacgccgccggccgcgtggccgctcgagcgatcacaaacgccggcggaaacgctgttgccgcccgcgcgcccgctcgagccgccgaaactgaaataatagaaggctttttgcgtatcggagtcaggcaaaagccgccgcgcgcgatgtacaagcccgtacgcaacttgtgcgcccccgcttgcgagtttgcaagttcgctgctggcagacacagacgatgacgaggagctgtccgagccggacgcgcgaactctcatcgagcacctcaactgttgcctggagggcagtgccaaggttctggacgtgtccgacgcgtgtatcatgcacatgcgcttcggctcccagcagcgttgctattacctgaccgacggcgacgacagcgacgagatctttgaccgcttcgagtgctcccgaggcgcgctctacgagactctggaagccttcttcgtgctgtgcctaggaggagaactccaagtgaactacagttccgatcgcgagaacgcaagcgtacgcgtcgcggagggcgaggccttcttcatggacgtcgcggccacgcactcgctggcctctgcctgcaaggaggtcaagatgctggttctgcgctgccagctcgacactgtgctggcgcactggggcgatcgcgtcacgtcctcaagcgccctcgtgtacgagaagttctgcggtgtcaacttcgcgctgtaccggctcagttgcgacggaaccgtggtgcgcgacctactcctggccaacaggaatgtgtacgacgcgcccacgtgccaagacctgggcgtcgtgcacctggagcaggttctcgcacagtaccagattagcaactgccccatgcccgaccacgtgccagagtcgccgctgcgcatctgcgagcgcgaattggccgcggaggactcggaggccgtcttcgccggcatccggccgaggcacgcggtttcgatcgcgctcttcccgtgcaaggtttacgccgtgcaaatcgcgtacggtgtcctcttcacatag

SEQ ID NO: 12108 - DNA, 33 bp, unidentified; identical to SEQ ID NO: 3211
  source 1..33: mol_type = other DNA
  misc_feature 1..33: note = Synthetic

SEQ ID NO: 12109 - DNA, 1443 bp, unidentified
  source 1..1443: mol_type = other DNA
  misc_feature 1..1443: note = Synthetic
atggggcagctgatctcgtttttcggggaaattccatcaataatacacgaggccctgaacattgcattaatagcagtcagcatcatatcaattctgaagggtgttatcaacatttgggggagtggcctactgcagttcattgtgtttctgctgttggctgggcgatcctgctcatacaagattggccatcatgttgaacttcaacacataattctgaatgcatcctacatcacaccctatgtaccaatgccctgcatgatcaatgacacacatttcttactgaggggtccttttgaggccagttgggccatcaagttggagattactgatgtgacaactcttgtggtggacactgacaacgttgctaatcccacaaacattagcaagtgttttgcaaacaaccaggatgagaggttgttaggcttcaccatggagtggtttttgagtggattggaacatgatcaccatttcactccacagatcatttgtggaaatgtatccaaaggagaggttaatgctcaagtgaacataactatggaggatcattgcagtcaggtgtttttgaaaatgagaaggatttttggggttttcaaaaacccttgcacttcacatgggaagcagaatgtgctaatctccgtcagtaattggaccaatcaatgctcagggaaccacttaagttccatgcaccttatagtgcaaaatgcatataaacaaatgatcaaatcaagaactttgaaaagtttttttgcctggtcactgtctgatgccacagggactgacatgccaggagggtactgtttggagaaatggatgctgatttcaagtgagctaaaatgttttggaaacactgcaatagctaagtgcaacttggatcacagttcagagttttgtgacatgctcaaattgtttgagtttaacagaaatgcaatcaaaacacttcagaatgacagcaagcatcaactagacatgatcataactgctgtcaactctctgatttcagacaatactctaatgaaaaacagacttaaagaactcatcaacattccttattgtaattatactaagttctggtatgtgaaccacactggatttaatgtccattcactgccaagatgttggctcacaaaaaatggcagttacttgaatgtgtctgactttaggaatcaatggcttttagaaagtgaccatttgatctctgaaatcttaagtagagaatatgaggcaagacaaggcaagacaccacttgggttggtggatgtatgcttctggagcaccttgttttatgtttcatcgatatttttacacctactgagaatacccacccacagacacataattggtgaaggctgtcccaaaccacatagactttccagtaactcagtatgtgcatgtggtctttttaaacaaaaagggaggcccttaaggtgggccgggaaagtgtag

SEQ ID NO: 12110 - DNA, 27 bp, unidentified
  misc_feature 1..27: note = Synthetic
  source 1..27: mol_type = other DNA
aagtttttcaccatgtcagcaatctga

SEQ ID NO: 12111 - DNA, 66 bp, unidentified; identical to SEQ ID NO: 3218
  misc_feature 1..66: note = Synthetic
  source 1..66: mol_type = other DNA

SEQ ID NO: 12112 - DNA, 90 bp, unidentified; identical to SEQ ID NO: 3222
  misc_feature 1..90: note = Synthetic
  source 1..90: mol_type = other DNA

SEQ ID NO: 12113 - DNA, 1749 bp, unidentified
  misc_feature 1..1749: note = Synthetic
  source 1..1749: mol_type = other DNA
atgcagcgaccggcgatcatcgcggagagggctcctaacctggatcccgcggttttggcggccatgcaaagccagccttctggcgttacagcttcagatgactggacagcggccatggatcgtattatggctttaacggcgcgcagtcctgatgcttttcgccagcagccccaagctaaccgcttttcggccattttggaagcagtagtgccgtctcgtactaaccctactcacgagaaagtgttaaccattgtaaatgctttgttggatagcaaagccatccgcaaagatgaggctggtttaatatacaacgctttgcttgagcgcgtggcacgctataacagtaccaatgtgcaggctaacttagaccggatgggtacagatgtaaaggaggcgctggctcaacgagagcgctttcatcgcgatggtaatcttggttcgctagtagcattaaacgcttttttgagtactcagccggctaatgttccgcgtggtcaggaagattatacaaacttcatcagcgccttgcgactaatggttactgaagtgcctcaaagtgaagtgtatcagtctggacccgattacttttttcaaacgtccaggcagggtttgcaaaccgtaaacttaactcaggcttttaaaaatttgcaaggtttgtggggggttcgtgctccagtaggcgatcgttcaactttgtccagtttactaacaccaaactcgcgcctattactgttgctaattgccccctttaccaacaccaacagtttaagtcgagattcatacctgggtcacttagttactttgtaccgcgaagccattggtcaagcgcaggtagacgaacaaacttatcaagaaataaccagtgttagtcgcgcactgggccaggaggacactggcagtttagaggccacacttaactttttactaactaaccgtcgccagcaagtgcctcctcagtacactttaaatgcggaagaagaacgcatattgcgctatgtacagcaatctgtaagtttgtatcttatgcgtgagggtgccacccccagtgccgccttagacatgacagcgcgcaatatggagccgtccttctacgcttccaatcgagctttcattaatcgcttgatggattaccttcaccgcgctgcggccatgaacggggaatactttacaaatgcaattctaaatccgcattggttgccccctcctggattttacactggtgaatttgatttgccggaaggaaatgatggctttttgtgggatgatgttacggacagtctgtttagtcctgcagttattggacaccatggtaaaaaggaagcaggtgatgaaggtcccttgcttgactctcgggcgagttctccattccccagtttaactagtttacccgccagtgttaacagcggtcgtaccaccagaccccgactaacaggtgaaagtgaatacttaaatgaccccatcttgtttccagtgcgcgacaaaaattttcccaacaatggcatagaaagtttggtagataaaatgtctcgctggaaaacatatgcacaagagcggcgagaatgggaggaaagacagccaagaccagttcgccctcctaggcaacgttggcagcgacgcaaaaaaggggcacatgcgggggatgaaggaagcgatgactcagctgacgacagtagtgtattagatttaggagggtcaggaaacccatttgctcatttgcgcccacagggttgcatagggtcattgtattaa

SEQ ID NO: 12114 - DNA, 756 bp, unidentified
  source 1..756: mol_type = other DNA
  misc_feature 1..756: note = Synthetic
atgagacacctgcgcctcctgccttcaactgtgcccggtgagctggctgtgcttatgctggaggactttgtggatacagtattggaggacgaactgcatccaagtccgttcgagctgggacccacacttcaggatctctatgatctggaggtagatgcccatgatgacgaccctaacgaggaggctgtgaatttaatatttccagaatctatgattcttcaggctgacatagccaacgaatctactccacttcatacaccgactctgtcacccatacctgaattggaagaggaggacgaactagacctccggtgttatgaggaaggttttcctcccagcgattcagaggatgaacggggtgagcagaccatggctctgatctcagactatgcttgtgtgattgtggaggagcaagatgtgattgaaaaatctactgagccagtacaaggctgtaggaactgccagtaccaccgggataagtccggagatgtgaacgcctcctgcgctttgtgctatatgaaacagactttcagctttatttacagtccggtgtcagaggatgagttatcaccctcagaagaagaccacccgtctccccctgagctgtcaggcgaaacgcccctgcaagtgttcagacccaccccagtcagacccagtggcgagaggcgagcggctgttgacaaaattgaggacttgttgcaggacatgggtggggatgaacctttggacctgagcttgaaacgccccaggaactag

SEQ ID NO: 12115 - DNA, 48 bp, unidentified; identical to SEQ ID NO: 3233
  misc_feature 1..48: note = Synthetic
  source 1..48: mol_type = other DNA

SEQ ID NO: 12116 - DNA, 1062 bp, unidentified
  source 1..1062: mol_type = other DNA
  misc_feature 1..1062: note = Synthetic
aggggtgtctctccgggcacagggcttcacaaacttccaggatctatcatgtttccgtttgtacctttaagcttgtatgtcgccaaaaagttattccgtgccagggggtttcgcttctgtcaaaagcctggcgtcttggctttggcccccgaggttgacccttgttcgattcagcatgaggtaactggggctgagacgccccacgaggaacttcagtatctcaggcagttgagggaaattttgtgccgtggcagcgatcgactcgaccgcaccggcataggcaccctctctctatttggcatgcaggccaggtatagtctgcgggaccactttcccttactaaccacaaagcgggtgttttggcgaggcgtagtgcaagagctgctttggtttctgaaggggagtactgactccagggagctttcaagaacaggagtcaagatatgggacaaaaatggctccagggagttcctggccgggcgcggcctggcgcacagaagggagggggatttgggacctgtttacggtttccagtggaggcactttggggcggcgtacgtggacgcggatgctgactatacaggccaggggtttgaccaattgtcgtacattgtggatttaataaaaaataatccgcacgatagaagaatcattatgtgtgcgtggaacccggcggacttgtcgttgatggcgcttccgccctgtcacttgttatgtcaattttatgtagctgacggtgagctttcctgtcagctgtatcagaggtcgggagacatgggtttgggagttccttttaacattgccagctattccctcttaacttatatgcttgctcatgttactggtcttagacccggggagtttattcacacgttgggagatgcccacatctacaaaacgcatatagagccactacggctgcagctgacgcgcactccacgtccctttccgcgcctggagatactccggtctgtttcttccatggaagagtttacacctgatgattttagactggtggactactgcccgcatcctaccattcgtatggaaatggcagtatag

SEQ ID NO: 12117 - DNA, 108 bp, unidentified; identical to SEQ ID NO: 3221
  misc_feature 1..108: note = Synthetic
  source 1..108: mol_type = other DNA

SEQ ID NO: 12118 - DNA, 1062 bp, unidentified
  misc_feature 1..1062: note = Synthetic
  source 1..1062: mol_type = other DNA
atgggtgtctctccgggcacagggcttcacaaacttccaggatctatcatgtttccgtttgtacctttaagcttgtatgtcgccaaaaagttattccgtgccagggggtttcgcttctgtcaaaagcctggcgtcttggctttggcccccgaggttgacccttgttcgattcagcatgaggtaactggggctgagacgccccacgaggaacttcagtatctcaggcagttgagggaaattttgtgccgtggcagcgatcgactcgaccgcaccggcataggcaccctctctctatttggcatgcaggccaggtatagtctgcgggaccactttcccttactaaccacaaagcgggtgttttggcgaggcgtagtgcaagagctgctttggtttctgaaggggagtactgactccagggagctttcaagaacaggagtcaagatatgggacaaaaatggctccagggagttcctggccgggcgcggcctggcgcacagaagggagggggatttgggacctgtttacggtttccagtggaggcactttggggcggcgtacgtggacgcggatgctgactatacaggccaggggtttgaccaattgtcgtacattgtggatttaataaaaaataatccgcacgatagaagaatcattatgtgtgcgtggaacccggcggacttgtcgttgatggcgcttccgccctgtcacttgttatgtcaattttatgtagctgacggtgagctttcctgtcagctgtatcagaggtcgggagacatgggtttgggagttccttttaacattgccagctattccctcttaacttatatgcttgctcatgttactggtcttagacccggggagtttattcacacgttgggagatgcccacatctacaaaacgcatatagagccactacggctgcagctgacgcgcactccacgtccctttccgcgcctggagatactccggtctgtttcttccatggaagagtttacacctgatgattttagactggtggactactgcccgcatcctaccattcgtatggaaatggcagtatag

SEQ ID NO: 12119 - DNA, 108 bp, unidentified; identical to SEQ ID NO: 3221
  source 1..108: mol_type = other DNA
  misc_feature 1..108: note = Synthetic

SEQ ID NO: 12120 - DNA, 12 bp, unidentified
  source 1..12: mol_type = other DNA
  misc_feature 1..12: note = Synthetic
acgacgctttag

SEQ ID NO: 12121 - DNA, 57 bp, unidentified; identical to SEQ ID NO: 3238
  source 1..57: mol_type = other DNA
  misc_feature 1..57: note = Synthetic

SEQ ID NO: 12122 - DNA, 36 bp, unidentified; identical to SEQ ID NO: 3241
  source 1..36: mol_type = other DNA
  misc_feature 1..36: note = Synthetic

SEQ ID NO: 12123 - DNA, 273 bp, unidentified
  misc_feature 1..273: note = Synthetic
  source 1..273: mol_type = other DNA
ttgaaaataacgcttaagatgagttgtaagaaaagcgcaaggcaaagcttatatgtcagtctctgcctcttttacattcttgtttttgcggccgctacggaagtggacttttattctccagagtgccattcgcatacctatgagatcgtcttgaattcattttcttcgatctggcttttgataaatctttttttattgttatgttctttcgcgattttcttgaaatactggtgttataagacttttgcttcagagacggtgaagggttattag

SEQ ID NO: 12124 - DNA, 315 bp, unidentified
  misc_feature 1..315: note = Synthetic
  source 1..315: mol_type = other DNA
ctggtgacgtttatcggcaggcaccgcaccagcgcggaggagggcgtaacgttccgcctggaggacggcgccggggctctcggggccgcaggacccagcaaggcgtccattctcccgaaccaggccgttccgatcgccctgatcattacccccgtccgcatcgatccggagatctataaggccatccagcgaagcagccgcctggcattcgacgacacgctcgccgagctatgggcctctcgttctccggggcccggccctgctgctgccgaaacaacgtcctcatcaccgacgacggggaggtcgtctcgctga

SEQ ID NO: 12125 - DNA, 126 bp, unidentified; identical to SEQ ID NO: 3245
  misc_feature 1..126: note = Synthetic
  source 1..126: mol_type = other DNA

SEQ ID NO: 12126 - DNA, 36 bp, unidentified; identical to SEQ ID NO: 3246
  misc_feature 1..36: note = Synthetic
  source 1..36: mol_type = other DNA

SEQ ID NO: 12127 - DNA, 255 bp, unidentified
  source 1..255: mol_type = other DNA
  misc_feature 1..255: note = Synthetic
atgagttgtaagaaaggcgcaaggcaacgcttatatgtcagtctctggctcttttacattcttgtttttgcggccgctacggaaatggacttttattcttcagagtgccattcgcacacctatgagatcgtcttgaattcattttcttcgatctggcttttgataaatctttttttactcttgtgttcttttgcgattttcttgaagtactggtgttataagacttttgcttcagagacggtgaagggctattag

SEQ ID NO: 12128 - DNA, 10257 bp, unidentified; identical to SEQ ID NO: 10911
  misc_feature 1..10257: note = Synthetic
  source 1..10257: mol_type = other DNA

SEQ ID NO: 12129 - DNA, 57 bp, unidentified; identical to SEQ ID NO: 3253
  source 1..57: mol_type = other DNA
  misc_feature 1..57: note = Synthetic

SEQ ID NO: 12130 - DNA, 387 bp, unidentified
  source 1..387: mol_type = other DNA
  misc_feature 1..387: note = Synthetic
atgtcctgcgcggccgccatcctgaagtccatcggtgggctcgcgcttttccaggtggccaacggcgccatcgagatgctcaagcactgcctcatgtacttctacgagcagcgcttgcgcgccaactcctttgctttcgtggtcatcaagatcggactcagcatgttgctctacctggtgctggggctagcgctgctctacgtctcctcgcgcacagacatggcccgcgcggagacgcccggcaccgcggcgggtgccgccgtgggcgccgcggcgggggcagcagtcagttccgcggcgagtgcggccaccagcgcggccgtggctgcggtagcggacgcggtgaccggagcggcggacgaaagcgtcgtgtgcgcgcacggctag

SEQ ID NO: 12131 - DNA, 192 bp, unidentified
  source 1..192: mol_type = other DNA
  misc_feature 1..192: note = Synthetic
gtgtttttggaccagccttgccatatgctgcaggaggcctatcccacgctcgccgccagccacagagttatgcttgacgagtacatgtcaaacaagcagacacacgccccagtacacatgggccagtatctcattgaagaggtggcgccgatgaagagactattaaagctcggaaacaaggtggtgtattag

SEQ ID NO: 12132 - DNA, 981 bp, unidentified
  source 1..981: mol_type = other DNA
  misc_feature 1..981: note = Synthetic
agggccaccgtggacgctgtcattatgaacaaccgccgaggctccaagccgtctatccaacgttccgcgttcgcctcttatatacactctgcaatgcagtccgactctgcccctctacccagggtggaatatgtgttcgaaacaagcaaatttagaatgacgtcgagagcaaatgaagccagactcagactgacaaatgagtgtccgatactggtgagaccccacgagccgttcatcatgcccaccggaatacacttcacgcgaacccctagctgcgctttcatcctgaccggagagaccgacaaggacgtattttgccacacgggcctaatcgacggaggctaccgcggggagatacaggttattttactcaacaagaggaagtaccctgtgacgctgtatcgcggggagctcaacatctgcctgtctgctttcaattacgtgctacctccgttgagggacgtatcattcttaaccccccctatgtatgcaaacgacgccggatttgacgtgatggtgatgcactctatggttatccctcctactactgaccaaccgttcatgatatacctaggagtggagaccccaggcccccctgaaccccacgtggctctagcattggggcgatccggtctagcatctaggggtatagttatagacgttagtgagtggggaccgcgaggattgcagctgaagttttataactactcggggcagccgtggctggcgcagcccggtagccgcatatgccagattgtgtttgtggaacgcagacacatcctcaagggcttcaaaaagtgcttgcgccataggaagctagctcctggcgtccgtttccgggaggctcgagtgcattttcgcgaggatacaaatagcgtccgaaaacataccaacgaagacaaccccgtccacgaacccaacgtagccaccgcttccgctgacattcgtggaaccaaggggctggggtcgtctgggttttag

SEQ ID NO: 12133 - DNA, 30 bp, unidentified; identical to SEQ ID NO: 3263
  source 1..30: mol_type = other DNA
  misc_feature 1..30: note = Synthetic

SEQ ID NO: 12134 - DNA, 1035 bp, unidentified
  misc_feature 1..1035: note = Synthetic
  source 1..1035: mol_type = other DNA
atgttgaagagaggatctagaaaatcctcttccatactggctaggcgtcctactcctaaaaaaatgaacatagttactgatttggaaaatcgtttaaagaagaatagctatatagaaaacactaatcagggaaacattctgatggatagcatcttcgtatccactatgccggtagaaacattgtttggctcgtacataactgatgacagtgatgattatgaacttaaggatttactcaatgttacatataacattaaaccggttatggttcccgacatcaagttggatgctgtattagatagagatggaaattttagaccagctgactgttttttggttaaactgaaacatagagatggattcaccaaaggagctctctatcttggtcacagtgcgggatttactgcaacaatctgtttaaaaaatgagggcgtttcaggaatttacattccaggtacttctgtaattcggtccaatatctgtcaaggagatactatcgtcagtagatcatctagaggagttcaatttcttccacaaataggaggagaagctatcttcttgattgtttcgctttgtcctactaaaaagttagtagaaacaggattcatcattccagaaatatcgtcaaatgataacgccaaaatcgctgctcgcattctatcagagaaacgcaaggacaccattgcacatattgacactctaatacaatacaggcaacaattggaattggcttactataattcctgcatgttaactgagtttctgcattattgtaattcgtatgctgacactatcaaagaatcacttctaaaagaaacaattcaaaaagatatcaatatcacacatacaaatatcactaccctattgaatgagacagccaaggttatcaagttagtaaaatctctggtagataaagaagatactgatatagtgaataatttcattaccaaagaaattaaaaactgtggaggtgttaaaaacagagacaaaatagttaattgtttgtctctatcaaacctggactttcgtttgtaa

SEQ ID NO: 12135 - DNA, 1035 bp, unidentified
  misc_feature 1..1035: note = Synthetic
  source 1..1035: mol_type = other DNA
attccatcgagatcaaagatgttgaagagaggatctagaaaatcctcttccatactggctaggcgtcctactcctaaaaaaatgaacatagttactgatttggaaaatcgtttaaagaagaatagctatatagaaaatactaatcagggaaacattctgatggatagcatcttcgtatccactatgccagtagaaacattgtttggatcgtacataactgatgacagtgatgattatgaacttaaggatttactcaatgttacatataacattaaaccggtcatagttcctgacatcaagttagatgctgtattagatagagatggaaattttagaccagctgactgtttcttggttaaactgaaacatagagatggattcaccaaaggagctctctatcttggtcacagtgcaggatttacggcaacaatctgcttaaaaaatgagggggtttcagggctttacattccaggtacttctgtaattcggtccaatatctgtcaaggagatactatcgtcagtagatcatctagaggagttcaatttcttccacaaataggaggagaagctatcttcttgattgtttcactttgtcctaccaaaaagttagtagaaacaggattcgtcattccagaaatatcgtcaaatgataacgccaaaatcgctgctcgcattctatcagagaaacgcaaggacaccattgcgcatattaatactctaatacaatacaggcaacaattggaattggcttactataattcctgcatgttaactgagtttctgcattattgtaattcgtatgctggcaccatcaaagaatcacttctaaaagaaacaattcaaaaagatatcaatatcacacatacaaatattactaccctattgaatgagacagccaaggttatcaagttagtaaaatctctggtagataaagaagatactgatattgtgaataatttcattaccaaagaaattaaaaacagagacaaaatagttaattgtttgtctctatcaaacctggactttcgtttgtaa

SEQ ID NO: 12136 - DNA, 192 bp, unidentified
  misc_feature 1..192: note = Synthetic
  source 1..192: mol_type = other DNA
gtgtttttggaccagccttgccatatgctgcaggaggcctatcccacgctcgccgccagccacagagttatgctagacgagtacatgtcaaacaagcagacacacgccccagtacacatgggccagtatctcattgaagaggtggcgccgatgaagagactattaaagctcggaaacaaggtggtgtattag

SEQ ID NO: 12137 - DNA, 51 bp, unidentified; identical to SEQ ID NO: 3270
  source 1..51: mol_type = other DNA
  misc_feature 1..51: note = Synthetic

SEQ ID NO: 12138 - DNA, 198 bp, unidentified; identical to SEQ ID NO: 11388
  misc_feature 1..198: note = Synthetic
  source 1..198: mol_type = other DNA

SEQ ID NO: 12139 - DNA, 2361 bp, unidentified
  misc_feature 1..2361: note = Synthetic
  source 1..2361: mol_type = other DNA
atggctagcaagtccaacaagcaagtaactgttgaggtcagtaataatggccgcagcaggagtaaatcaagggcccgttcacaatctaggggccgagacaaatcagtcaagatcacagtcaattcaagaaacagagccaggagacagcccggacgcgacaaacgtcaatcttctcaacgtgtccgtaacattgtcaataagcaactcaggaaacagggtgtcacaggaccaaaacctgcaatatgtcagagagcaacagcaacccttgggacagtcgggtcaaacaccagtggcaccactgagattgaggcgtgtattctcctcaaccctgtcctcgttaaggacgctactggaagcactcagtttggccctgtgcaggcgctaggtgcacagtattccatgtggaagttgaagtatttgaatgtcaaattgacctctatggttggtgcatctgctgttaatggtactgtctcaggggtctcacttaaccccactaccacgcctacttctactagttggtcaggattaggtgcacgtaaacatcttgatgttacggttggtaagaatgcaacatttaaattgaaaccttctgaccttggtggacctagggatggctggtggctcacaaacaccaacgacaatgcatctgacaccctgggaccctccattgaaatacacacactcggacgaacaatgtcctcatacaagaatgagcagttcacaggagggctatttttggttgaacttgcttcagagtggtgcttcacaggttatgctgccaacccaaaccttgttaacttggtcaagtcaacagataatcaagtatctgtgacatttgaaggaagtgcaggatcaccattaataatgaatgtgccagaggggagccattttgcacgaacagttcttgcacgctcaacaacacccaccactctagcgcgtgcaggagagagaaccacctcagacacagtatggcaggtgctcaatacagctgtatctgctgctgagcttgtcacgcctcctccattcaattggttagttaaaggaggttggtggtttgtgaaactcattgccgggagaaccagaactggctctcgtagcttttatgtgtatcccagctaccaagatgctttgtccaacaagccagcactctgcaccggcagcactccaggaggcatgaggacgcggaatcctgtgacaaccaccctacaattcacacagatgaaccaacctagtctagggcacggtgaagcaccagctgcgtttggtagatccattccagcacctggtgaggagtttaaagtcgtcctcacgtttggagccccaatgagccctaatgcaaataacaaacagacttgggttaataaacctcttgatgcgccttcaggccattacaatgtgaagattgcaaaggatgttgaccactatctaaccatgcagggtttcacttctatagcttctgttgactggtacaccatagattttcaaccatctgaggcccctgccccaatacaaggcctgcaggtacttgtgaacagctcgaaaaaagctgatgtgtatgccatcaaacaatttgttacagcgcagaccaacaacaagcaccaggttacaagcctgttcctagtaaaagtgacaactggttttcaggtgaacaactacctgagttacttttacagggcgtctgccactggggatgccacaactaacctgttggttagaggagacacatacacagcagggataagttttacccagggtggatggtatttgttgacaaatacatctattgttgatggggctatgccacctggttgggtctggaataacgtggaacttaaaactaacacagcatatcacatggacaaaggcttggtccatttaataatgcctttgcctgagtccacgcaaatgtgttatgagatgctgacatctataccacgctccagggcatctggtcatggttatgagagtgacaacaccgaatacttggatgctccagactctgctgaccagtttaaagaagacatagagacagatacagacattgagagtacagaggacgaagacgaagcggacaggtttgacatcatagacacttctgatgaagaagatgaaaatgagacagaccgtgtaaccctcctctcaactctcgtaaaccaaggaatgacaatgacgcgtgccacaaggatagcaaggcgcgcattccccacgctttccgataggatcaagcgtggagtatacatggacctgcttgtctcgggggcaagcccaggcaatgcatggtcccatgcgtgtgaagaagcacgcaaagcagcaggggaaatcaatccctgcacatctggaagccgcggccacgccgagtag

SEQ ID NO: 12140 - DNA, 1101 bp, unidentified
  source 1..1101: mol_type = other DNA
  misc_feature 1..1101: note = Synthetic
atggcacaaacacagctaaagctttatgtcaatgatggtgatccctccaacagactccttgcatttcctatagtgatgaaagagtctgctcaaggggggaaagtgcttcaaccacaattgagaatatcatatctaggagatgcgattgggggaagaaacagtgtaatatttatcaactgctatgggttcattgaatcaatgaaggcaggagaagggccattccttgatgttaactcagatgggaagggtgaagttatcacagccgctggattgacgcttgggagtgtcacctatgactcagatcccactgagattgcacgaagctgttaccagctcttagtcacagttaaaaaatcagcagacaacacggagagagtagtgtatactttagcatcaaaacctcccgctctttcttcatcgagagtagtgacttcaggggggtgcatattgtccgcggaagaagctgtgaagtgtcctagcaagctccagtcaggaatcccttacaaattcaggattatgtttgtgtctctgacatatatacatcaatccactttataccgtgttaataatctgattgctaaactaaggtcccctgtattcatatctgttcaactacaagtcactctgattctggatttacctgaaaaacaccccatgggaaaatacctcataaatcaggatggagtctacaaagctcatatctggatgcacatctgtaactttaagaagacaaacagaaagggagcagatagatcagtccttcagattaaggagaaagtcaggaaaatgggattaaaggttactcttgctgatttatggggacccactgtcgttgttgaagcaacagggacaatgagtaaatatgcagttggatttttctcagagacaaaagtgagctgccacccaatttcgaaaatctctcctgaagttgcaaaaattatatgggcctgtactacgaccatagggcaggcagttgtcatcattcaagcctcaagcaggagcgagttacttactgcagaagacatagagtgtaagggtaccacatccattaagaaatcagcagttaaagagtttagtctcttctcaaaacctgctaaataa

SEQ ID NO: 12141 - DNA, 48 bp, unidentified; identical to SEQ ID NO: 3278
  misc_feature 1..48: note = Synthetic
  source 1..48: mol_type = other DNA

SEQ ID NO: 12142 - DNA, 231 bp, unidentified
  misc_feature 1..231: note = Synthetic
  source 1..231: mol_type = other DNA
atgttcttcatgcctaaacgaaaaatacccgatcctattgatagattacgacgtgctaatctagcgtgtgaagacgataaattaatgatctatggattaccatggataacaactcaaacatctgcgttatcaataaatagtaaaccgatagtgtataaagattgtgcaaagcttttgcgatcaataaatggatcacaaccagtatctcttaacgatgttcttcgcagatga

SEQ ID NO: 12143 - DNA, 231 bp, unidentified
  source 1..231: mol_type = other DNA
  misc_feature 1..231: note = Synthetic
atgttcttcatgcctaaacgaaaaatacccgatcctattgatagattacgacgtgctaatctagcgtgtgaagacgataaattaatgatctatggattaccatggatgacaactcaaacatctgcgttatcaataaatagtaaaccgatagtgtataaagattgtgcaaagcttttgcgatcaataaatggatcacaaccagtatctcttaacgatgttcttcgcagatga

SEQ ID NO: 12144 - DNA, 231 bp, unidentified
  source 1..231: mol_type = other DNA
  misc_feature 1..231: note = Synthetic
atgttcttcatgcctaaacgaaaaatacccgatcctattgatagattacgccgtgctaatttagcgtgtgaagacgataaattaatgatctatggattaccatggatgacaactcaaacatctgcgttatccataaatagtaaaccgatagtgtataaagattgtacaaagcttttgcgatcaataaatggatcacaaccagtatctcttaacgatgttcttcgcagatga

SEQ ID NO: 12145 - DNA, 231 bp, unidentified
  misc_feature 1..231: note = Synthetic
  source 1..231: mol_type = other DNA
atgttcttcatgcataaacgaaaaatacccgatcctattgatagattacgacgtgctaatctagcgtgtgaagacgataaattaatgatctatggattaccatggataacaactcaaacatctgcattatcaataaatagtaaaccgatagtgtataaagattgtgcaaagcttttgcgatcaataaatggatcacaaccagtatctcttaacgatgttcttcgcagatga

SEQ ID NO: 12146 - DNA, 10122 bp, unidentified
  source 1..10122: mol_type = other DNA
  misc_feature 1..10122: note = Synthetic
ttgtttataatagtcgtttttctcgcagaaatgggaaaggacgacggtaagaagaagaaggggccgggctcctccggatggttgttaccaccggggcgcgctggcttaggaaggaaggaggagaaaaagaagaaggagaagaggggtgtgcggagcacatctcagccggtctccggcggtgcgcagcaccgccgcggaggcggaacaggtcctagggccggaggtctactaggacgtttgggagctggctggggatcgattctccaggaggacattgtgcacgcactcatgcacttagtgctggtgctacactctgttttcatcgcaattgatcgacgcttgcgctcactgacacggcgcgtgactgctcttgaggctaaacgctctgcgaagaacgctgtacggatcgcattcatgctcaccggcgtgatgatggtgctgggcgccgtcgtcattgatatgcaggtctccacggtgaaagggacacagatcttcgaggggaagaccaaccgcactgatcatgtgcacttgtttaagctccccacggatggctgctggagtggcacattggttatgaaaaagtgccccaaggtcgctgatcttgcgaaggatctggaaggagtggattgtggttcatcatggacggaattcactttgcgctaccatcgatgcgtgccaaagaagcgtgaacgacgagttgccagcaccaaccagaagctagattttctggcggaagtggaactggtgacgttcaaagctataagggagaacaaaaccatcgctatcatcgtcttgttgtgcgtggctattgcgaagagatggccgatgtgggtggtgatactactcgcaattggaacgcggactacggtgaagggagaatttgttgaaccattgtacacactaaaagcggaaaagatgaccatgttgcagacaataatgcgaccggacgaaagctacgtgatttccacgccgaacggacttcttgagtttcgcaccggagcagccgagatatatggcggccaatggatgcgtgaattgctcgctgattgtcacgtgaacgcgtcattctcgactgacgtgtgtcctggaggatctcagctgaacatgggtgagatcaatggtaaagaacgtgtttgctcaacccagccctacaatcgtggatggggaactggatgcttcaagtggggaatcgggtttgttgccacgtgtgttgagctgcattgcggagaggggtataacgtgtcgtcaatcgctaggtcatccatcgtgatgaacatcacagcgaaattccactcagtggatgacgtccagcaactcattagtgatgttcctgtgacttttcgatttgcaaagctgggcaatgccgctgttacttgtcggctagaatcagagcgattgcttcttgactactatcacgtgacaggcaaacaccacgaaggactgtttgtgcggtctcaaatcgatgagtggcccggagcgcacgccactgctagtggaagggccggtttggaacggattgtggtctggggagacgccagggctaatgaagttttggtgaaaaacattttggaaccccagctcgtctgggataatgccattgccacgcaggacggttttcgtgatgttggctattcttgtcagatcatgcttgacaaactggttagcggtagttttaaggactgcccggggatcaagtcttcagtcttcgtccaaagcggtttcggatacgacggagtggtgatgacaagcttgtccaaagcaactaatgagagctgctctgtggggctgacgtgccacggatgctacctccttgcgacgaagatggtgttcggacctggaacttcgaccgcaagggcatttgttgggtgtgggaatcacaccggaacccttgtggttggaggaacgacaatccacgttgagtgtgtgttgaacccgatttcgcaaggttggagaatggccaagcatgtggttgacaagtaccggaggtttggaactgctggagtgggaggcgtgtggcatgactttgttggaaagttttcattgttcagcctgttgtctagctcgacgattctcgtcggactcgccgctctggtgtttcttgacaaacgaattgtgttcttgctacttttgtgcggatactttgtctacaccaaggcagatgtgggttgcggatttgaccctgagagaaaggttgtgtcctgcggatcaggagggttcgtctggaaaagcttgtcacaatggccgacccgggaacattcagttgaactcgatgaccaacacttgatcacggctcttgttacggaacagttgaagaagacgaacaaggtgtgtatcatttgtgaggacgtcttgcaatgcgccgccgctcgtagtgctgttggggagattacccacgttgacaatgagattgtttacgttaacacttcgttgtcttttgacaggacttttcctcgaattccgaagaaggttcatggcgtgaaaattggtgacttaaccatgcagctagccctagcttcagttgggggagcggttgacgccagccaatatggtgagttgagcagcgggttcttgagccgcaccaagatcgcggaaaccagtgaacacaaggtcatccgtgtgataacaagtgcctctccatacgagaaaatatgtgagcaggcgttcgcgctgcagtacggtttcgtccggttcacccgcagggtgttcggttcaaatgttgtggtcaagcccgtggcaaaaccaacagattactgccccacgtacctggccggatcgtttgtgaaaaatgacataggcgcgtacaccgatgggatgatgtggatgaaaagcaggaaggtgaacggaacgtggacattggtcgacctggaactgacgcagagccatcaatgcatttggccccaagcttatacgtttgatttgacggcctttaatgactcatcgctgttcatgccggcacaatacggcgctccgatgtctaaagcaaaccacattcctgggtacaagacgcaaacagagttcccttggtacaaagctgatatcgtgttgcgcgagggggtggtccccggaactcaggttgaagaaagcccatcttgtgacaaccgcgggtccgctgtgaaagttgaccctgccattgccaagaagtggtgttgcaagacgtgcttctcagctgacaagcgggtatttcacttcaaggtcgacaacgattacttctaccccatggagattcgaccagcggctgttcagccagaggtgaccattgacgctgacggcgaagacatggacgagatgacatcaatgttcgggacaatgaaggcagtcgtaccgccagtggaagggtcctatccggatttccggctcagcccatctgtggagggagtttctcccctactggtgggcgcgcttttgcacctgctgaccattcgaaccaaacatcggtgggctcaacgcacgtgtggaacttggattttgttcctcctgtttggagtgccatccaacacctatgtcgggtggtcttggattggattatcgtactcgcttgctgctgttccgaatggtacggctctgttggtgcatttctggctggcagttcagttctcatcatcgcacttgttctttttgggatgggcgctacggcaacgtgtacgatcatcagctggatacgcattgaccgtgttcttcgccgagtggcttctcttgaagttacggcagctgtgggaatcgacatacctcctcgaccacgtgctgttcccgatgtacgtgatgttggcgttcaatctgaaatcacagttcgtacctgtggactcgatggtactgctgaactatgttgtgacgcatcctgcagttgcgacggccatggtaacaggaggtgccctggtgatctattccattcgcgtgtacaagagctggggatgctctccgaacttgtggaggagtggacttcgcgcttcgaggcgctcattagtggctggaatgtgcttggcggggttgtacgtgctctcaacgtgtctcgagttgtatcagatgccgacgacggcatcggtggtgttcctaggaggactactgatcgggatagtgaccaggatggctcctccagcgcacttggagttggttccggtggctggaatgggagtgccgttggattgcgaggaagagcccacaacacttccgtctggattagaaggaacttacggaccggatggagtggaattcacgaacttgacggacaacagtagagtgtcaacggggttgctggtttacgtcggctgcatgggaatcatggccatcaatacctacgtcggggtcatcctgatgtgtgcttgttggtggacaaacgcgcccgagtggctacctctctacgtggctggagtatcggtctttcgatccaatgaggtgaatgatgtcctcatcacccctccagagtatgagcaggaagcacagctaagcaacgacttcgggcacctgcccaacggaacataccgggtggttgctcgctcgctgttcatgaccagccacgtgggagcaggctacgccaaagacggtgtgttcaacacgctttggcatgtgacatctggtggaagcctcacatggcaagggagaaacgtgcgcctacactctggtgatgtttaccgggacatggcttcgtatggtggatcgtggaacattgctgattccctcgaggactcagtggttgttcgtgtcgtgcagaacgatggtagcgtactgtgtgctagaagctccacggcaagtattagcatcgatggaaagcgtgtccaggtcattggccatgactatggaaaaggatcgtcaggatctcctgtgcacgcgttggatggtcgtgtcgttggactgtacggttatggatttttcattggatggaagtaccactccttgatcacaagcggagaagtcaccgcagaggaaaactttgaggaagacacagtgtctcgccggttcgttgattggcatccaggaaaggggaagaccagacgcgtgttggttgaagaggctaaatctcacatcgcaaaagagaaacgtctgctgatactgacgcccactcgagttgttaaggatgaggttgtgcgagcgattgctgaggcgtgccctggagttgtggtaggatcaaacctagcgatgtaccgaaggaatgccatcacggtggcttgccacgcgacactaacgcagtatctgatggagaaaggcattgacagcattcgattctccaccatcataatggacgaatgtcacttcctggaccccctgtccatcgcctgtcgtggggtcatggattactacaatggaaaaggggttgccgtggtgtacatgagtgcgactccccccggatgtgctggaaacaacggatcaaatcatcccatcgatgacgtggcgacacaatttccgcgcgaattaacagcatcgtgggtccgtgggcaagcgaatggcaagacgataatattcgttcccacacagcaccaagccaacactttggctagtgaacttggaggagtttcactgacccgcgaatcgtttgacgttgcgatcggaaaggcccgcaagcaggagacacagttcatcgtgtcgacagacatcagcgaaatgggagcaaatctcggtgtgcagacggtcattgacacgcgtgtggcagtgaagcctgtcattagcgaaggttccgtcatgctggagaaagttggcatcacacaggcgtcagccatccagcgccgtggaagaacaggacgcagagaagcaggaaagtatgtctaccccattgggtctgagctggaaaacgaggccactgagtgggcttgttggactgaagctcaaatgattctagaccagatggcgtgcggaccgatgcgtgaggaaatcgagaacttccagccacagggcagatacctcttggcgcctgaaagtcgaccccggttcatcaacttcatcaagaaggatgttccagtctggcttgcgtggcactgggcgaatgcgtttgaacacaagcactcagtgctgtttcaaggacagaatgcgacgagcttgaagatcaggacggaagccggtgaccacaagtacgctccccgattccatgacgatcgtttcgaaaagaacaacgagttggacaaacgctccaagatcatgctgtacctcaagcagcggagcaatttcaactttgacgtggggggcgttctgtatggactatttgtggctttccgtgacacgaacctagagcggcttggtacatcctaccgctcggcgattgagattctccatgaaatctctaacgttgatgatccaatggtttcaaacgtggtgatgggaaagtcgctacaagcttgggcggctgtcatcattgggatggtcactgggattgtgctactcgtcatgtttgtagtggtttgtcggatcgtgaagtggctgttcggtggaaagacaactgcacaacaaagccccccgtactcaagcttcccaacgttacaaacagcaggattttgtcaattcggctcaatggtgatggctatcggaccactatgtgcggtggttgctggcattcctcccgctttcgtttttgttgcggtgttgggattgttcgtgataatgtgctgtagcgctaataacgtgcaccgggcttacactactgacaccgtcacgctcgttgtcatcggtgtttgcgtgtgtgtcatgggagttgttgcgtgggaaatggatctacttcccaacatccgacgggatctaggttacatcctggaaaggatcgccgcgaggcaagagccggacatcccacaagcatctttcgcgcggccagaggttctagagttgcacatcacatctcttcctggagcgttggttgtgagctttgccattgctatcgttgggggggttattgttaactgtctgtccgacagcggatttctgcgcaagttgttttcgaacgaagaacagtccgcaacggtaatcggaggcatccagctcgctttgatttcctgggagacgatggtgccaatcgcttttgctgggttcttcgcaactacgttcgtgacgaagatctatgggtgcatggtaggaggaatctacctggttttagctcactatgaccggaagtatgcctttacagtgaaggcgaccaaggtcctcatcgcgcgcaccagcaagaaagatctcgacgatgagataacaggacgagacggggtgacgcgaggccggccaaccttttacgcgttacaaatatgttgttccctgctgtggacagtcacgtcgcctagcctgaagcatgctgtcgtgagtgtggtggtgattgtgtttgcattcctcacatttcgtcgtcccaataacaggctgctcgtcacgtttgactattctagcgtgctgttggtcttgatgatcttcgctgaacctggtcaggtttttctggtaggtgctagtttactgttttggttcgtggcgcatcagtctcgcatggcgctacggtcgctggtgaagacagacgcttgcggactgggatacagatggaaggaaatgcttaacgcgcttgacaaaaatgcgtttgacaagtaccgatcccgaggagtgaacgagacagacaagggtgatttcgtctcgcggggcggtttgaagatggatgagctcatcaggaagttccaatgggaaccgaagggggctgcacttgacttaggatgtggccgcggaggatggactcaacgtctggtgatggacactagggtcaactccgtgacggggttgacgctgggtggagcaaaccgggaaaatcccctaccgtttaagacgaaaggacacaacctagccgtgctaaaagccggtgttgacgtgtacgcgactgagccgcgagactgcaacacgattgtgtgtgacataggcgagagtgacccccggcctgaggtggagaagacaagaacgctgaaagtgctgacgatgctcgagaaatggttagtccacaatccaggtgctgcgttctgttgtaaggtgctgtctccgtaccacctcgaagtgttgcgcaagctagagatgcttcagcacaagcacaatggaaaattggtcaggttgtccttgagccggaactccactgcagaaatgtactacgtctcaggtccgcgagcgaacatcgtcggctcagtttatcacgtcttaggggctctaattgggcgcctcaagcgtaatgacccggtgcagcaggatgctcctccaaagctcgagatgggcactcgaagtgacccccgggcaaaagtgaagctgcaggaccagacaatcgttgcaggtcgcgtgaagaggttgcgagaggaaaacgccagcacatggttcgtggaccgtgaacacccttaccaatcgttcaactaccacgggtcatttgtcactgacgacatctctcccggagggcagactgtcaacccgatgatgcgccgaataatgtggccgtgggatttcctctcccgtgtgacgacgttcatgatgacagatgtgtcaacgtacgcgcagcagaaaattctccgtgagaaggtggacacactgacgcttgaaccagatcagcggacccgagctatcaataggttgatcatgcggcatttctctgctatgttcaaacggcgaggattggctccgagaatcctcaccccagtggagtacatgaacaacgtgaaaagcggtgccgccattggagggtggagcaaggagatgccatggaacaaggtgcaagaagctttggctgaccctgtcttttggcgtatggtggctgatgaacgcgctcggcacctgcgtggagattgtgagttgtgcgtgttcaacacaatgggcaagaaggagaagaagccgtcctctttcggcgaggcacgaggatcaaggattatctggtacatgtggctcggaagtcggtttttggagtacgaagcacttggattcctaaacgaggaccattgggtagcgaggaagaactttccgtgcggagttggcggggtcggagtgaattactttggatactatctccaggaaatcatgcaaaaaggtaagtggatgattgctgatgacaccgccggtggggacacgcgcataactgaagctgacctggaggacgagttgtggttcctgctggaccaagtgactgacccctaccacgcacagttgatacgtgttgtgttcaagttctgctacatgaacatggtcgccttgtttccaaggaaccatccgcagttccggagcgggacagtttttgacgttgtttcacgcacagaccaacgcggctctgggcaagtgaccacctacgctctcaacaccgtgacgaatgggaagaaccaggttgggagaatgctggaggctgaagggctactggacgcgccgttggggatgatcgatgggtggttaggttcccatctggaagagattttgagtggaatggtcgtggccggggatgatgtggttgtggcaaccaacaatgaaaacttccacaccagtctaaggtacatcaccgccgcgtcaaaaacgcgcaagaacttgcaaccaaccgagccttccccgaggtacacaaactgggaacatgttgaattctgttcccatcactaccatcctctcgtgctgcaagacggtcgtgagatcattgctccgtgtcgtgaccaacacgagatcattggccgagcacggatccagaaaggggggatcgtggacatgtcagctgccgggtgcttagcaaaggcacatgcccaaatgtgggcattgtactacttccaccggagggacttgcggctcggatttgccgctatcacgtcggccgtcccggtgaactggatccccacggggcggatatcgtggtcagtccaccaacacgctgaatggatgacgacacaggacatgctagaagtgtggaacaccgtgtggattgtcaacaacccatggatggcagtgaaagacccagtgaagacatggtcagagataccatacctcccgaagacgaaggacataaattgtggaagtttgattggtgagcgggacagggcagcgtggtcgaagaatatcgtggccacagttagcacaactcgacgaatcatcgagcaagaagctggaagtcagaagttcacggaagggttgcggatacttgggcgataccgagctccaaccgacgacgtgttctggtga

SEQ ID NO: 12147 - DNA, 24 bp, unidentified
  misc_feature 1..24: note = Synthetic
  source 1..24: mol_type = other DNA
ataacgaaggttcgactatgttag

SEQ ID NO: 12148 - DNA, 234 bp, unidentified
  misc_feature 1..234: note = Synthetic
  source 1..234: mol_type = other DNA
atgttagcattcgcagagataacatctatcatggtgaaccttatgttcatgggtgcggtggcggtttgtgtgggtattctgggtatttcctgttttgtaggactgaaggagataatatactttatatttgttagtgttaattccatgtggcctttttgtaataagttattgactacggcggttaactgtttcttcaagggccgtacctttcttcgacgtgaattaaagatttaa

SEQ ID NO: 12149 - DNA, 90 bp, unidentified
  source 1..90: mol_type = other DNA
  misc_feature 1..90: note = Synthetic
atgtggcctttttgtgatacgttattgactacggcggttaattgtttcttcaaaggccgtacctttcttcgacgtgaattaaaaatttaa

SEQ ID NO: 12150 - DNA, 81 bp, unidentified
  misc_feature 1..81: note = Synthetic
  source 1..81: mol_type = other DNA
atgttgaacttttccatatacagcgtttcctgtttcaagtacgtgatgatgaatccctactccttccaaacacaagtctag

SEQ ID NO: 12151 - DNA, 237 bp, unidentified
  misc_feature 1..237: note = Synthetic
  source 1..237: mol_type = other DNA
ctgctgatgcccaactacgcgctgcatccttccatcatccccacgccgggctaccgcggcacgcgcttctaccgcggtcatacaaccagccgccgccgcaagaccaccacccgccgccgccgtcgccgcacagccgctgcatctacccctgccgccctggtgcggagagtgtaccgccgcggccgcgcgcctctgaccctaccgcgcgcgcgctaccacccgagcatcgccatttaa

SEQ ID NO: 12152 - DNA, 21 bp, unidentified
  source 1..21: mol_type = other DNA
  misc_feature 1..21: note = Synthetic
gtgtccgtgtcctcaacgtag

SEQ ID NO: 12153 - DNA, 6387 bp, unidentified
  misc_feature 1..6387: note = Synthetic
  source 1..6387: mol_type = other DNA
atgagctcggcagacggactctctggacccggatttactatttccattatttatgcacttgaaatcgcgcccgcgggaaaagtgaatttctatcgccacacgtggagcggccgcatcatgtcgccgcggggagatctcaccgcacggtgcgcggtgccgctcgtggcgctgcttacgatactgttcgctgccttgtttgccgcggggagtggcacggagatggcgtgctaccgcaagatcgggctctactcgctgacgggcgaaatgcaccgcgcgcaggaaactcgcgtggtcagcgtgctcgacgttgactctcgcgtgctcgcggaaatggaaacgttgcaggaaggttttcactgggacgcgcttcgtagtaatgccagcgcgcgtttccggagtgcgtgcgagaacacaagcacgccgcaggtaagctatgttgtccgtcaaggcctgaccttgctcacgcgagcaaactgcagcgacgacggcaacagtaccgatatcttgagcggtctcaacgggaccctgctggtcactgtctgcaacatgactctcgagctgcaacaacaagattgtcctgcgacaatgcaaggccttgaactctcggtccacgagggaagcgtcaccctgacactggtctcagggcttgtctcgtcggtgaatccctttgtcccttccgagaacgcaacgagatgcttgatggcagtgcccacgaagatcacgtacaacggctcttgcgagaacatccctttgagtacgcccacgagcatgcccgaggggacgcccccaggagcgagcgcggacacgctcaagaacacggaaagtacgcccgggaacgcatctgcggacgagaggccactcgcaagtacccccgcgccgctttcgacaccggcatcgttcttcgcgaccacgctcgagatctcctcgggtacacgcgctgtcactgttgcgtggaaccttgctagtacgccgacgctcactcctgcctcaatgtcctttgaagagcagcacgttgtttggacgaacctgaccgtggaagacaactgcacgatcatggtcggcatccaggtgaagagcagcgcgcagagtgcatgcgagcgcgctgacatggagacggtccttgccgtggtcggagtgctcacggagtatacggaagcgttgcacagactcaatctgagctcggacaacgagaccaaggactactacgagtgcatgatgcttggctccccgtcttgctttttgcaaggcttgcggcaagtcgctttgcacaacgtcatgcagaacctccaagcgaaggcactcacgcgggcgcgcaggacaagatccctgcacgacgacaacgcgcattgcttgcaccgtcatttcggcatgggaccgggagtgggagatcactgcgagaacatcgaggaaccactcgcgcgcgtgcgcaggtcagaccctccccgccccactcctccacgagtccgaaggcccaggcctggtggcgtggatactcctcagaggccgcttccgaagcccaggcctggcggcgggagcactcctccgatcccgcccacgaagcccaagagtctagtcgagaaagtgtccgagtctttaggtatgaagcctgtaattggcccgggtgtgcaggaggttcagctcggagcacatggtagtgacggttctgtcgtcggatccgacggcttgacaacatctctgcgcgaacagctgcggaaagcggtcgagcaacgtgcaccgacgttgccgacagacatgaatccggacgatttggagaaagcaaggattcggtggcgagaaggaggcggacatctccaaggtctctgctcagaagctgtgcggtacaaggaagagagcatacgcagtgccgcggggaaggcccatgactggagcaaaaggaaacaccgctggggacagcgtcgcgggtttcatgggacacgcgggggcgggcacggggacgaggactcggacttggaagacgtcgagcaggtacggcagcaactgaaagagatgggcattggccccctgggccggcagcgcagttccggctcgagctcggacttggaagacgtcgaagaggtacggcagcaactgaaagagatgggcattggccccctgggaaaaaggaagtcgtcatcgagctcaaattcggacttcgaacacttgcaagacacgcagcaacagttggtgaagaaaggcctgtttcgaggaggtcgccagtcaggtcctacgcgtttcgacgagtccgtatggaaaaagctggatcagctaggggggcctgcgcacgctcccgtgttttcgccgcaagtgcacggatctcccccgggcgacgttgtcgcgccacttgagactcgcatgtccggcgatccaggacatctcgacgtccacagttctggccggcacacgcccacgtttccaaacctggatactggaacgcgcgtgagcgtggcagagaccacatacgcggttcttggcggcggtggcggcccgcgtccgccacgaaggctccgggaaagacaaagagaaggaggagacggcgttggtgactacgcggagctcgactggggcgagcagcggcatgcaggacgcagacgaggacatggtcgcggcgtgcaagacgggagtgggcctcttccgccaattcccggagagaagtcgccgactggacgccagctaggagaccgccctcttcctcctacccctacgagccggcacgaggactctcccggcacaagactcgggcgcaagatttgcaagcgtagcttggactcgctgctgtgcggcatgctaggaactcgtcctgacagcgactctgtccctcacgaccccgtctacgaaagcgtgcaaggtccatattcgctcttgggtgaacacaaccgtccgccggcgacgaaccccaactaccgcgagcccgtgtacagcacgctgggcatgcccacgggccccgaggccccgtccaagactggcggtggaccgagcgcgccacccacggaactgatgcctgccgacacgtcatctccacgcatgaagcagctcgcgcgcgaagaaaaccgcctcgagaagttcctctccgccgtgtccttgtccacgtacctgtcgagtgcgcaaacacagcttcgagaggtcatgatggtacaaccacacatgccacacgggatggccgtcgcaaccatgatcagttcgatcgtttctaccgccggaggcacgctggcacttgcgggtgcctcgaatcctgtcactgctgccgcggggctagcgctgcagggcgtaggcatgctcattgacatcgggaccagcttgtactatctgatcaaggggcaatcgcgtccgcctcccgtggacccggtgaccgagaagttctcgacgtacgcgcgccacatggcacaagcgagcgctggcgcgcggctctgcctgatgccagactcggatcttcgcctcacgcttgcataccgacatagccattttgaatctgctgccggcgagaagggcgctctggctttcgcagatactccgatgacgctcgtgtactacctgcgctctcagtacatcgtgtacaacacgcgcgtgaccgtcacgtgcccgatcgggacgttgcgtctgctggaaggtgacatctccgcgtacgcagtgctcgagagcgtgggcgaggatggggcctcgcactacgcgttgccggggatcatggaactgttgtcgaaccaccccaacgccagcttcacctgcgggagcgaagttggtgcgaggttcgttccctttgatcgggagctcggcgacatgcagttgttacgcgtggccgcgcccggagagcccaaggagacggagagcattccctccaatgtctgcgacctcttcccactcaagcgcttctacctgcttaccgatggatgtccccacgaccgctcgcagaccgcgatcacgtacgtgacctgcgggaccctgttgcgcatggccagttgggaacccgtccgcaatcgctgggtcttgctcaacccgttctttcgatctgccgatgaattcattcagctcttcaccttctcgcaatacgacttctccgggagcacgatccgcttgcacgagttggacgccccagaggctttctgctcgcaacgcgtcagcagcacgtgctactggcccgagcccatgatgttggaagatgtgaccgcatgcgagacgcgcatccgcaagatccacgtcgagcttgcgaccgtaggcggcagcggctacaccagcttcgtactgacgtgtcccccgggctccacgccgtttcacgtgagcaacgtctctgtcgtggcaattccgcagaacacgcggcgtaccgcggtgcgctatgcggcgaccacccagacaagcatcctggtttcctgtgtgcacaacacgaaccccgcgtacaagtctgacatcgtcgtgctgaccttcagcacgcaggggctacgctcgcgtttctcggacatggagaagtggacacaacggaaaatgctcttcgattccagcgcgtgggccatgcccctgcgctcgcgcacatgcaagcgtcccgaggagaacacgctctgccacctggcgtactcggtgtcccaacagcgcgcggaataccacctgcaagtacaaactctccccgagcagcgtctgcacgagtactaccatggcgaactcgacgccttgactctccagctcacccgcactcacttcgcgtccgatctacacctccgagtggacgtctccttcctggcaagcgcgtaccgcacgcctgaaaatctctggaagcacgcggcgaagcagatgcgcactttcagcgcaatcaccatcaccctgtatccgtgcgcgagcatggtgggcatgtttgacatcaaatacgagcaggtcttggcaaggcttctttacctcggaaccaaggatcatggtaacgggcagaacttgacttttcacgcgctgaacagcttgaacgacagcaggcacgcccgccacgggcacgagctacacgccgactacagttgccgtgcgcacctggacattcccgagaaaacagtgtctctgcactgtcccccgctgagccttcccaaggccccgtttaacgacacgggcgtggacggcatttgcgtggtcgtaaccagctctcgcgaccactgcgcggtacaaagtgaagaaggtgtccgcgagggctatacctcgtacgaggcagagacgccgttcctgtcttgcggtgcgtatgtccaagaatacgcagtccgcgagaatttctgctactacgagcgcaccctgcgcatcccactcgcgcacgactacgacccgtgcagcacagccatggtcctcggctacgcccacgtgtggctggaaacgcgtctcgtctcgccgccgtatgtgcaggagttcgggtacgacccctcgcgcaacgagtacgcgaacaggagtctctttgagcagctgcaagatctgcagcggcaatacgaggagctgctgaagcattcgagtaaccccgccgtgcgcatggccaatcagctcgcggccactctcacggaagaggcgcgggcaatcttccgcatcaatgccgacagccaactcatgcaaactgcgtttgaggccgacgaggagcgcctgcgcgagctcgaggcgcgcatcgagaataccatgcaagacatcttcctcaacaccatgagctaccaagaactggacgccctgcggcgctcggcattcagtacacgctgctgcgttcttgacggaaccagtgtacgcaagtactttccgctggagcattacctctgcggaaactacggggactacatcgttaccgccggcgagtaccgcttcctgctgatcaaccacacgctggtggacgaagcgtactacaacgccacggaacagccgtggctgacatgctacgagattactctggtccccgtctcgacggaagaacaacgtgcacgcgtcgaggaggccctcttcctggacgcgctcgagagcgtcctgcaggacctgttcaaccgctacgacgagaacctgaccgtcatcctgcataatccagggttgggcaagcacgacgaggaagaagacggcggcactagcaacgacaacgggcccggcgggacggggcttagcgtgccgctgggcgtctccctggcaacggccatgctagtcctactcgcgttcttgctagctcgccgcgggtatgcagccaagtgcatgggaaagtactcgccgctgaaggcgcagcaaaagcaagtgcgcgacttctggaagcaggtatgcgagcgctactccgcgcgcgaagaggcgggcatctccggcgaacttgcgcgcagcgcgagcttctacgagcgccgttctagcgacggcggccacttcgcacgccgctctagtagtgcgttgcttctccggcaagaggaaacgagcgcgtag

SEQ ID NO: 12154 - DNA, 33 bp, unidentified; identical to SEQ ID NO: 3295
  misc_feature 1..33: note = Synthetic
  source 1..33: mol_type = other DNA

SEQ ID NO: 12155 - DNA, 180 bp, unidentified
  source 1..180: mol_type = other DNA
  misc_feature 1..180: note = Synthetic
atcaccaccgtcagtgaaaacgtgcctgctctcacagatcacgggacgctaccgctgcgcagcagtatccgcggagtccagcgagtgaccgtcactgacgcccgtcgccgcacctgtccctacgtctacaaggccctgggcatagtcgcgccgcgcgtgctttccagtcgcaccttctaa

SEQ ID NO: 12156 - DNA, 69 bp, unidentified; identical to SEQ ID NO: 3303
  misc_feature 1..69: note = Synthetic
  source 1..69: mol_type = other DNA

SEQ ID NO: 12157 - DNA, 456 bp, unidentified
  source 1..456: mol_type = other DNA
  misc_feature 1..456: note = Synthetic
ttgctggttaagataaagggggtaccatggtcgatgaacaagtggcggtggaacacggcaccgtcagccacacaatcagccgggaggaagatggcgtggtccacgagcggcgtgtcttggccagcggggagagggtggaagtcttttataaggctccggccccacgacctcgggagggacgggcctctaccttccacgacttcaccgtcccggcggctgctgccgtcccagggccggaacctgagcctgagccacacccacctatgccaatccatgccaatgggggaggagagaccaagaccaatacccaggatcagaatcaaaatcagaccacccggacccggaccaatgccaaagctgaagaacggactgcggagatggatgacaccatggcctcgtcaggagggcagagaggggcaccaatttccgcggacctactctctctctcctcgttaa

SEQ ID NO: 12158 - DNA, 456 bp, unidentified; identical to SEQ ID NO: 12157
  source 1..456: mol_type = other DNA
  misc_feature 1..456: note = Synthetic

SEQ ID NO: 12159 - DNA, 456 bp, unidentified
  misc_feature 1..456: note = Synthetic
  source 1..456: mol_type = other DNA
ttgctggttaagataaagggggtaccatggtcgatgaacaagtggcggtggaacacggcaccgtcagccacacaatcagccgggaggaagatggcgtggtccacgagcggcgtgtcttggccagcggggagagggtggaagtcttttataaggctccggccccacgacctcgggagggacgggcctctaccttccacgacttcaccgtcccggcggctgctgccgtcccagggccggaacctgagcctgagccacacccacctatgccaatccatgccaatgggggaggagagaccaagaccaatacccaggatcagaatcagaatcagaccacccggacacggaccaatgccaaagctgaagaacggactgcggagatggatgacaccatggcctcgtcaggagggcagagaggggcaccaatttccgcggacctactctctctctcctcgttaa

SEQ ID NO: 12160 - DNA, 210 bp, unidentified
  misc_feature 1..210: note = Synthetic
  source 1..210: mol_type = other DNA
aggcgacgagcactgagtgacgaggttagcaagtggttccggacaggcttgggggccgaactggaggtggcactaacatctaggtatgaggtagagggctgcaaaagtatcctcatagccatgaccaccttggcgagggacattaaggcgtttaagaaattgagaggacctgttatacacctctacggcggtcctagattggtgcgttaa

SEQ ID NO: 12161 - DNA, 210 bp, unidentified; identical to SEQ ID NO: 12160
  misc_feature 1..210: note = Synthetic
  source 1..210: mol_type = other DNA

SEQ ID NO: 12162 - DNA, 123 bp, unidentified; identical to SEQ ID NO: 3308
  misc_feature 1..123: note = Synthetic
  source 1..123: mol_type = other DNA

SEQ ID NO: 12163 - DNA, 393 bp, unidentified
  misc_feature 1..393: note = Synthetic
  source 1..393: mol_type = other DNA
atgaaacggagtgtcatttttgttttgctgattttttgcgccctacctgtgctttgctcccaaacctcagcgcctcccaaaagacatatttcctgcagattcactcaaatatggaacattcccagctgctacaacaaacagagcgatttgtcagaagcctggttatacgccatcatctctgtcatggttttttgcagtaccatttttgccctagccatatatccataccttgacattggctggaatgccatagatgccatgaaccaccctactttcccagtgcccgctgtcataccactgcaacaggttattgccccaatcaatcagcctcgccccccttctcccacccccactgagattagctactttaatttgacaggtggagatgactga

SEQ ID NO: 12164 - DNA, 255 bp, unidentified
  misc_feature 1..255: note = Synthetic
  source 1..255: mol_type = other DNA
aagaccgcgatccgcccgctctcggacacgctcatccagtgctgcacgcgctcctcgacggccgcacggaactcgtcttcgtccgcgcacgagtacgccatggtcatcatgacgctgaagccgtccacaaacacggcggggaagcgctcgtcgccgccaggctcgtgcggggtcagcgcgccgtggctgagcagcaacgcctttaagtttttgatccccataaatggcctccgacgcgtcaccgaccgcggctaa

SEQ ID NO: 12165 - DNA, 69 bp, unidentified; identical to SEQ ID NO: 3317
  source 1..69: mol_type = other DNA
  misc_feature 1..69: note = Synthetic

SEQ ID NO: 12166 - DNA, 639 bp, unidentified
  misc_feature 1..639: note = Synthetic
  source 1..639: mol_type = other DNA
atgaaaaaaacatgtaacaccactggcaagatgaagatcattcggaaaattgttaagagctgtaaggatgatgagatgcaaaagcccaacccagtctctgcccctcctgacgacgatgacctatggcttccccctcctgaatatgtcccgctgtcagagatgactgggaagaagaacatgaggaacttttgtatcaacggggaagtcaaagtgtgcagcccaaatggatattcattcaggatcatcagacatatcttgagctccttcgaaggggtgtattctgggaatagaaggatgatagggctggtgaaggttgtcattgggttggcactgtccggggcccctgttccagatggaatgaattgggtttacaagatcaggcgcacccttatattccagtgggctgagtcatcgggccccctggatggggaggagttagaatactctcaggagattacatgggatgatgattctgagtttgtcggcttgcagatgagagtgagtgcaagacagtgtcatattcaggggagactctggtgtatcaacatgaactccagagcatgccagctgtggtctgacatgtctctaaaaactcagcagtctgacgaagacaagaacacttccttgctcctcgaatga

SEQ ID NO: 12167 - DNA, 96 bp, unidentified; identical to SEQ ID NO: 3319
  misc_feature 1..96: note = Synthetic
  source 1..96: mol_type = other DNA

SEQ ID NO: 12168 - DNA, 822 bp, unidentified
  source 1..822: mol_type = other DNA
  misc_feature 1..822: note = Synthetic
acgtcggttgttatggccgcgagaacgcgcagcctggtcgaacgcagacgcgtgttgatggcaggggtacgaagccatacgcgcttctacaaggcgctggccgaagaggtgcgggagtttcacgccaccaagatctgcggcacgctgttgacgctgttaagcgggtcgctgcagggtcgctcggtattcgaggccacacgcgtcaccttaatatgcgaagtggacctgggaccgcgccgccccgactgcatctgcgtgttcgaattcgccaatgacaagacgctgggcggggtttgtgtcatcatagaactaaagacatgcaaatatatttcttccggggacaccgccagcaaacgcgagcaacgggccacggggatgaagcagctgcgccactccctgaagctcctgcagtccctcgcgcctccgggtgacaagatagtgtacctgtgccccgtcctggtgtttgtcgcccaacggacgctccgcgtcagccgcgtgacccggctcgtcccgcagaaggtctccggtaatatcaccgcagtcgtgcggatgctccagagcctgtccacgtatacggtccccattgagcctaggacccagcgagcccgtcgccgccgcggcggcgccgcccgggggtctgcgagcagaccgaaaaggtcacactctggggcgcgcgacccgcccgagtcagcggcccgccagttaccacccgccgaccaaacccccgcctccacggagggcgggggggtgcttaagaggatcgcggcgctcttctgcgtgcccgtggccaccaagaccaaaccccgagccgcctccgaatga

SEQ ID NO: 12169 - DNA, 135 bp, unidentified; identical to SEQ ID NO: 3331
  source 1..135: mol_type = other DNA
  misc_feature 1..135: note = Synthetic

SEQ ID NO: 12170 - DNA, 21 bp, unidentified
  misc_feature 1..21: note = Synthetic
  source 1..21: mol_type = other DNA
atgtattttaacactaattag

SEQ ID NO: 12171 - DNA, 807 bp, unidentified
  misc_feature 1..807: note = Synthetic
  source 1..807: mol_type = other DNA
gtgcacaaaccaattcacgccccctactcaggaatggcattggtacctatccctgaataccagttggaaactggaattccgggcatcccagactggctcttcaaccttgtcgcgtcatacttgcccgagttgcctagtttgcaggacgtgttcaatagaattgcctttggaatctggtcatcatattacaatgcggggtcaacagtagttaacagagttcttagtgatgaaattcaaagacttttaagagaccttgaatatggatttagagcaactttagccagcataggagaatcagatcctgtaaatgctatagctactcaagttagaagcttagctaccacagcaagggaaagggagctgctacaaattactgcaggtcagccacttgacctttctaggcctaccagcgccttgtcagcagcagctggagcattaactgaagcagcttataattttatatatgatgcttcaagcctgcccaaagatggctttaatgctttaagtgagggtgtacacagactaggtcagtggatttccttttcagggcctacaggaggtaccccacattatgcaactcctgactggattttgtatgtgctagaacaactaaatgctgatacctataaaattcctacacaggcagtaaaaagaaaacaagatgagctgcaccccgtgtcgcccacaaaaaaggctaacaaggccaagaagtcaagttccccgggtacaaactctggcaacagaagtaaaaaaaggaggggtagaagtactagccgcagtaccactgtcagaagaaacagaatttaa

SEQ ID NO: 12172 - DNA, 45 bp, unidentified; identical to SEQ ID NO: 3339
  misc_feature 1..45: note = Synthetic
  source 1..45: mol_type = other DNA

SEQ ID NO: 12173 - DNA, 213 bp, unidentified
  misc_feature 1..213: note = Synthetic
  source 1..213: mol_type = other DNA
atcagtttaatgcagtcgtgtcccgccatgaatccaattactttgtgtgtattattatccaatccaatgaacaaatatccaccctctgtgttggcaaaagatgagagtatagagggaagctgttgccgtatacgtgttcttagttgcttagctgaaacagatgtatttttaatattaacggaattaccgaatttgactgattcacccgcctga

SEQ ID NO: 12174 - DNA, 15 bp, unidentified
  source 1..15: mol_type = other DNA
  misc_feature 1..15: note = Synthetic
atgcatgcgctctag

SEQ ID NO: 12175 - DNA, 63 bp, unidentified; identical to SEQ ID NO: 3354
  misc_feature 1..63: note = Synthetic
  source 1..63: mol_type = other DNA

SEQ ID NO: 12176 - DNA, 63 bp, unidentified; identical to SEQ ID NO: 3354
  source 1..63: mol_type = other DNA
  misc_feature 1..63: note = Synthetic

SEQ ID NO: 12177 - DNA, 54 bp, unidentified; identical to SEQ ID NO: 3355
  source 1..54: mol_type = other DNA
  misc_feature 1..54: note = Synthetic

SEQ ID NO: 12178 - DNA, 876 bp, unidentified
  misc_feature 1..876: note = Synthetic
  source 1..876: mol_type = other DNA
ttggcacttcattgcaccctgtgctgtggaactgtcagctatcctttgctggttatactgaatctgctgttaattctacaaaagctttggccaaacaggacgcagctcagcgaatcgcttggttgctacataaggatggaggaatccctgatggatgttccctctacctccggcactcaagtttattcgcgcaaagcgaggaagaggagccattctccaactaagaaactgcgctacgttaagcgtagattttctcttctgcgccatgaagaccttagtgttattgtccaaccaacacactatgtcagggttacattttcagaccccaacatgtggtatctacgttcgggtcatcatttacactcagttcacaattggcttaaaccttatggcggccaacctgtttctgagtaccatattactctagctttgctaaatctcactgatgaagatttagctagagatttttcacccattgcgctctttttgcgcaatgtcagatttgagctacatgagttcgccttgctgcgcaaaactcttgttcttaatgcatcagagatctactgtgctaacatacatagatttaagcctgtgtatagagttaacacggcaatccctactattaaggattggcttctcgttcagggattttccctttaccatagtggcctccctttacatatgtcaatctctaaattgcatgcactggatgatgttactcgcaattacatcattacaatgccatgctttagaacttaccctcaacaaatgtttgttactcctttggccgtagatgttgtctccatacggtcttccaatcagggtaataaacaaattgttcattcttatcccattttacatcatccaggattttaa

SEQ ID NO: 12179 - DNA, 330 bp, unidentified
  source 1..330: mol_type = other DNA
  misc_feature 1..330: note = Synthetic
atggattacgtgtctctgcttaatcaaatttggcagaagtaccttaattcaccgtatactacttgtttgtatatccctaaacccacagctaagtatacacctttagttggcacttcattgcaccctgtgctgtggaactgtcagctatcctttgctggttatactgaatctgctgttaattctacaaaagctttggccaaacaggacgcagctcagcgaatcgcttggttgctacataaggatggaggaatccctgatggatgttccctctacctccggcactcaagtttattcgcgcaaagcgaggaagaggagtcattctccaactaa

SEQ ID NO: 12180 - DNA, 876 bp, unidentified
  misc_feature 1..876: note = Synthetic
  source 1..876: mol_type = other DNA
ttggcacttcattgcaccctgtgctgtggaactgtcagctatcctttgctggttatactgaatctgctgttaattctacaaaagctttggccaaacaggacgcagctcagcgaatcgcttggttgctacataaggatggaggaatccctgatggatgttccctctacctccggcactcaagtttattcgcgcaaagcgaggaagaggagtcattctccaactaagaaactgcgctacgttaagcgtagattttctcttctgcgccctgaagaccttagtgttattgtccaaccaacacactatgtcagggttacattttcagaccccaacatgtggtatctacgttcgggtcatcatttacactcagttcacaattggcttaaaccttatggcggccaacctgtttctgagtaccatattactctagctttgctaaatctcactgatgaagatttagctagagatttttcacccattgcgctctttttgcgcaatgtcagatttgagctacatgagttcgccttgctgcgcaaaactcttgttcttaatgcatcagagatctactgtgctaacatacatagatttaagcctgtgtatagagttaacacggcaatccctactattaaggattggcttctcgttcagggattttccctttaccatagtggcctccctttacatatgtcaatctctaaattgcatgcactggatgatgttactcgcaattacatcattacaatgccatgctttagaacttatcctcaacaaatgtttgttactcctttggccgtagatgttgtctccatacggtcttccaatcagggtaataaacaaattgttcattcttaccccattttacatcatccaggattttaa

SEQ ID NO: 12181 - DNA, 246 bp, unidentified
  misc_feature 1..246: note = Synthetic
  source 1..246: mol_type = other DNA
atgcgcctggtccgaggccttatccggcatgagcatcacgacctcttgaatctcttccaggaaatggtgccggatgagatagcccggatagacctggatgacctgtcagtggcggatgatttatcacgcatgcgtgtgatgatgacctacctacagtctttggcatcactatttaatttggggcctcgcttggccacagcggcatactctcaagagaccctgacggccacttgctggttaagataa

SEQ ID NO: 12182 - DNA, 27 bp, unidentified
  source 1..27: mol_type = other DNA
  misc_feature 1..27: note = Synthetic
atcgtaagcatcgtggcggtggtgtga

SEQ ID NO: 12183 - DNA, 429 bp, unidentified
  misc_feature 1..429: note = Synthetic
  source 1..429: mol_type = other DNA
aagcatcgtggcggtggtgtgatggagtggaacacactagtattaggtcttttggttttatcggtagtggcaagttccaacaatacgtcgactgctagcacaccgcgtccctctagttctactcacgcctcaacaaccgtgaaggcaacgactgttgcgacaactagtacaactacggcgacaagtacttcatcgacgactagtgccaaacctggttccactactcacgaccccaacgtgatgagaccacatgctcacaatgatttttacaatgcgcattgtacatcgcatatgtatgagctttcactgtccagctttgcagcctggtggactatgcttaacgctctcattctgatgggagctttttgtatcgtattacgacattgctgcttccagaactttactgcgaccaccaccaaaggctattga

SEQ ID NO: 12184 - DNA, 9369 bp, unidentified
  misc_feature 1..9369: note = Synthetic
  source 1..9369: mol_type = other DNA
atgattccggccgcgctacctcaccccacgatgaagcgccagggggatcgcgatatcgtggtcaccggtgttcggaaccagttcgcgaccgatctggagccgggggggtcggtatcgtgcatgcgctcgtccctgtcgtttctcagtcttcttttcgacgtggggccccgcgacgtgctgtccgcggaggccatcgagggatgtctggtggaggggggcgagtggacgcgcgcggccgcgggctccgggccgccgcgcatgtgttccattatcgagctccccaacttcctggagtacccggcggcgcgcggcggcctgcgttgcgtgttttcgcgggtgtacggcgaggtgggcttcttcggggagcccacggcggggctgctggagacgcaatgccccgcgcacacgttcttcgccggcccctgggccatgcggccgctgtcctacacgctcctgaccatcggccccctgggcatggggctctaccgggacggcgacacggcctatctgtttgacccgcacggcctgcccgcgggaacgcccgcgtttatcgccaaggtgcgggcgggcgacgtgtacccgtacctgacgtattacgcccacgaccgccccaaggtgcggtgggcgggcgccatggtgttttttgtgccctccggcccgggggccgtggcgccggcggacctgaccgccgcggccctgcacctctacggggccagcgagacttacctgcaggacgaaccgttcgtcgagcggcgcgtggccatcacccaccccctgcggggcgagatcggggggctcggggcgctctttgtcggtgtggtccccaggggggacggagaaggctcgggcccggtcgtccccgcgctccccgcgcccacccacgtccagacccctggggccgaccggccccccgaggccccccggggggcctcgggcccacccgacacaccgcaggcggggcacccaaaccgcccccccgatgatgtgtgggcagcagccctggaggggaccccgcccgcgaagccctcggccccggacgccgcggcctcgggtccaccgcacgccgccccgcccccgcagacacccgccggggacgcggccgaagaagccgaggacctgcgggtcctggaggtgggggcagtgccggtgggtcgccaccgggcgcgctattctaccggcttgcccaagcgccgccggcccacctggaccccaccgtccagcgtggaggatctgacctcgggcgagaggcccgcccccaaggccccgcccgccaaggccaagaagaagtccgcgcccaagaagaaggcccccgtcgccgccgaggtccccgcctcctccccgacgcccatagccgccacggtccctcccgcaccggatacccccccgcagtccgggcagggcggcggcgacgacgggcccgcgagcccgtcgtcgccgtccgtgctcgagacgctgggggcccgccgccccccggagccccccggcgccgacctggcgcagctgttcgaggtccaccccaatgtggccgccacggcggtccggctcgcggcgcgcgatgccgccctggcccgcgaggtggccgcgtgttcgcagctcaccatcaacgccctgcggtcgccgtacccggcgcacccggggctgttggagctctgcgtcatcttcttctttgagcgcgtcctcgcctttttgatcgagaacggggcccgcacgcatacgcaggccggggtggccggcccggccgcggccctgctggacttcaccctgcgcatgctgccccgcaaaacggccgtcggggacttcctggcgtccacgcgcatgagcctggcggacgtggccgcccaccggcccctcatccagcacgtgctggacgaaaattcgcagatcgggcgcctggccctcgctaagctggtcctggtcgccagggacgttattcgggagacggacgccttttacggggacctcgcggacctggatctgcagctgcgcgccgccccgccggccaatctgtacgcacgcctcggagagtggctcctggagcgctcgcgcgcccacccgaacaccctgttcgcccccgccaccccgacgcacccggagccgcttctccatcggatccaggcgctggcccagtttgcccggggcgaagagatgcgggtcgaggcggaggcccgcgagatgcgcgaggccttagacgccctcgcccgcggggtcgactcggtctcgcagcgcgccgggcccctgaccgtgatgcccgtgcccgccgccccgggcgccggcggcagggccccgtgcccgcccgccctgggccccgaggccatccaggcgcggctggaggacgtgcggatccaggcccgccgggcgatcgagagcgcggtcaaggagtacttccaccggggagccgtatacagcgcgaaggccctgcaggccagcgacagccacgactgtcggtttcacgtggcctcggccgcggtcgtgcccatggtccagttgctggaatcgctaccggcctttgaccaacacacgcgggacgtcgctcagcgcgccgcgctcccccccccgccccccctcgccaccagcccccaggccatcctgctgcgggacctgctccagcggggccagaccctagatgcccccgaggacctggcggcctggctctcggtcctgaccgacgccgcgacccaggggctcatcgaacgcaagcccctggaagagctggcgcgcagcatccacggcatcaacgaccagcaggcgcggcgcagctcggggctggccgaactgcagcgcttcgacgccctcgacgcggcgctcgcgcagcagctggacagcgacgcggccttcgtcccggcgaccggccccgcgccgtacgtcgacgggggcgggctgtcccccgaggccacgcgcatggccgaagacgcgctgcggcaggcgagggccatggaggcggccaagatgacggcggagctcgctccggaggcgcgctcccggcttcgggagcgcgcccacgccctggaggcgatgctcaacgacgcgcgggagcgcgccaaggtggcccacgacgcccgggagaagttcctgcacaaactccaaggggtcctgcggcccctcccggactttgtggggctaaaggcgtgtccggccgtgctggcgaccctgcgggcctccctgcccgcggggtggaccgacctggccgatgccgtccggggcccccccccggaagtcacggcggcgctgcgggcggacctgtgggggctgctggggcagtaccgggaggccctggaacacccgaccccggataccgcgacggctctggccggcctgcatcccgccttcgtggtggtgctgaagaccctgttcgccgacgcccccgagacgccggtcctcgtgcagttcttttccgatcacgcccccacaatcgccaaagccgtgtcaaacgccatcaacgccgggagcgccgccgtcgcgacggcaagtcccgcggcgacggtggacgcggccgtgcgggcgcatggcgccctggcggacgcggtgtcggccctgggcgcggccgcccgcgacccggcctcgcccctgtccttcctcgcggtgctggccgatagcgccgcggggtatgtaaaggcgactcggctggccctggaggcgcggggggccatcgacgagctcacgaccctggggtcggcggccgccgacctggtagtccaggcgcgccgggcctgcgcccagccggagggggaccatgccgccctcatcgatgccgcggcccgcgcgacgaccgctgctcgggaaagcctcgcggggcacgaggctgggttcgggggcctgctgcacgccgaagggacggccggggaccattcccccagcgggcgcgccctgcaggagctgggcaaggtcatcggcgccacgcgacgccgcgccgacgaacttgaggccgccgtcgccgacctgacggcgaagatggcggcccagcgcgcccggggcagcagcgagcgctgggccgccggcgtcgaggcggcgctggaccgcgtcgagaaccgcgccgagttcgacgtggtcgagctgcgccgcctgcaggcgctggcgggcacgcacggctacaacccccgggacttccgcaagcgcgccgagcaggcgctcgcggccaacgccgaggcggtcaccctcgccctggatacggccttcgcgtttaacccctacacccccgagaaccagcgccaccccatgctccccccgctcgccgccatccaccgcctcggctggagcgcggcgttccacgccgccgccgaaacctacgccgacatgtttcgggtcgacgccgagcccctggcgcggctgctgcgcatcgcggaggggctcctggaaatggcccaggcgggcgacgggtttatcgactaccacgaggccgtggggcgcctggcggacgacatgacgagcgtgcccggcctgcgccggtacgtgccgttcttccaacatggctacgccgactacgtggagctccgcgatcgcctggacgccatccgggccgacgtgcaccgggcgctcggcggcgtgcccctggacctggcggccgccgcggagcagatatccgcggcccggaatgacccggaggccaccgcggagctggtccggaccggggtcaccctgccgtgtcccagcgaggacgcgctggtcgcgtgcgcggcggcgttggagcgcgtggaccagagccccgtgaagaacacggcgtacgccgagtatgtcgccttcgtgacccggcaggacacggccgagaccaaggacgcagtggtgcgcgccaaacagcagcgcgcggaggccaccgagcgggtcatggcgggcctgcgggaggcgctggccgcgcgcgagcgccgggcccagatcgaggccgagggcctggccaacctcaagaccatgctgaaggtggtcgccgtcccggcgaccgtggccaagacgctcgaccaggcgcgctcggtggcggagatcgccgaccaggtcgaggttctgttggatcagaccgagaaaacgcgcgagctcgacgtgcccgcggttatctggctagagcacgcccagcgcaccttcgagacgcacccgctaagcgccgcccgcggcgacggccccggccccctggcgcggcacgccggccgcctgggggcgctctttgatactcggcgccgcgtcgacgccctgcggaggtccctggaggaggccgaggcggagtgggacgaggtctggggtcgctttggccgcgtccgggggggcgcctggaagtcccccgaggggttccgcgccatgcacgagcagctgcgcgccctgcaggacaccaccaacacggtgtcggggctgcgggcccagccggcctacgagcgcctttccgccaggtaccagggcgtcctgggcgccaagggcgccgagcgcgcggaggccgtggaggagctgggcgcgcgcgtcaccaagcacaccgccctgtgcgcccggctgcgggatgaggtggtgcgcagggtgccctgggagatgaactttgacgccctggggcgcctgctggcggagttcgacgcggcggccgcggacctggccccgtgggcggtggaggagttccggggcgcgcgggaactcatccaataccgcatgggcttatatagcgcgtacgccagggccggcggccagacgggcgcgggcgcggagtccgcgcccgcgcccctgctcgttgatcttcgcgccctcgacgcccgcgcccgggcctcttcttcccccgagggccacgaggtcgacccgcagctgctgcgccgccggggcgaggcgtatctgcgcgccggcggagacccggggcccctggtgctgcgtgaggccgtcagcgctctggatctgccgttcgccaccagctttttggccccggacggaacgccgctgcagtacgcgctatgcttcccggccgtcaccgacaaactcggcgcgctgctgatgcgtcccgaggcggcctgcgtgcggcccccgcttccgacggacgtcctcgaatcggccccgacggtcacggccatgtacgtgctgaccgtcgtgaaccggctccagctggccctcagcgacgcccaggccgccaactttcagctgttcggtcgcttcgtgcgccatcgccaggcgacgtggggcgcctcgatggacgcggcggccgagctgtacgtcgccctcgtcgccaccaccctcacgcgcgagtttgggtgtcgctgggcccagctgggctgggcgtccggagcggcggcgccgcgtccgccgccgggcccccgggggtcccagcgccactgcgtcgccttcaacgagaacgacgtgctggtcgcgctggtggccggcgttccggaacacatctacaacttctggcgcctggacctcgttcgccagcacgagtacatgcacctcaccctcgaacgcgcgttcgaggacgcagcggagtccatgctgttcgtccagcgcctgaccccgcatcccgacgcccgcatccgcgtgttgccgacgtttttggacggaggccccccgacccggggcctcctgttcggcacgcggctggccgactggcgccggggcaagctgtccgaaaccgacccgctggcgccctggcgctcggccttggagctcgggacccagcgccgggacgtcccggcgctcgggaagctcagtccggcccaggccctggcggcggtgagcgtcctcgggcgcatgtgtctgccgagcgccgctttggccgcgctgtggacctgcatgtttcccgacgactacaccgagtacgacagcttcgacgccctcctggccgcacgcctggagtctggccagacgctcggcccggcgggggggcgcaaggcgtccctccccgaggccccccacgccctctaccgacccacgggccagcacgtggccgtgctggccgccgcgacccaccgcacccccgccgcgcgcgttacggccatggacctggttctggccgcggtgctcctcggcgcgcccgtcgtggtggcgctccgcaacaccacggccttctcccgcgagtcggaactggaactgtgcctgacgctcttcgactcgcgccccggcgggccggacgccgccctgcgcgacgtcgtgtcgtccgacatcgagacgtgggccgtcggcctcctccacaccgatctcaacccgatcgaaaacgcgtgtctggcggcgcagctcccgcgcctgtcggcgctcatcgccgagcgccctctcgccgacgggcccccgtgcctggtcctcgtggacatctccatgaccccggtcgcggtcttgtgggaagccccggagccccccggcccccctgacgtgcggtttgtgggcagcgaggccaccgaggagcttccgtttgtggctaccgcgggggacgttctcgcggcgagcgccgccgacgcggaccccttcttcgcgcgggccatcctcgggcggcccttcgacgcctccctcctgacgggggagctgttcccgggacacccggtttaccagcgccccctcgccgacgaggcaggtccctctgccccgaccgccgcccgcgacccgcgggaccttgcggggggggatggcggatcgggtcccgaggaccccgctgccccccccgcacggcaggcggacccgggggtcctcgcccccactctcctcaccgacgccaccaccggcgagcccgtcccccctcgcatgtgggcctggatccacggcctggaggagctggcgtccgacgacgccggcggccccacgcccaatccggccccggcccttcttcccccccccgccaccgatcagtccgtccccacgtcccagtacgcaccgcggcccatcgggccggcagctacggctcgcgaaacacgaccgagtgtcccgcctcaacaaaacacggggcgcgtgcccgtggcccctcgcgacgacccacggccctcgccacccacaccgagtccccccgcggatgccgcgcttcctcccccggccttttccggctctgccgccgctttctccgccgccgtgccgcgcgtgcgcaggtcccgccggacgcgtgccaaatcgcgcgcgccccgggcctccgccccccccgaggggtggcgtccgccggcactccccgccccggtcgccccggtcgccgcttccgcgcgtcctcccgaccagccgcccaccccggagtccgcgcccccggcttgggtttctgctttgccccttccgcccggccccgcctcggctcgcggggcctttcccgcccccacgctcgcgcccatcccgcctccgcccgccgaaggagcggtcgtccccgggggcgaccgccgccgcggccgccgccagacaacagcgggtccctcgccgacacccccccggggccccgcggccggcccaccccggcgcctcacgcgccccgcggtcgcctcgctctcggcctcgttgaactccctcccctctccccgggacccagccgaccacgcggccgcggtttccgccgcagcggcggcagtgccgccttctccgggccttgcccccccgacctccgccgtccagaccagccccccgcctttggccccaggcccggttgccccgagcgagcctttgtgcggttgggtcgtgcccggaggcccggttgcccgccgccccccaccccagtcacccgcgaccaaacccgccgcgcggacgcgcatccgcgcgcgctcggtgccccagccgcccctgccccagccgcccctgccccagccgcccctgccccagccgcccctgccccagccgcccctgccccagccgcccctgccccagccgcccctgccccagccgcccctgccccagccgcccctgccccagccgcccctgccccagccgcccctgccgcccgtaactcggacgcttacaccccagagccgagactcggtcccgacgcccgagtctcccacacatacaaacacccacctcccagtgtccgctgtgacttcgtgggcttcctctctcgcgcttcacgtcgactccgcgcccccacccgcatcgctgcttcagacgctgcacatctcctccgatgatgaacactccgacgcagactccctgcgtttctcggactcggatgataccgaggcgctcgaccccctcccaccggaaccgcacttgccccccgccgacgaaccacccggcccattggccgccgaccacctccagtcaccacactcgcaatttggccccttgcccgtacaggcaaatgccgtcttgtcgcgacgctacgtacgaagcaccggtcgtagcgccctggcggttttgatccgcgcatgccgccgcatacaacaacagctgcagcggacccgcagggcgctgtttcagcgcagcaacgccgtgctgaccagcctacatcacgtgcgcatgttactgggttag

SEQ ID NO: 12185 - DNA, 39 bp, unidentified; identical to SEQ ID NO: 3370
  misc_feature 1..39: note = Synthetic
  source 1..39: mol_type = other DNA

SEQ ID NO: 12186 - DNA, 39 bp, unidentified; identical to SEQ ID NO: 3037
  source 1..39: mol_type = other DNA
  misc_feature 1..39: note = Synthetic

SEQ ID NO: 12187 - DNA, 39 bp, unidentified; identical to SEQ ID NO: 3373
  source 1..39: mol_type = other DNA
  misc_feature 1..39: note = Synthetic

SEQ ID NO: 12188 - DNA, 39 bp, unidentified; identical to SEQ ID NO: 3374
  misc_feature 1..39: note = Synthetic
  source 1..39: mol_type = other DNA

SEQ ID NO: 12189 - DNA, 246 bp, unidentified
  source 1..246: mol_type = other DNA
  misc_feature 1..246: note = Synthetic
atgcgcctggtccgaggccttatccggcatgagcattacgacctcttgaatctcttccaggaaatggtgccggatgagatagcccggatagacctggatgacctgtcagtggcggatgatttatcacgcatgcgtgtgatgatgacctacctacagtctttggcatcactatttaatttggggcctcgcttggccacagcggcatactctcaagagaccctgacggccacttgctggttaagataa

SEQ ID NO: 12190 - DNA, 882 bp, unidentified
  misc_feature 1..882: note = Synthetic
  source 1..882: mol_type = other DNA
ctgtctccacctttgagaaacactcatcctcaggccatgcagtggaattccacaaccttccaccaaactctgcaagatcccagagtgagaggcctgtatttccctgctggtggctccagttcaggaacagtaaaccctgttctgactactgcctctcccttatcgtcaatcttctcgaggattggggaccctgcgctgaacatggagaacatcacatcaggattcctaggaccccttctcgtgttacaggcggggtttttcttgttgacaagaatcctcacaataccgcagagtctagactcgtggtggacttctctcaattttctagggggaactaccgtgtgtcttggccaaaattcgcagtccccaacctccaatcactcaccaacctcttgtcctccaacttgtcctggttatcgctggatgtgtctgcggcgttttatcatcttcctcttcatcctgctgctatgcctcatcttcttgttggttcttctggactatcaaggtatgttgcccgtttgtcctctaattccaggatcctcaacaaccagcacgggaccatgccggacctgcatgactactgctcaaggaacctctatgtatccctcctgttgctgtaccaaaccttcggacggaaattgcacctgtattcccatcccatcatcctgggctttcggaaaattcctatgggagtgggcctcagcccgtttctcctggctcagtttactagtgccatttgttcagtggttcgtagggctttcccccactgtttggctttcagttatatggatgatgtggtattgggggccaagtctgtacagcatcttgagtccctttttaccgctgttaccaattttcttttgtctttgggtatacatttaa

SEQ ID NO: 12191 - DNA, 27 bp, unidentified
  misc_feature 1..27: note = Synthetic
  source 1..27: mol_type = other DNA
ctgcgcaagctagacgtaactatataa

SEQ ID NO: 12192 - DNA, 114 bp, unidentified; identical to SEQ ID NO: 3386
  source 1..114: mol_type = other DNA
  misc_feature 1..114: note = Synthetic

SEQ ID NO: 12193 - DNA, 153 bp, unidentified
  misc_feature 1..153: note = Synthetic
  source 1..153: mol_type = other DNA
atgatcctgtacagcgatagacaagcaatgaggaacaaaaaagatagacaatctccaacaacaaatggcacaaagcgtccaacactaggggggaagagagcacccccaagatggccgaccacactgatgtcctactgccagaagttcatctga

SEQ ID NO: 12194 - DNA, 978 bp, unidentified
  source 1..978: mol_type = other DNA
  misc_feature 1..978: note = Synthetic
atgtctaaggaatgtggcttaacgacgatgctgcgctgcaaagaaaaattaattgcagcttcgaaagatttaaagttttttgaaaaaacagttcaagaaataatgaaggatggcgtgtccattcaacacataatgtgtatcaatattcgaatttgtgatatgactgacattcttccagaaaggagacttaaacgtttagttaacatcggattttatccatttgagggaaagatggtgatgtttggggttgccgaagaatgggtgtcagcttctgggacgccgcgaagacaaatagtttttttactgtccttgtctcagcatgtgtttgcttatgaagatggtgtgatgttctatttatcgcccacatttgaagatttctggaccacgaaattggaatttagctgtcaaaatgcaattacacatggcatgtcaaagaagatgtcgagagatgaatgccatgaaagatttatcaactactatcatcgaatacgacaaaaaacaatcaatattagtggaaaactacctgcgcgatttcaaagagttcttcctggtcacaagctttcgaatgatagagagacacaggcagaaaaaatgtatatgtccataggatactcagaaaatgacaatcttccaaataattgcaagatttacaaaatgtgtcatacacctggtgtgacaattttagtgtccagatctacgcaaacgggactcggacattttactcgcagtactcaaacatcacaaaatgacattttttttaaagaacggtgttacaaaccgcaaaccacagcggaaatgtatccctataaagaggtaaacacagctaacgagacagagacagcacctttagatatgctagaagagagttcaaacttctcattggaaacctatgaagaaatagcaaactcgccactgaaaaacttggaacacacttcaacttcgggtttcccggtgaatttcgaacaatttaccgagtag

SEQ ID NO: 12195 - DNA, 213 bp, unidentified
  misc_feature 1..213: note = Synthetic
  source 1..213: mol_type = other DNA
ttgacagaagagcagtcagaaaacctgtcagaatctacagtagcagaggtggagcctcagagaactctgtacaagattgtagtaccgtgtggaggctgtgattcccggctgaaaatctacgtttctgctacacagtttggaattcgttctttagaagacttgctgctagaagaaccttctttgctgtgtcctgcttgcagaaatggcagataa

SEQ ID NO: 12196 - DNA, 27 bp, unidentified
  source 1..27: mol_type = other DNA
  misc_feature 1..27: note = Synthetic
atgctgtcaacgtgggtgaggacgtga

SEQ ID NO: 12197 - DNA, 30 bp, unidentified; identical to SEQ ID NO: 3394
  source 1..30: mol_type = other DNA
  misc_feature 1..30: note = Synthetic

SEQ ID NO: 12198 - DNA, 945 bp, unidentified
  source 1..945: mol_type = other DNA
  misc_feature 1..945: note = Synthetic
ttgcactcgaaaacagtctacatgtccgacctatgcgcttttatttctggttgtgttaatcggaatgtcggtaaacttaccatatattggcatgtgaacggagatataatctacgcattgacgggtattttacattgtgtaaaaataaagatagagtgcggggagagaattgccgatggtcgatatagattatacgaaattcctaaattatttttaatgagaggacagtcaacacccatggaattgaagtggaagcacgccgtgggtatcgcgacgacgaataagcctttgctgacgcacgttttaacagatgtgttggaaacatctccttttaccttgccagatacgcttctgtcggtgcaggagttgtctattttcagagagagattgtcgtacatttactatgtgctggggtcagatgttgatatcgtagcgcggacagagagagagatttttcaaaaatgtgcagaactagctcgcctacagcaagtgttccttattcaaggaaatattatggaaaactttgtcctcgcccaggcttgtctatttcagctgggggctgatggtttgtgggaagagatatctggttctgtacgtcctaggccggaattgatgtccagtgcgttcattcaacacagagtaatgttgaataattgttattgtatcgctgtcatcttcaatgccatttacaaacacaaactttccctgcctaccgtagaaagaagccacgaaaccgttaatcgtgtagctcaggaatattataagtcttatgtgaatgctcctctctctgttcttgtgtgtgcgactaaggtgcttactttatttacagaagaatataactttaagtcagctctcgtatttgtcagtcagtttttccaggtggacgtcgaggcttcgagagcggatgtgattcgtctgtttttagcgtgtctaaagggtgattaa

SEQ ID NO: 12199 - DNA, 24 bp, unidentified
  misc_feature 1..24: note = Synthetic
  source 1..24: mol_type = other DNA
atgagattttcaatccggagttaa

SEQ ID NO: 12200 - DNA, 24 bp, unidentified
  source 1..24: mol_type = other DNA
  misc_feature 1..24: note = Synthetic
atgaaattttcaattcggatttaa

SEQ ID NO: 12201 - DNA, 84 bp, unidentified; identical to SEQ ID NO: 3399
  source 1..84: mol_type = other DNA
  misc_feature 1..84: note = Synthetic

SEQ ID NO: 12202 - DNA, 63 bp, unidentified; identical to SEQ ID NO: 3401
  source 1..63: mol_type = other DNA
  misc_feature 1..63: note = Synthetic

SEQ ID NO: 12203 - DNA, 84 bp, unidentified; identical to SEQ ID NO: 3402
  source 1..84: mol_type = other DNA
  misc_feature 1..84: note = Synthetic

SEQ ID NO: 12204 - DNA, 126 bp, unidentified
  misc_feature 1..126: note = Synthetic
  source 1..126: mol_type = other DNA
atggagttagaaaacgagccagtaatcttaccatgtcctcaaataaatactctatcgtttggatataatatattagatattttatgggaaaacgagaagcggataatgatagaattataccaatag

SEQ ID NO: 12205 - DNA, 2052 bp, unidentified
  source 1..2052: mol_type = other DNA
  misc_feature 1..2052: note = Synthetic
atgcctttctacaaaagatggagacgctggcgctggcgccgcagaccccgacggctttggagaaggagatttagacgccctctttacagaagattttggagaagaaaatacagggtaagaaaaagaaaacttaaatacttacccttaagacaatggcaacctcattatattaataaactaaaagtacaaggatggtacccactagcaatatcaactaaagacagactatcaaataacttaaacttatatttagaaagcattgcgccgcattatttgcatggtgggggaggatttacaatatgtaacttctctttaatgactttatatcaagaaaaccttgtatgtagaaactggtggacaaaaggaaatgaaaatatgcctttaattagatacctaggatgtgaaattaccttatatagacaagctgaactagactacatggtatatgtacataattcttatcctatgtcagctaatttactaacatatcaaagtacatgcccacaagttatgcttatgaacaatagaacaagaataatgccttgtaaaagatataatagaaacaaaaaaccttacaaaaaattctttgtaaaaccaccttctcaattacaaaacaaatggtactttcaaaaggaactatctaacgttccacttatgcaagtaatggctacaacttgctcgttagaccgcatgtacctttcctcatcatcagtttcaaccacaatgggttttgtaagcttagatactaacggttttatggaaagatatatgaaagacaatggaacatcaccatactccccattaacaggacaaataatttttgctgcaccaaacggtgaagaactaataacaaatatacccctaggacaatgcatattattaggaacagtaacagactatacaacaggaacccaactttcatccataaacttacatacaggtgcactcactcccccttcaacttggggaacctataaaacagcatctacagcaatttataatgcatactatcaacacaaatattggggaaatcccttttttacaaattggttccatggtgaccaaagaatggtagctacaggcaaaaccttaaaagaactttgtgacctatacaaaaatgacgacttaaacacagctaaactaaacaaaggctttatatttaaagaacaaaagtgggtagaactcagatacaacccatgggcagataaaggaaaaggtaatatggtatatttgttacccattaatgaacatcaacactcttatggctgggcaccaccaacaaacaaagatgttataacacaagacctacccctcaacatattactatggggatacctagattttcacagaaaagcaaaaacatacaatgacatagacacaacatgtatactagtcatcaaatctccttacctacatccaaaaggacaaattacttttgctgttcctttagatcaagaatttctagatggtagctcaccatactttactgaaggtcacaaaacacaatcagaccaacaatattggcatccaaaagtaagatttcaaactagaaccgttaatgccatagcatgtacaggcccaggaacaacaaaattaccaccagatattagtactgaaattcatatgaaatataaatttcgttttaagattggaggagaaccagcacccatgtctgtactcaaaaacccagatgaccaaccaacctataccatccccaataacctcctacaaacaacttcgttgcagagtccaacaacaccatttgaatacctcctctggaactttgacgaacgcagaggagagcttacaaaaagagctgcaaaaagaattactcaaaacatccaaactgaaacaaatgttttgccaattacagaatcagcagcctggtgtccaacaacatacagaaaaacacaagacccatcggagacatcgacctcggaagaagacgaaacactcacgacggaggagaaactactccagcagcgaagagagcaaaaactcctccacaaactcatcagacgacagttactcagactaaccacattagaataa

SEQ ID NO: 12206 - DNA, 219 bp, unidentified
  misc_feature 1..219: note = Synthetic
  source 1..219: mol_type = other DNA
atgcgcggggagatgatgtacagaatactggtgagcatattcaggaccccgggccggggccttcaaccggcggggcttctgagggattggtgcagaacgagccggactcaagagatcaacagtcccgggggcagagaaggggtgatgaaaacagaggctggatgcagcgcatcaggcgaaggcggagaagacgggccgcattgtccggccatcttttag

SEQ ID NO: 12207 - DNA, 162 bp, unidentified; identical to SEQ ID NO: 3411
  source 1..162: mol_type = other DNA
  misc_feature 1..162: note = Synthetic

SEQ ID NO: 12208 - DNA, 15 bp, unidentified
  source 1..15: mol_type = other DNA
  misc_feature 1..15: note = Synthetic
gtggtgaaaacataa

SEQ ID NO: 12209 - DNA, 2373 bp, unidentified
  misc_feature 1..2373: note = Synthetic
  source 1..2373: mol_type = other DNA
agggagatggacagctcggaagggtgcactgatatggacgagcccagccccgggttcatcctcaacatgacatcggatgccaaagtcaggagcgtagtggaacagattgacaggttgtcaaatatcactacctcgcccccggagatgggctggtatgacctagagttcgatccactggaagacgaaggcccctttctgccgttttcggcatacgtaataacggggactgcaggagcggggaaaagcaccagcgtatccgccctacatcagaatctcaactgcctaattacgggggctacagtggtagcggcacagaatctttccagggctttaaagtcctactgtcccactatataccacgccttcggattcaagagcagacacattaatatctgccagaggaaagtgcccaaggtaactcagtcctccatcgagcaactccagagatacgagctggctaggtactggccaactgtcaccgatattattcgagaatttatgcgcaagaaacaaaaggggcagtatagctccctctctcaaagcgctttcagactcctttgccgtatgggtggagccaatttgtggacgagtaacattatcgtgatagacgaagctggaaccctctcgtcccatattttgacggccgtggtgttcttctattggttttacaacagttggctggacaccccgctatacagaaatggtgccgtgccttgcatagtctgcgtggggtctcccacccagacggacgcctttcagtcggtcttcaaccacacgcagcagagaaacgagatatctgcctgtgataatgtgctcaccttcctattgggaaaacgtgaggttgcagattatattaggctggacgagaattgggccctatttataaacaataagcgctgtacggatccccagtttggtcacttgctgaagaccttagaatataatctagacatatcaccagagttaatggactatatagataggtttgtggttccgaagagtaagattctggacccgctcgagtatgcagggtggacaagactcttcatctcacaccaggaggtgaagtcttttctggcaacgctgcacacctgcctgtcgagtaataaggatgctgtgtccacaaagcttttcacctgcccagtggtctgtgaggtgtttacagagccatttgaggagtacaaacgggcggtaggcctcacacacatgactcccatagaatgggtaacaaaaaatcttttcaggctaagtaactactcgcagtttgctgatcaggacatggctgtggttgggacctatatcacagacgcgtccacacagatcaccttcgccactaaatttgtcaaaaacagctatgctacccttactggaaagaccaaaaaatgtatatgcgggtttcacgggtcataccaaagattcaagtccatcctagacggggagctatttatcgaaagtcattcgcacgataaccccgcttatgtgtacagtttccttagtaccctgctatataatgccatgtactcattttacgcgcacggggtgaagcaggggcatgaagaattcctcagggacctcagggaactgccggtgtctcaagagctgatctctgagatgagctccgaggacgttctggggcaggagggggacacagatgccttctacctcaccgccagcctcccaccatcccccacccacgcggctcttccaacactggtggcctattactccggggccaaggaactattctgcaacaggctggccctggcacgccgacactttggtgacgagttcctccactccgatttttcaacgtttacggtgaacatcgtggtgcgagatggcgtggactttgtgtccacttcccccgggctccacggtctagtggcatacgcatccactatagacacctatataatccagggatatacgttcctcccagtgagattcggccgtccaggaggacagcgcctcagcgaggacctgcgcagaaagatgccctccatagttgtccaggactcatcggggttcattgcctgcctggaaaataacgtcaccaagatgacagagaccctcgaaggtggcgacgtgtttaacatatgttgtgcaggggactacggtatcagttctaatctggctatgaccatagtgaaggcacagggggtttcactaagtagggtggccatatcgttcggcaaccaccgcaatatcagagccagtctagtgtatgtgggtgtatccagggccatcgacgctcgttacctggtaatggacagtaatccccttaagctaatggaccgcggcgacgcccagtccccatcctcaaagtacatcatcaaagccctatgcaaccccaagactactctgatctactga

SEQ ID NO: 12210 - DNA, 2373 bp, unidentified
  misc_feature 1..2373: note = Synthetic
  source 1..2373: mol_type = other DNA
agggagatggacagctcggaagggtgcactgatatggacgagcccagccccgggttcatcctcaacatgacatcggatgccaaagtcaggagcgtagtggaacagattgacaggttgtcaaatatcactacctcgcccccggagatgggctggtatgacctagagttcgatccactggaagacgaaggcccctttctgccgttttcggcatacgtaataacggggactgcaggagcggggaaaagcaccagcgtatccgccctacatcagaatctcaactgcctaattacgggggctacagtggtagcggcacagaatctttccagggctttaaagtcctactgtcccactatataccacgccttcggattcaagagcagacacattaatatctgccagaggaaagtgcccaaggtaactcagtcctccatcgagcaactccagagatacgagctggctaggtactggccaactgtcaccgatattattcgagaatttatgcgcaagaaacaaaaggggcagtatagctccctctctcaaagcgctttcagactcctttgccgtatgggtggagccaatttgtggacgagtaacattatcgtgatagacgaagctggaaccctctcgtcccatattttgacggccgtggtgttcttctattggttttacaacagttggctggacaccccgctatacagaaatggtgccgtgccttgcatagtctgcgtggggtctcccacccagacggacgcctttcagtcggtcttcaaccacacgcagcagagaaacgagatatctgcctgtgataatgtgctcaccttcctattgggaaaacgtgaggttgcagattatattaggctggacgagaattgggccctatttataaacaataagcgctgtacggatccccagtttggtcacttgctgaagaccttagaatataatctagacatatcaccagagttaatggactatatagataggtttgtggttccgaagagtaagattctggacccgctcgagtatgcagggtggacaagactcttcatctcacaccaggaggtgaagtcttttctggcaacgctgcacacctgcctgtcgagtaataaggatgctgtgtccacaaagcttttcacctgcccagtggtctgtgaggtgtttacagagccatttgaggagtacaaacgggcggtaggcctcacacacatgactcccatagaatgggtaacaaaaaatcttttcaggctaagtaactactcgcagtttgctgatcaggacatggctgtggttgggacctatatcacagacgcgtccacacagatcaccttcgccactaaatttgtcaaaaacagctatgctacccttactggaaagaccaaaaaatgtatatgcgggtttcacgggtcataccaaagattcaagtccatcctagacggggagctatttatcgaaagtcattcgcacgataaccccgcttatgtgtacagtttccttagtaccctgctatataatgccatgtactcattttacgcgcacggggtgaagcaggggcatgaagaattcctcagggacctcagggaactgccggtgtctcaagagctgatctctgagatgagctccgaggacgttctggggcaggagggggacacagatgccttctacctcaccgccagcctcccaccatcccccacccacgcggctcttccaacactggtggcctattactccggggccaaggaactattctgcaacaggctggccctggcacgccgacactttggtgacgagttcctccactccgatttttcaacgtttacggtgaacatcgtggtgcgagatggcgtggactttgtgtccacttcccccgggctccacggtctagtggcatacgcatccactatagacacctatataatccagggatatacgttcctcccagtgagattcggccgtccaggaggacagcgcctcagcgaggacctgcgcagaaagatgccctccatagttgtccaggactcatcggggttcattgcctgcctggaaaataacgtcaccaagatgacagagaccctcgaaggtggcgacgtgtttaacatatgttgtgcaggggactacggtatcagttctaatctggctatgaccatagtgaaggcacagggggtttcactaagtagggtggccatatcgttcggcaaccaccgcaatatcagagccagtctagtgtatgtgggtgtatccagggccatcgacgctcgttacctggtaatggacagtaatccccttaagctaatggaccgcggtgacgcccagtccccatcctcaaagtacatcatcaaagccctatgcaaccccaagactactctgatctactga

SEQ ID NO: 12211 - DNA, 2316 bp, unidentified
  source 1..2316: mol_type = other DNA
  misc_feature 1..2316: note = Synthetic
atgtttgtcattaaacgaaatggatacaaggaaaatgtcatgtttgataaaatcacgtctcgtattagaaaattgtgctatggcttaaacacggatcatatagatcctattaaaatagctatgaaggttattcaaggaatatataatggagtaacaacggtagaattggacactctggcagccgaaatagcagccacttgtactacacaacatccggattatgccattctagccgccagaatagccatatcaaatctacacaaggaaacaaaaaaactatttagtgaagtgatggaggatttattcaactatgttaatcctaaaaatgggaaacattctccgattatttcaagtattaccatggatatagttaacaaatataaggataagctcaattcggttattatttacgaacgagacttttcatacaactattttggttttaaaactttggaaaaatcctacttgttgaaaataaacaacaaaattgttgaaagacctcagcacatgttaatgcgtgtcgcagtaggaattcatcaatgggatatagactcagctattgagacgtacaatctactttctgaaaaatggtttacgcacgcttctcctaccttatttaatgcgggaactactcgtcaccaaatgtctagctgttttctacttaacatgatcgatgatagcatagaaggcatctatgacacgttaaaacgatgcgcattaatctctaaaatggcagggggaataggtctatcaattagtaatattcgtgccagtggaggctatatctccggtaccaatggtatatcaaacggtattattccaatgttgagagtttataataacaccgctagatacatagatcagggaggaaacaaacggcctggagttatggccatatacttggaaccgtggcattctgatattatggcgttcctcgatcttaaaaagaatacaggaaacgaggaacatagaacaagagatctatttatagctctttggattcctgatctctttatgaaacgagtgaaggatgacggagagtggtcgttgatgtgtccggatgaatgtcctagattggacaatgtttggggagacgagttcgaacgattgtatactctatacgaaagagaaaggagatacaaatctataataaaggctcgagtcgtctggaaagcgattatagaatctcagattgaaactggtactccattcattctttataaggatgcgtgtaacaaaaagagtaatcaacaaaatttaggaactatcaagtgtagtaatctttgcactgagataatacaatatgcggatgctaatgaggtagccgtgtgtaatctggcatctgttgcattgaacatgtttgtaatagatgggcgatttgattttctcaaactgaaggatgtggtcaaagtaattgtcagaaatctcaataaaattatagatattaattattatcctattccagaagctgaaatctctaataagagacatagacctatcggtattggtgttcaaggattagcggacgcgtttattctcttaaattatccatttgatagcccggaagcacaagatctaaataagaagatctttgaaaccatttattacggtgcattagaggcgagttgtaaactagctgagaaggaaggaccatatgatacatatgtaggatcgtacgccagtaacggtattctacaatatgatctttggaatgttgtaccgtcggatctttggaattgggaacatctaaaagataaaatcagaacatacggtcttagaaatagtttattggtggcacctatgccgactgcatcaactgctcaaattttgggaaataatgagtcggtggaaccgtataccagtaatatttacactcggagagtattgtctggagaattccaagtagttaacccgcatctccttagagttttaaccgagagaaaattatggaatgatgagatcaagaataggattatggtagatggtggatccattcagaatacaaaccttccagaagatattaagcgagtttataaaactatttgggaaattgcacaaaagacgatcataaaaatggctgcagacaggggagccttcatcgatcaaagtcaatctatgaatatccatatagcagatccgagttattccaaactaacgagtatgcatttttacggatggagtctcggtctaaaaacgggaatgtactatctacgtacgaaacccgcatccgctcccattcaattcacattggacaaggataaaataaaaccacaagtggtttgcgattccgaaatctgtacatcatgcagcggttaa

SEQ ID NO: 12212 - DNA, 1608 bp, unidentified
  misc_feature 1..1608: note = Synthetic
  source 1..1608: mol_type = other DNA
atggagcttagctacgccaccaccatgcactaccgggacgttgtgttttacgtcacaacggaccgaaaccgggcctactttgtgtgcggggggtgtgtttattccgtggggcggccgtgtgcctcgcagcccggggagattgccaagtttggtctggtcgttcgagggacaggcccagacgaccgcgtggtcgccaactatgtacgaagcgagctccgacaacgcggcctgcaggacgtgcgtcccattggggaggacgaggtgtttctggacagcgtgtgtcttctaaacccgaacgtgagctccgagctggatgtgattaacacgaacgacgtggaagtgctggacgaatgtctggccgagtactgcacctcgctgcgaaccagcccgggtgtgctaatatccgggctgcgcgtgcgggcgcaggacagaatcatcgagttgtttgaacacccaacgatagtcaacgtttcctcgcactttgtgtataccccgtccccatacgtgttcgccctggcccaggcgcacctcccccggctcccgagctcgctggaggccctggtgagcggcctgtttgacggcatccccgccccacgccagccacttgacgcccacaacccgcgcacggatgtggttatcacgggccgccgcgccccacgacccatcgccgggtcgggggcggggtcggggggcgcgggcgccaagcgggccaccgtcagcgagttcgtgcaagtcaaacacattgaccgcgtgggccccgctggcgtttcgccggcgcctccgccaaacaacaccgactcgagttccctggtgcccggggcccaggattccgccccgcccggccccacgctaagggagctgtggtgggtgttttatgccgcagaccgggcgctggaggagccccgcgccgactctggcctcacccgcgaggaggtacgtgccgtacgtgggttccgggagcaggcgtggaaactgtttggctccgcgggggccccgcgggcgtttatcggggccgcgttgggcctgagccccctccaaaagctagccgtttactactatatcatccaccgagagaggcgcctgtcccccttccccgcgctagtccggctcgtaggccggtacacacagcgccacggcctgtacgtccctcggcccgacgacccagtcttggccgatgccatcaacgggctgtttcgcgacgcgctggcggccggaaccacagccgagcagctcctcatgttcgaccttctccccccaaaggacgtgccggtgggaagcgacgtgcaggccgacagcaccgctctgctgcgctttatagaatcgcaacgtctcgccgtccccgggggggtgatctcccccgagcacgtcgcgtaccttggtgcgttcctgagcgtgctgtacgctggccgcgggcgcatgtccgcagccacgcacaccgcgcggctgacaggggtgacctccctggtgctagcggtgggtgacgtggaccgtctttccgcgtttgaccgcggagcggcgggcgcggccagccgcacgcgggccgccgggtacctggatgtgcttcttaccgttcgtctcgctcgctcccaacacggacagtctgtgtaa

SEQ ID NO: 12213 - DNA, 129 bp, unidentified
  source 1..129: mol_type = other DNA
  misc_feature 1..129: note = Synthetic
atgtcgatacactatactgtgataaagatagagacgatataccaggttttacacgatcgtgctatagggcatattctgacttattttttactacctaaatggatagcaccaatgcgcgttccggaatga

SEQ ID NO: 12214 - DNA, 915 bp, unidentified
  source 1..915: mol_type = other DNA
  misc_feature 1..915: note = Synthetic
atgccgcaacaactatctcctattaatatagaaactaaaaaagcaatttctaacgcgcgattgaagccgttagacatacattataatgagtcgaaaccaaccactatccagaacactggaaaactagtaaggattaattttaaaggaggatatataagtggagggtttctccccaatgaatatgtgttatcatcactacatatatattggggaaaggaagacgattatggatccaatcacttgatagatgtgtacaaatactctggagagattaatcttgttcattggaataagaaaaaatatagttcttatgaagaggcaaaaaaacacgatgatggacttatcattatttctatattcttacaagtattggatcataaaaatgtatattttcaaaagatagttaatcaattggattccattagatccgccaatacgtctgcaccgtttgattcagtattttatctagacaatttgctgcctagtaagttggattattttacatatctaggaacaactatcaaccactctgcagacgctgtatggataatttttccaacgccaataaacattcattctgatcaactatctaaattcagaacactattgtcgtcgtctaatcatgatggaaaaccgcattatataacagagaactatagaaatccgtataaattgaacgacgacacgcaagtatattattctggggagattatacgagcagcaactacctctccagcgcgcgagaactattttatgagatggttgtccgatttgagagagacatgtttttcatattatcaaaaatatatcgaagagaataaaacattcgcaattattgccatagtattcgtgtttatacttaccgctattctcttttttatgagtcgacgatattcgcgagaaaaacaaaactag

SEQ ID NO: 12215 - DNA, 51 bp, unidentified
  source 1..51: mol_type = other DNA
  misc_feature 1..51: note = Synthetic
ttgaaatataagaaactattcaatcaagcaagaatgaagtatcgtctctaa

SEQ ID NO: 12216 - DNA, 21 bp, unidentified
  misc_feature 1..21: note = Synthetic
  source 1..21: mol_type = other DNA
ctgacgaaattaacaatatag

SEQ ID NO: 12217 - DNA, 33 bp, unidentified; identical to SEQ ID NO: 3429
  misc_feature 1..33: note = Synthetic
  source 1..33: mol_type = other DNA

SEQ ID NO: 12218 - DNA, 54 bp, unidentified; identical to SEQ ID NO: 3430
  misc_feature 1..54: note = Synthetic
  source 1..54: mol_type = other DNA

SEQ ID NO: 12219 - DNA, 126 bp, unidentified; identical to SEQ ID NO: 3431
  source 1..126: mol_type = other DNA
  misc_feature 1..126: note = Synthetic

SEQ ID NO: 12220 - DNA, 237 bp, unidentified
  misc_feature 1..237: note = Synthetic
  source 1..237: mol_type = other DNA
atcgtgtgctacatcgtcatcatgatgtaccgccggtcgtgcgtctcggcgcccgccgttccgcgcaacaaggacctgctccccccgggcgcatcctcgttcgaggacaagatgacggacgaccaggtgcgcgccttccacgcgctggttacctcgtcgtccggcgacaaccccgcaccggcgccgaccgcggaatctcccgtcgcgagaaaccgattcagtgctgcgtcgtcgtag

SEQ ID NO: 12221 - DNA, 222 bp, unidentified
  source 1..222: mol_type = other DNA
  misc_feature 1..222: note = Synthetic
atgatggacgacgttcaagtaaacggagacctaatgccctcacccgatcctatccccgaagaggtggcgcagtgctccccggaagacatgtcaatcatgctagaccaattcctcgaaaatattcaactcaagtccgagctccagttgctgacctccgaagaaatggacgaactcctaaccgaactcgaagaactcgcccgcctgctaaaagactttccctga

SEQ ID NO: 12222 - DNA, 222 bp, unidentified
  misc_feature 1..222: note = Synthetic
  source 1..222: mol_type = other DNA
ctgctgcgcgcgtacccgcacatcgccgcggaggacccgggcttccacgcgctgctctcggagctcacggtctcgtgctcgcgcgggacctgcgaccgcttccggctgcgcgtgtcctcgccgcaccccatcgagcacctcgcgcggctggtgcgccgcgacgtgttctcccgctggataaatgccgccgcggacgcccccgacgccgccgcactatcctga

SEQ ID NO: 12223 - DNA, 243 bp, unidentified
  source 1..243: mol_type = other DNA
  misc_feature 1..243: note = Synthetic
atctacgaaagcagcaaaatcaagcattatttaagactcgtatacgtccgagagctaaatcagatatcagaagtgtttaatttaacccaaacgcaccccgaaaacagcgaaccgattttcgattcgaacattttctccccaaacccggagaatgaaatccttgaaaaaattaaaagaattagaaacctcagacgtattcaacatcttacacgtccgaactatcctaaaggtgatcaagattga

SEQ ID NO: 12224 - DNA, 84 bp, unidentified; identical to SEQ ID NO: 3440
  source 1..84: mol_type = other DNA
  misc_feature 1..84: note = Synthetic

SEQ ID NO: 12225 - DNA, 60 bp, unidentified; identical to SEQ ID NO: 3442
  source 1..60: mol_type = other DNA
  misc_feature 1..60: note = Synthetic

SEQ ID NO: 12226 - DNA, 564 bp, unidentified
  source 1..564: mol_type = other DNA
  misc_feature 1..564: note = Synthetic
acgagcaggcgcgcacccgacggcggtttgaatttagacgattttatgcgccgccagcgcggtcgccacctggatctgccctatccgcgcggctacacgttgtttgtctgcgacgtggaggagaccatcctcaccccgcgcgacgtagaatactggaagctgctggtggtgacccagggtcagttgcgcgtcatcggcaccatcggactcgccaaccttttcagttgggaccgcagcgtggccggcgtggcggccgacggcagcgtgctgtgctacgagatcagccgtgagaactttgtggtgcgcgccgccgactcgctgccgcagttgctggagcgcggcctgctacacagctactttgaagacgtggagcgcgctgcgcagggcagactgcgtcacggcaaccgctcgggcctgcgacgcgacgccgacggccaggtcatccgtgagtcggcctgctacgtgagccgcgcgctgctgcgtcaccgtgtgacgccgggcaagcaagaaatcaccgacgcgatgttcgaagccggcaacgtgccatcagcgctgttgccgtaa

SEQ ID NO: 12227 - DNA, 81 bp, unidentified
  source 1..81: mol_type = other DNA
  misc_feature 1..81: note = Synthetic
aggaccacgttcaacgccgccggttcgctggcgccacacgcccggagcctcgagttcagcgtgcggctctttgccaactag

SEQ ID NO: 12228 - DNA, 18 bp, unidentified
  source 1..18: mol_type = other DNA
  misc_feature 1..18: note = Synthetic
atgatgagcccaaattaa

SEQ ID NO: 12229 - DNA, 45 bp, unidentified; identical to SEQ ID NO: 3449
  misc_feature 1..45: note = Synthetic
  source 1..45: mol_type = other DNA

SEQ ID NO: 12230 - DNA, 132 bp, unidentified
  misc_feature 1..132: note = Synthetic
  source 1..132: mol_type = other DNA
ttgccagcagacgtattgaagaaaaccatcaaaaacacattggatatccataagagcataaccatcaacaacccaaaagaatcaactgttagtgatacaaatgaccatgccaaaaataatgatactacctga

SEQ ID NO: 12231 - DNA, 75 bp, unidentified; identical to SEQ ID NO: 3452
  misc_feature 1..75: note = Synthetic
  source 1..75: mol_type = other DNA

SEQ ID NO: 12232 - DNA, 168 bp, unidentified; identical to SEQ ID NO: 3454
  misc_feature 1..168: note = Synthetic
  source 1..168: mol_type = other DNA

SEQ ID NO: 12233 - DNA, 57 bp, unidentified; identical to SEQ ID NO: 3460
  misc_feature 1..57: note = Synthetic
  source 1..57: mol_type = other DNA

SEQ ID NO: 12234 - DNA, 555 bp, unidentified
  misc_feature 1..555: note = Synthetic
  source 1..555: mol_type = other DNA
gtgcagagcatcgcgcgccatcttccgacacataaatcgacgatgtctgtggaattctccccccagcaactgcagaacttcctggcgcgcgcgcgcgtgttttgtccgcaggacgcggcgcgcgtggcgcgcgcgcgctacactgtgctcacgtactcgggggccacacccgtgcgcgtgcacgtgtacgcgggcgctgcgcgcttcgacacgctcagcatctaccaggtcgtgaagcacgtcttccgcgaccggcctgacatgcttcgcgcgctctttccgagcgagcaaatgctcgagtcgatcattcccctggagccagaggaaacgctggagctaggcgcgctgccggaagaacgagagtcgcgcgtgcgcttagagcctgcaggtaccgacaccgagcacgcgccctcggagctcgagcgcaccaagctggcgctgctggaactctttaacgccttccgttctggtgccgcgcccgggtccgtgccgtactactacctcccgctgcgagaagagctcgagcccgtgccgcaaagggcgcgctcgccgtga

SEQ ID NO: 12235 - DNA, 777 bp, unidentified
  misc_feature 1..777: note = Synthetic
  source 1..777: mol_type = other DNA
attccattagagataaccagaatggctaaagccacaggccggtacaacttggtaacaccaaaacgggagctagagcaaggagttgtgtttagcgacctatgcaacttcctagtgactccaactgtgcaaggatggaaggtttactgggctggacttgagtttgatgtcaaccaaaagggtattaccctgttaaatcgtcttaaagtgaatgattttgctcctgcatgggcgatgacccggaacctcttcccacacttgttcaaaaaccaacagtctgaagtccaaactcccatttgggccttgagggtaattcttgccgccgggattcttgaccaattaatggatcattccctcattgagccgctatcaggggccctgaacctaattgctgattggttactaacaacatctactaatcacttcaacatgagaactcaacgagtaaaggaccaactgagcatgaggatgttatctcttataaggtcaaatattattaactttataaataagctcgagactcttcatgtcgttaattacaagggacttctaagcagtgttgagataggaacaccaagctatgcaatcatcattaccaggactaatatgggttatcttgtcgaggttcaggaaccagataaatctgcgatggatatacgacaccctggtcctgtcaaattctccttactacatgaatcgacacttaaacctgttgccactcctaaaccatcaagcattacttcattgatcatggagttcaacagttctttggcaatttaa

SEQ ID NO: 12236 - DNA, 60 bp, unidentified; identical to SEQ ID NO: 3468
  source 1..60: mol_type = other DNA
  misc_feature 1..60: note = Synthetic

SEQ ID NO: 12237 - DNA, 3729 bp, unidentified
  source 1..3729: mol_type = other DNA
  misc_feature 1..3729: note = Synthetic
acgcacctaaccgcgaaaatgtttccttatccgcaattgacttttccacctatgtatcaacccaatcctatggcatacagagacccgaaccctcctaggcgcaggtggaggccatttaggcccccacttgcagcacaaatagaggacttgaggaggtccatcgcaaatctgacgcttaaacagagagcacccaatccacctgccggtcctccagctaagaagaagaagactcaaccgaaaccgaaggccacgccacctaagaagaagaagcagcaggttaagaaacaaaaacgtaaaccgaaacctggaaaaaggcaacgcatgtgtatgaaattggaatctgacaaaaccttcccgattctgttgaacgggcaagtaaatggctacgcatgcgttgtcggcggaaggctaatgaaaccattgcatgtcgaaggtaaaattgataacgaacagttggcagctatcaaactgaagaaagccagtatgtacgatctggagtacggtgacgtaccccagaatatgaaatcagacactctgcaatacaccagcgaaaaaccacctggattctataactggcaccatggcgcagtccagtatgaaaatggcagattcaccgttccacgcggagtcggtggaaaaggagatagtgggagacccatcctggacaacaaaggccgggtagtggctattgtcctgggaggggcgaacgaaggctcaaggacggctctgtcggtggttacatggaaccagaaaggggtgaccatcaaggatacccccgaaggcacggaacaatggtcattgatcactgcaatgtgcgtccttgcaaatgtcactttcccgtgtgacaaacctcctgtctgctattcgttagcaccagaacgcacacttgatgtgctggaagaaaacgtggacaatccaggttatgacaccctgctagaaaatgtactgaagtgcccctcacgtcgacagaaacggagcattacggacgatttcaccttgacaagcccgtacttaggccactgtccgtattgtctccacgctacgccctgctttagtcccattaaaattgaaaatgtttgggacgagtcagacgacggcacaatacgaatacaagtttccgcccaattaggttacaaccaggcaggtacggcagacccaactaagttcaggtacatgtcctacgagcaagaccatgacatcaaagaagctagtatggacaagatcgctatcagtacatctgggccgtgcagccgcttggggcataaaggctattttctgctggccagatgcccaccaggagacagcgtaaccgtcagcatcaccagtggagcatcagcgacatcctgcacggtcgagaagaagataaggaggaagttcgtcggcagagaggagtacctgctcccaccagtgcacggcaagctaatcaagtgtcatgtatatgaccacctaaaggagacaacagcaggatatataactatgcacagaccagggccacatgcgtacgcaacctacgtggaagaatcatccggcgaggtgtacatccgtccaccttccggaaagaacgtgacgtacgaatgcaaatgtggagattacagcaccggcacagttaatactagaactaagatgccgggatgcacgaagaagaaacagtgcatagcttataaatccgaccagaccaaatgggtctttaattcaccagacctgattcgtcactcagaccatgcagtgcaaggaaaactgcacattccttttaaactaactgctacggcctgcccagtgccactcgctcacactccaacggttgagaaatggttcaaaggcgtcacgctgcacctgactgctagtcatcccacactgttgactacgcgtaagctaggaccgcgagctgaacccacgtctgaatggatcgttgggaccgtgtccagaaacttctccgtagggagggagggtctcgaatatacatggggaaatcacgaccccgtgcgagtgtggtctcaagagtctgcacctggggaccctcacggttggccgcacgagattatcgtacattactaccatcggcatccgctatacaccattgccgtgctgtgcggactcgtgctaataacagtgatcggcatcgcttctgcagcggcctgcatatcgaaagcgcgcagagattgcctgacaccgtacgcgttggcacccaacgccgcagttccaacgttgctggcagtcttatgctgcataagacctacgcatgccgagacgctgggcgaatcacttggacacctctggctcaacaatcaacctcttttatgggcgcagctgtgccttccacttgccgcacttatcatcctgttcaggttcttctcatgctgcctcccttttttattggttgcaggcgtctgcctgggaaaggcagacgcctacgaacatgcgaccactgtgccaaatgttccgggagtcccgtataaagcgctagtggaaagggccgggtatgcacccctcaacctagaagtcaccgttgtgtcgtctgaactgataccgtcaacaaataaagaatatgtgacttgcaaattccatacaatcattccatcaccccaggtgaagtgttgcggttcccttgaatgtcaagcctcacgcaaggcagactatacctgtcgcgtgttcggaggtgtctacccatttatgtggggaggcgcccagtgcttctgcgatagcgaaaacacgcaactgagcgaagcgtacgttgaattcgctccagactgtacagcagatcatgcagtcgcactgaaagtccacacagctgccttgaaggtcggcctgcaaatagtatatgggaacacatcaacacgcctggatacatttgtcaatggggttacaccaggctcatcacgcgacctgaaagtgatagcaggacctatctcagcagcgttcacacctttcgaccacaaagtggtcattcgaaaaggtaaagtgtacaactacgacttcccagagtacggtgctatgaagccaggcgtgtttggggatatccaggcatcttcgctggattccacagacatcgttgcaagaactgacatccgactactcaaaccatcggtaaagagcattcacgtaccgtacacacaggccgcgtcaggttacgaaatgtggaagaataattccggaagacctctgcaggatacagccccttttggctgcaaaatcgaggtagatccgttaagggcggtcgactgtgcttacggccatatcccgctctccatcgacataccggacgcagcattcgtgagaacctctgaagcacctaccgtgctcgaaatgagttgcacggtgacggcctgcatttactccgccgattttggtggatctttaaccctacaatacaaagcagacaaggaaggcaattgtcctgcccactcgcactcctctacagcggtgctgaaagaagctaccacccacgtagttcactcggggagcgttactttacacttcagcacgtccagtccgcaggcaaactttattgtgtcgctatgcggtaagaaaacaacatgcgacgcggagtgtaagcccccatcagaccacatcataggggaaccacataaagttaaccaagaattccaagcagcagtttccaaaacatcatggaattggctattcgccatgctggggggagcatcatccctcattgttgtaggactattagtgttggcctgcagctctatgattatcaacacacgtagatga

SEQ ID NO: 12238 - DNA, 2457 bp, unidentified
  misc_feature 1..2457: note = Synthetic
  source 1..2457: mol_type = other DNA
acgcacctaaccgcgaaaatgtttccttatccgcaattgacttttccacctatgtatcaacccaatcctatggcatacagagacccgaaccctcctaggcgcaggtggaggccatttaggcccccacttgcagcacaaatagaggacttgaggaggtccatcgcaaatctgacgcttaaacagagagcacccaatccacctgccggtcctccagctaagaagaagaagactcaaccgaaaccgaaggccacgccacctaagaagaagaagcagcaggttaagaaacaaaaacgtaaaccgaaacctggaaaaaggcaacgcatgtgtatgaaattggaatctgacaaaaccttcccgattctgttgaacgggcaagtaaatggctacgcatgcgttgtcggcggaaggctaatgaaaccattgcatgtcgaaggtaaaattgataacgaacagttggcagctatcaaactgaagaaagccagtatgtacgatctggagtacggtgacgtaccccagaatatgaaatcagacactctgcaatacaccagcgaaaaaccacctggattctataactggcaccatggcgcagtccagtatgaaaatggcagattcaccgttccacgcggagtcggtggaaaaggagatagtgggagacccatcctggacaacaaaggccgggtagtggctattgtcctgggaggggcgaacgaaggctcaaggacggctctgtcggtggttacatggaaccagaaaggggtgaccatcaaggatacccccgaaggcacggaacaatggtcattgatcactgcaatgtgcgtccttgcaaatgtcactttcccgtgtgacaaacctcctgtctgctattcgttagcaccagaacgcacacttgatgtgctggaagaaaacgtggacaatccaggttatgacaccctgctagaaaatgtactgaagtgcccctcacgtcgacagaaacggagcattacggacgatttcaccttgacaagcccgtacttaggccactgtccgtattgtctccacgctacgccctgctttagtcccattaaaattgaaaatgtttgggacgagtcagacgacggcacaatacgaatacaagtttccgcccaattaggttacaaccaggcaggtacggcagacccaactaagttcaggtacatgtcctacgagcaagaccatgacatcaaagaagctagtatggacaagatcgctatcagtacatctgggccgtgcagccgcttggggcataaaggctattttctgctggccagatgcccaccaggagacagcgtaaccgtcagcatcaccagtggagcatcagcgacatcctgcacggtcgagaagaagataaggaggaagttcgtcggcagagaggagtacctgctcccaccagtgcacggcaagctaatcaagtgtcatgtatatgaccacctaaaggagacaacagcaggatatataactatgcacagaccagggccacatgcgtacgcaacctacgtggaagaatcatccggcgaggtgtacatccgtccaccttccggaaagaacgtgacgtacgaatgcaaatgtggagattacagcaccggcacagttaatactagaactaagatgccgggatgcacgaagaagaaacagtgcatagcttataaatccgaccagaccaaatgggtctttaattcaccagacctgattcgtcactcagaccatgcagtgcaaggaaaactgcacattccttttaaactaactgctacggcctgcccagtgccactcgctcacactccaacggttgagaaatggttcaaaggcgtcacgctgcacctgactgctagtcatcccacactgttgactacgcgtaagctaggaccgcgagctgaacccacgtctgaatggatcgttgggaccgtgtccagaaacttctccgtagggagggagggtctcgaatatacatggggaaatcacgaccccgtgcgagtgtggtctcaagagtctgcacctggggaccctcacggttggccgcacgagattatcgtacattactaccatcggcatccgctatacaccattgccgtgctgtgcggactcgtgctaataacagtgatcggcatcgcttctgcagcggcctgcatatcgaaagcgcgcagagattgcctgacaccgtacgcgttggcacccaacgccgcagttccaacgttgctggcagtcttatgctgcataagacctacgcatgccgagacgctgggcgaatcacttggacacctctggctcaacaatcaacctcttttatgggcgcagctgtgccttccacttgccgcacttatcatcctgttcaggttcttctcatgctgcctcccttttttaattggttgcaggcgtctgcctgggaaaggcagacgcctacgaacatgcgaccactgtgccaaatgttccgggagtcccgtataa

SEQ ID NO: 12239 - DNA, 3027 bp, unidentified
  misc_feature 1..3027: note = Synthetic
  source 1..3027: mol_type = other DNA
atgacaattttagatgaggtagaaattttgcatattttcagacccaccatggaatcatttgaaggacagggggactctagacagtcacccgacaatgagcggggagataatgtacagactaccggcgagcatgatcaggaccctgggccggggcctccatccagtggggcttctgagagattggtaccagaagagtcatactcaagagatcagcaaccttgggggcaaagcaggggtgatgaaaacagaggctggatgcagcgcatcaggcgaaggcggagaagacgggctgccttgtccggccatcttttagacacggaagacaatgtgccgccatggttgcctccacacgacatcacaccatataccgcaaggaatatcagggatgctgcctgccgggctgtcaagcaatcgcacctgcaagcgctatcaaacctgatactcgatagtgggttagacacacaacacatcttgtgcttcgtgatggcagccaggcagcgtcttcaggacattcgacgtggacccttggttgcggagggcggtgtgggttggcgacattggcttctaacatctcccagccaatcctggcccatgggatatcgtacagcaacactacgcacattaactcccgtgcctaacagggttggggctgacagcatcatgttaactgccacatttggatgccaaaatgcggcacgaactctaaacaccttctctgccaccgtgtggacaccaccccatgctggaccaagagagcaagaaagatacgctcgggaagccgaggtacgcttccttcgtggtaaatggcagaggcggtaccgaagaatctatgatttgatagaactgtgtggctctctgcaccacatctggcaaaacttgctccagaccgaggagaaccttttagatttcgtgcgtttcatgggtgtcatgtccagctgcaataatccagctgtgaattactggtttcacaagacaatcggaaactttaagccatattacccgtggaatgcaccacctaatgaaaatccatatcacgcgcggagaggcataaaagaacacgtaatccagaacgcatttcgaaaggcacaaatacagggtttatcaatgttagcaacgggaggtgaacccagaggtgatgctactagtgaaacgagcagtgatgaggacaccggtagacagggttcggacgtggagctagagtcctcggacgatgagctgccatatatcgatcccaatatggagccggttcagcagaggcccgtcatgtttgtgagccgtgtgcctgcaaagaaaccgaggaaactgccttggcccacgcccaagacgcacccagtgaagcgcacaaatgttaagacctctgatagatctgataaggcagaagcacaaagcacccctgaaaggccgggcccttccgaacaatcatcagtgaccgtggagcccgcccacccgaccccggtggagatgccaatggtgattctccatcaaccacctccagtgcccaaaccggttccagtcaagcctacgccaccgccttcccgtaggagaaggggagcgtgtgttgtgtacgacgatgatgtcatagaggtgattgatgttgaaaccaccgaagattcatcgtcagtgtcacagccaaataagccacatcggaaacatcaagacggctttcaacgttcaggccgacgtcaaaaacgagccgcgcctcccaccgtgagtccttcggatactgggcctcctgccgtggggcctcctgccgcggggcctcctgccgcggggcctcctgccgcggggcctcctgccgcggggcctcctgccgcggggcctcctgccgcggggcctcgcatactggcgcctctttccgctgggcctcctgccgcggggcctcacatagtgacgcctccttccgcccggcctcgtataatggcgcctcccgtcgtacgtatgtttatgagggagcgacagctcccccagtccaccggccgtaaacctcagtgcttctgggaaatgcgggctggtcgtgaaattacacaaatgcaacaagaaccaagttcacacctgcagtccgccactcagcctacaacgcctcgcccatcatgggccccatcagtctgcgccctctcggtgatggatgctggtaaggcccagcccatagaaagttcacacttgagttccatgtcgcccacacagccgatatcgcacgaagaacaaccccggtatgaggatcctgacgctcctctggatttaagtttacatccagacgttgctgctcaaccagctccccaggctccataccagggataccaggagccgccggccccccaggctccataccagggataccaggagccgccgcccccccaggctccataccagggataccaggagccgccggcccacgggctccaatcatcttcatatccaggatatgcgggtccctggaccccaaggtctcaacatccatgttataggcacccctgggcaccatggtctcaagatcctgtgcatgggcacacccagggtccatgggatcccagggcaccacatctcccacctcagtgggatggatctgcaggacatggccaggatcaggtctcccagttcccacatctgcaatcggagacaggcccaccacgtcttcaactttcattggtgccactggtctcatcctctgcaccatcatggtcatctccccagccccgagcccccatacgccccattccaacaagattcccccctccccctatgccgttacaagatagcatggccgtggggtgtgactcatcaggtacagcatgcccaagcatgccctttgccagtgattacagtcaaggtgcatttaccccactggacattaatgccaccacgccaaaaaggcctcgagtagaagaaagttctcacggacctgcccggtgttcccaagctactgctgaagcacaggagattctcagtgacaattctgagatctccgtgttcccaaaggacgcgaagcagactgactacgatgcatccactgaaagtgagctagattaa

SEQ ID NO: 12240 - DNA, 207 bp, unidentified
  misc_feature 1..207: note = Synthetic
  source 1..207: mol_type = other DNA
ataatgtacagactaccggcgagcatgatcaggaccctgggccggggcctccatccagtggggcttctgagagattggtaccagaagagtcatactcaagagatcagcaaccttgggggcaaagcaggggtgatgaaaacagaggctggatgcagcgcatcaggcgaaggcggagaagacgggctgccttgtccggccatcttttag

SEQ ID NO: 12241 - DNA, 3003 bp, unidentified
  misc_feature 1..3003: note = Synthetic
  source 1..3003: mol_type = other DNA
atgacaattttagatgaggtagaaattttgcatattttcagacccaccatggaatcatttgaaggacagggggactctatacagtcacccgacaatgagcggggagatgatgtacagactaccggtgagcatgatcaggaccctgggccggggcctccatccagtggggcttctgagggattggtaccagaagagtcagactcaagagatcagcaaccttgggggcaaagcaggggtgatgaaaacagaggctggatgcagcgcatcaggcgaaggcggagaagacgggctgccttgtccggccatcttttagacacggaagacaatgtgccgccatggttgcctccacacgacatcacaccatatatcgcaaggaatatcagggatgccgcctgccgggctgtcaaggtgagtatgcctctaactgggttcatgggggccatccaatcgcacctgcaagcgctatcaaacctgatactcgatagtgggttagacacacaacacgtcttgtgcttcgtgatggcagccaggcagcgtcttcaggacattcgacgtggacccttggttgcggagggcggtgtgggttggcgacattggcttctgacatctcccagccaatcctggcccatgggatatcgtacagcaacactacgcacattaactcccgtgcctaacagggttggggctgacagcatcatgttaactgctacatttggatgccacaatgcggcacgaactctaaacaccttctctgccaccgtgtggacaccaccccatgctggaccaagagagcaagaaagatacgctcgggaagccgaggtacgcttccttcgtggtaaatggcagaggcggtaccgaagaatctatgatttgatagaactgtgtggctctctgcaccacatctggcaaaacttgctccagaccgaggagaaccttttagatttcgtgcgtttcatgggtgtcatgtccagctgcaataatccagctgtgaattactggtttcacaagacaatcggaaactttaagccatattacccgtggaatgcaccacctaatgaaaatccatatcacgcgcggagaggcataaaagaccatgtaatccagaacgcatttcgaaaggcacaactacagggtttatcaatgttagcaacgggaggtgaacccagaggtgatgctactagtgagacgagcagcgatgaggacaccggtagacagggttcggacgtggagctagagtcctcggacgatgagctgccatatatcgatcccaatatggagccggttcagcagaggcccgtcatgtttgtgagccgtgtgcctgcaaaaaaaccgaggaaactgccttggcccacgcccaagacgcacccagtgaagcgcacaaatgttaagacctctgatagatctgataaggcagaagcacaaagcacccctgaaaggccgggcccttccgaacaatcatcagtgaccgtggagcccgcccaccctaccccggtggagatgccaatggtgattctccatcaaccacctccagtgcccaaaccggttccagtcaagcctacgccaccgccttcccgtaggagaaggggagcgtgtgttgtgtacgacgatgatgtcatagaggtgattgatgttgaaaccaccgaagattcatcgtcagtgtcacagccaaataagccacatcggaaacatcaagacggctttcaacgttcaggccgacgtcaaaaacgagccgcgcctcccaccgtgagtccttcggatactgggcctcctgccgcggggcctcctgccgcggggcctcctgccgcggggcctcctgccgcggggcctcctgccgcggggcctcctgccgcggggcctcctgccgcggggcctcctgccgcggggcctcgtataatggcgcctcccgtcgtacgtatgtttatgagggagcgacagctcccccagtccaccggccgtaaacctcagtgcttctgggaaatgcgggctggtggtgaaattacacaaatgcaacaagaaccaagttcacacctgcagtccgccactcagcctacaacgcctcgcccatcatgggccccatcagtctgtgccctctcggtgatggatgctggtaaggcccagcccatacaaagttcacacttgagttccatgtcgcccacacagccgatatcgcacgaagaacaaccccggtatgaggatcctgacgctcctctggatttaagtttacatccagacgttgctgctcaaccagctccccaggctccataccagggataccaggagccgccggccccccaggctccataccagggataccaggagccgccggccccccgggctccataccagggataccaggagccgccggcccccgggctccaatcatcttcatatccaggatatgcgggtccctggaccccaagatctcaacatccatgttataggcacccctgggcaccatggtctcaagatcccgtgcatgggcacacccagggtccatgggatccaagggcaccacatctcccacctcagtgggatggatctgcaggacatggccaggatcaggtctcccagttcccacatctgcaatcggagacaggcccaccacgtcttcaactttcattggtgccactggtctcatcctctgcaccatcatggtcatctccccagccccgagcccccatacgccccattccaacaagattcccacctccccctatgccgttacaagatagcatggccgtggggtgcgactcatcaggtacagcatgcccaagcatgccctttgccagtgattacagtcaaggtgcatttaccccactggacattaatgccaccacgccaaaaaggcctcgagtagaagaaagttctcacggacccgcccggtgttcccaagctactgctgaagcacaggagattctcagtgacaattctgagatctccgtgttcccaaaggacgcgaagcagactgactacgatgcatccactgaaagtgagctagattaa

SEQ ID NO: 12242 - DNA, 219 bp, unidentified
  misc_feature 1..219: note = Synthetic
  source 1..219: mol_type = other DNA
atgagcggggagatgatgtacagactaccggtgagcatgatcaggaccctgggccggggcctccatccagtggggcttctgagggattggtaccagaagagtcagactcaagagatcagcaaccttgggggcaaagcaggggtgatgaaaacagaggctggatgcagcgcatcaggcgaaggcggagaagacgggctgccttgtccggccatcttttag

SEQ ID NO: 12243 - DNA, 165 bp, unidentified
  source 1..165: mol_type = other DNA
  misc_feature 1..165: note = Synthetic
ttgccaatcaaggttagcaaaatttataaaaaagggaatataagcacattgcaagggggaatgatcaacatccagccccttaagaaatcaatcgatcacccaataagcagcgagaggaatcaccagccaagagaccatcactacaaagggacaatcaactggtaa

SEQ ID NO: 12244 - DNA, 72 bp, unidentified
  misc_feature 1..72: note = Synthetic
  source 1..72: mol_type = other DNA
atcaccagccaagagaccatcactacaaagggacaatcaactggtaaactgagtcacacttctatctattga

SEQ ID NO: 12245 - DNA, 144 bp, unidentified; identical to SEQ ID NO: 3485
  misc_feature 1..144: note = Synthetic
  source 1..144: mol_type = other DNA

SEQ ID NO: 12246 - DNA, 51 bp, unidentified; identical to SEQ ID NO: 3487
  source 1..51: mol_type = other DNA
  misc_feature 1..51: note = Synthetic

SEQ ID NO: 12247 - DNA, 1575 bp, unidentified
  misc_feature 1..1575: note = Synthetic
  source 1..1575: mol_type = other DNA
atgttactctctaccgccatattcgcctttttcttgaactgtgctccttgtctggcaaagttcccaatctacaccatcccggataagattggaccgtggagtcctattgacataaaccatctcagctgcccgaacaacttgatcgtggaagacgagggatgcacgactctcaccccattctcgtacatggaactgaaagtgggatatataacaacaataaaaatagaagggtttacatgcactggtgtaataacagaggcagagacctacacaaactttgtagggtatgtgactacaaccttcaagaggaaacatttccggccaactgtgagcgcctgtagagatgcctacaactggaagattactggtgatccgagatatgaagagtcactgcacaacccttaccctgactctcattggttgagaactgtgaagaccaccaaggagtctcttctgatcatctctcctagtgtagtcgacatggacgcatatgacaaaaacctctactccaaaatgttccctaatggtaaatgtctagcttcacccccgagtgccatatgttgtccgacaaatcatgattacaccatttggattccagagaatcctaaacccgggctgtcctgtgatatattcacaactagcaaaggaaagaaagcaaccaaagacgggaggctgtgtggatttgtggatgagagaggattgtacaaatccttgaagggggcttgcaagcagagactctgtggggtccctggcatgagattgatggatggatcatgggtatctcttcagaaaactgaagctccggaatggtgctctccagatcagcttgttaatgtccatgatttccatacagatgaaattgaacaccttgtggttgaagagttggtgaagaagagggaagagtgtttggatgctttagaaactatcatcacaaccaagtctataagtttcagacgtctcagtcatttcaggaaactggttcctgggtttggaaaggcatacactctcatcaacaagactctcatggaagcagatgcccattacaagtctgtaagagaatggaaagaagtgatcccatctaaagggtgtctgatggcaggggggagatgccatcctcactacagtggtatattcttcaatgggatcatactgagtccagggggtgatgtactcattccggagatgcagtcagccttgttacagcagcacattgagctgctagaatcctcgatgattcctctcagacatcccttggctgacccttccacggtgttcaagagagatgatgaggcagaggattttgttgaggttcaccttccagacacccaaaaactcatatcaggcatagatctgggttttcccgaatggaagcgttactttcttataggaatatctgtgcttgcccttcttgccttagcaataattactgcagcatgttgcaaaaggttcaagaggagaaggaggcctaagccaaacccaatagagttgatcaggaaagtttctgtaacctctcaaagtggaagggcaattccatcttgggagtcgtacaaagtgggggccactggtgagtcataa

SEQ ID NO: 12248 - DNA, 24 bp, unidentified
  source 1..24: mol_type = other DNA
  misc_feature 1..24: note = Synthetic
atctcagctgcccgaacaacttga

SEQ ID NO: 12249 - DNA, 1818 bp, unidentified
  misc_feature 1..1818: note = Synthetic
  source 1..1818: mol_type = other DNA
atggctgctgaagctgacgaagagaactgtgaagcgttatacgtggctgggtatttagccttatattcaaaggacgaaggggaattaaatattaccccagagattgtgcggtccgctttgccgcctactagtaaaataccaataaacatcgatcatcgaaaagactgtgtcgtgggtgaagtaatcgcaatcattgaggacatacgcggacctttttttttgggtatcgttagatgccctcaactacatgcggtgctgtttgaagcggcccattcgaatttttttggaaatagagattctgtattatctccgctagaacgtgcgttatacttggtcacaaattacttaccctccgtatccctgtcttcaaaacgattgtccccgaatgagataccagacggtaatttttttacccatgttgcgttatgtgttgttggaagacgcgttggaacagtggtcaattatgactgtaccccggaatcttcaattgaaccattccgggttttatcgatggaaagtaaagcgcggttattgtcgctggttaaagactacgcgggtttaaataaagtatggaaggttagcgaagataaactcgccaaggtgttattatccacagccgtgaacaatatgcttttaagagatagatgggacgtggttgcaaaacgtagacgcgaagccggaattatgggtcacgtttatcttcaggctagcaccggatatggacttgctcggataaccaacgttaatggggtggagtctaaattacccaacgcgggtgttataaacgccacattccaccccggcgggcccatatacgatctcgcgttgggtgttggggaatcaaatgaagattgtgaaaagactgttccgcatttaaaggttacgcagttgtgtaggaacgacagcgatatggcttctgtagcaggtaacgctagtaatatctcaccacagcccccgtcgggcgttccaaccggaggggaatttgtactgatacctaccgcgtattattcacagctgttaaccgggcagactaaaaatccgcaggtatcaattggagctccaaataacggacagtatatcgtcgggccatatggatctccacacccgcctgccttcccacctaatacagggggttatggttgccctccgggacacttcgggggaccgtacgggtttccgggatatccaccacccaatcgtttggaaatgcaaatgtccgcatttatgaacgcattggccgccgaacggggtattgacttgcagaccccgtgtgtaaattttccagacaaaaccgatgtccgtcgtccaggaaaacgggatttcaagagcatggatcaaagggaattggattctttttatagtggggagtctcaaatggacggagagtttccctcaaatatatattttcccggtgaaccaacgtatataacgcatcggagacgtcgagtttctccatcatattggcagaggagacacagagtttctaatggtcagcacgaagagcttgctggggttgtggcaaaactgcaacaggaggttacagagctaaaatcacaaaatgggacacaaatgcctttgtcgcaccatacaaatataccagaggggacacgggatcctcgaatatcgattttattaaaacagcttcaaagcgtttcgggtctatgctcatcccaaaatacaacaagcaccccacatacagatacagttggacaagatgtaaatgcagtggaggcgagttccaaggcccctttaatacaggggtccacggcagacgacgccgatatgtttgcaaatcagatgatggtggggcggtgttaa

SEQ ID NO: 12250 - DNA, 288 bp, unidentified
  misc_feature 1..288: note = Synthetic
  source 1..288: mol_type = other DNA
ttgtacagagatatgattgggaaacaggctactataccagatattgtgctggatctgcaagaccttgtccagcccattgacctgcattgtgacgaagacttgtcagaaaatcaggaggaggagcctgcacctcaaagaatagactacaagatagtttcctcgtgtggtggctgcggaattaagcttcgaatttttgcatcgtgtacccaatttggaattagaactctgcaagacctacttcttgaagaaatagcgttgctgtgtcctgactgcaaaaatggcagataa

SEQ ID NO: 12251 - DNA, 78 bp, unidentified; identical to SEQ ID NO: 3494
  source 1..78: mol_type = other DNA
  misc_feature 1..78: note = Synthetic

SEQ ID NO: 12252 - DNA, 258 bp, unidentified
  misc_feature 1..258: note = Synthetic
  source 1..258: mol_type = other DNA
attcgcgagtggagaaatgaaaattacttgggcattgtacagtcctgcagcttgatgatcgaagagtttgataataacgcttttgctttgctggtgtttgtggaagtgcgggtccaggctcttttggaggccgcgattgatagcctggaaaatcgcataatgtttgatctggctgttaaattccatcagggctccggaggcgaccgttgtcatcttcgggatcttcatttcgacccgttggtgaatcgcttggaataa

SEQ ID NO: 12253 - DNA, 39 bp, unidentified; identical to SEQ ID NO: 3496
  misc_feature 1..39: note = Synthetic
  source 1..39: mol_type = other DNA

SEQ ID NO: 12254 - DNA, 1575 bp, unidentified
  misc_feature 1..1575: note = Synthetic
  source 1..1575: mol_type = other DNA
atgccatttcaagctgttttgtctgctcttctttcggccctcacactctgcgtcggcaagtttcccatctacacaatccctgataagttaggcccgtggagccccattgacattcatcatcttagctgcccgaacaatattgttgtagaggatgagggatgtacgaccctaacagtattctcatacatggagttgaaagtaggatatataacaaccataaaagtgaacggatttacatgtactggggtggtgacagaggctgagacttatactaactttgttggttatgtaactaccacgttcaagaggaagcatttccgtcccagccctagtgcatgcagagatgcatatagttggaagactgcaggtgatccgagatatgaggaatccttacacaatccctatccagactctcactggctaaggacagttaccaccaccaaagagtccgtcttgataatctcccccagtgtggccgatatggatgcgtatgacaaaactctttattctaaaatatttttaaatgggaaatgctcaggagtctctcaagtctctcccttctgctcaaccaatcatgattacacaatctggatgcccgagaatcccaacccgggtgtgtcttgcgacatattcacgaccagtaaggggaagaaagctacaaaagatggcaaactgtgcggatttgtcgatgagagaggactctacaaatcattaaagggggcttgtaaactgaaactgtgtggaatctctggtatgaggttgatggatgggtcatgggtgtctattcaaaatcacgatgaggcaaaatggtgctcccccgatcaacttgtgaacatccatgactttcactcagatgaggtagaacacctcattgcggaggagcttgttaaaaagagagaggagtgtttagatgcgttagagtcaatcatgactaccaagtcaataagttttcgccgtcttagtcatttaagaaagctagtccctgggtttgggaaagcttacaccattatcaataaaacactcatggaagctgatgctcattacaagtctatcagagaatggaccgatgtgatcccctccaagggatgtctgatggcaggaggccgatgttatcctcatcacaatggagtcttctttaacggtataatattgagtccggatgggcacgtgttaatccccgagatgcagtctgcaatgcttcaacagcatatagagttgttagagtcatcggtgatacctctcatgcatcccttggctgacccatccactatctttaagaaggatgacggtgctgaggattttgttgaagtccaccttcctgacgtgcaaaagcagatctcggggattgacctaggtcttcccgagtggaagaggtatttcctgatcggggtgtcggctttggctttccttgccttgatgatatttattgccgcctgctgtaggagagttaaacgtaagaagagagccaaacccaacccagtggaactaatccgaaaagtgtctgtcacttcccaaagtgggagaccgattccttcatgggagtcttacaaggtagagacggggggtcagtcttaa

SEQ ID NO: 12255 - DNA, 72 bp, unidentified; identical to SEQ ID NO: 3504
  misc_feature 1..72: note = Synthetic
  source 1..72: mol_type = other DNA

SEQ ID NO: 12256 - DNA, 456 bp, unidentified
  misc_feature 1..456: note = Synthetic
  source 1..456: mol_type = other DNA
atgttgggtctgccgccgccaccgtcagtcgcaccacctggggaaaagaaggagctaccggctcaggcggccttgtcgccgccactgaccacctggtcactaccgccgtttccgtccacgcggatacctgacagtccgccgccaccgtaccagcttcgtcacgccacgtcactagtgacggtacccacgctgctgttatatacgtcatccgacatcggtgacacagcttcagaaacaacgtgtgtggcgcacgctacttatggggaacccccggagcccgctcgatcgacggctacggttcaggaatgtaccgttcttaccgccccgaattgcggcatcgtcaacaacgacggcgcggtctctgaaggccaagaccatggagatgcggttcaccatagcctggatgtggtttcccagtgtgctgctgatactggggttgttgacacctccgagtaa

SEQ ID NO: 12257 - DNA, 249 bp, unidentified
  misc_feature 1..249: note = Synthetic
  source 1..249: mol_type = other DNA
atgcgcaacgccttcgcgcaggagagcggcgacggccagtgtctgaacgagtggctgcgcggcgacggcgcggccgcgatggccgccaagcagagccagcacatgcagcacaaggccatgttcgaggacgacctgctcaccatggaggaggccatgctcatgatctcgcggtactgcaccatcctcatctacgggcaggagtacgacccgtacatgtcctcgcgcaacatgtgcgacgttctgtgttaa

SEQ ID NO: 12258 - DNA, 354 bp, unidentified
  source 1..354: mol_type = other DNA
  misc_feature 1..354: note = Synthetic
atggcgtgcgaatacctcagctaccagcgcgcggacgttgtggccgtaataaacagcatgaagtttaaaatcgagcagcgcaagatcgtgtcttttgagctcgagtccgccggctgcctgcgtgacgaccccacgctcgagaccatctacagtcacttttgccagtttgtcgctgtctttaacttcctggccgaggtccggcttgcgctcgagtgcgacgcgagcggcgtgaaggaactaccgggaggagaggcgcggaatgccgcagaaagcgcggtggcaggacacggtccggatgcggagccccgagaagaaaccgagcccgagtccgaggagtccagcgccgagaagtaa

SEQ ID NO: 12259 - DNA, 3372 bp, unidentified
  source 1..3372: mol_type = other DNA
  misc_feature 1..3372: note = Synthetic
atggcagaccgcggtctcccgtccgaggcccccgtcgtcacgacctcacccgccggtccgccctcggacggacctatgcagcgcctattggcgagcctagccggccttcgccaaccgccaacccccacggccgagacggcaaacggggcggacgacccggcgtttctggccacggccaagctgcgcgccgccatggcggcgtttctgttgtcgggaacggccatcgccccggcagacgcgcgggcatgctggcggccgctgctggaacacctgtgcgcgctccaccgggcccacgggcttccggagacggcgctcttggccgagaacctccccgggttgctcgtacaccgcttggtggtggctctccccgaggcccccgaccaggccttccgggagatggaggtcatcaaggacaccatcctcgcggtcaccggctccgacacgtcccatgcgctggattccgccggcctgcgcaccgcggcggccctggggccggtccgcgtccgccagtgcgccgtggagtggatagaccgctggcaaaccgtcaccaagagctgcttggccatgagcccgcggacctccatcgaggcccttggggagacgtcgctcaagatggcgccggtcccgttggggcagcccagcgcgaaccttaccaccccggcgtacagcctgctcttccccgccccgttcgtgcaagagggcctccggttcttggccctggtgagtaatcgggtgacgctgttctcggcgcacctccagcgcatagacgacgcgaccctcactcccctcacacgggccctctttacgttggccctggtggacgagtacctgacgacccccgagcggggggctgtggtcccgccgcccctgttggcgcagtttcagcacaccgtgcgggagatcgacccggccataatgattccgccgctcgaggccaacaagatggttcgcagccgcgaggaggtgcgcgtgtcgacggccctcagccgcgtcagcccgcgctcggcctgtgcgcccccggggacgctaatggcgcgcgtgcggacggacgtggccgtgtttgatcccgacgtgccgttcctgagttcgtcggcactggcagtcttccagcctgccgtctccagcctgctgcagctcggggagcagccctccgccggcgcccagcagcggctgctggctctgctgcagcagacgtggacgttgatccagaataccaattcgccctccgtggtgatcaacaccctgatcgacgctgggttcacgccctcgcactgcacgcactacctttcggccctggaggggtttctggcggcgggcgtccccgcgcggacgcccaccggccacggactcggcgaagtccagcagctctttgggtgcattgccctcgcggggtcgaacgtgtttgggttggcgcgggaatacgggtactatgccaactacgtaaaaactttcaggcgggtccagggcgccagcgagcacacgcacgggcggctctgcgaggcggtcggcctgtcggggggcgttctaagccagacgctggcgcgtatcatgggtccggccgtgccgacggaacatctggcgagcctgcggcgggcgctcgtgggggagtttgagacggccgagcgccgctttagttccggtcaacccagccttctccgcgagacggcgctcatctggatcgacgtgtatggtcagacccactgggacatcacccccaccaccccggccacgccgctgtccgcgcttctccccgtcgggcagcccagccacgccccctctgtccacctggccgcggcgacccagatccgcttccccgccctcgagggcattcaccccaacgtcctcgccgacccgggcttcgtcccctacgttctggccctggtggtcggggacgcgctgagggccacgtgtagcgcggcctaccttccccgcccggtcgagttcgccctgcgtgtgttggcctgggcccgggactttgggctgggctatctccccacggttgagggccatcgcaccaaactgggcgcgctgatcaccctcctcgaaccggccgcccggggcggcctcggccccactatgcagatggccgacaacatagagcagctgctccgggagctgtacgtgatctccaggggtgccgtcgagcagctgcggcccctggtccagctgcagccccccccgccccccgaggtgggcaccagcctcctgttgattagcatgtacgccctggccgcccggggggtgctgcaggacctcgccgagcgcgcagaccccctgattcgccaactggaggacgccatcgtgctgctgcggctgcacatgcgcacgctctccgcctttttcgagtgtcggttcgagagcgacgggcgccgcctgtatgcggtggtcggggacacgcccgaccgcctggggccctggccccccgaggccatgggggacgcggtgagtcagtactgcagcatgtatcacgacgccaagcgcgcgctggtcgcgtccctcgcgagcctgcgttccgtcatcaccgaaaccacggcgcacctgggggtgtgcgacgagctggcggcccaggtgtcgcacgaggacaacgtgctggccgtggtccggcgcgaaattcacgggtttctgtccgtcgtgtccggcattcacgcccgggcgtcgaagctgctgtcgggagaccaggtccccgggttttgcttcatgggtcagtttctagcgcgctggcggcgtctgtcggcctgctatcaagccgcgcgcgcggccgcgggacccgagcccgtggccgagtttgtccaggaactccacgacacgtggaagggcctgcagacggagcgcgccgtggtcgtggcgcccttggtcagctcggccgaccagcgcgccgcggccatccgagaggtaatggcgcatgcgcccgaggacgcccccccgcaaagccccgcggccgaccgcgtcgtgcttacgagccgtcgcgacctaggggcctggggggactacagcctcggccccctgggccagacgaccgcggttccggactccgtggatctgtctcgccaggggctggccgttacgctgagtatggattggttactgatgaacgagctcctgcgggtcaccgacggcgtgtttcgcgcttccgcgtttcgtccgttagccggaccggagtctcccagggacctggaggtccgcgacgccggaaacagtctccccgcgcctatgcccatggacgcacagaagccggaggcctatgggcacggcccacgccaggcggaccgcgagggggcgcctcattccaacacccccgtcgaggacgacgagatgatcccggaggacaccgtcgcgccacccacggacttgccgttaactagttaccaataa

SEQ ID NO: 12260 - DNA, 633 bp, unidentified
  source 1..633: mol_type = other DNA
  misc_feature 1..633: note = Synthetic
atggatcctacactttactgtgtagttgcggttgataccaaactcgggatcggaaaaaacagatgtctcccgtggcctgcattgcggggagacatgaggcgttttcgacagctgactaccgactgtgcccctggaaaacaaaacatggttgttatggggcggcgcacatggctttcgattcccgcgggctgtcgaccattggcgggtagaatcaatgtggttctaagtcgcacgttagaaaccccgccccctggtgctcactttttggcgagttcgctcgatgccgcgcttgggttggcgagaagcccagagctagcacagcaaattgacaaggtttgggtcatcgggggtggggacttgtaccgggaggcgctcactggcccctggccagttaggctatttttaacccgggttttacatgactttgcgtgtgacgtgtttctctcgcatgatagcttggctgcgtatgcccgcgtgaaccccaagcctggcgagcaagagagggtttttcaagaacgtggtatcttttacatgtttgagacctacataaaagtgactcagagttcggatacggcgttgcctgatttggagcggccccgacccgcgaccccgcccttcagtgagacttcgtaa

SEQ ID NO: 12261 - DNA, 147 bp, unidentified
  misc_feature 1..147: note = Synthetic
  source 1..147: mol_type = other DNA
atgtctcccgtggcctgcattgcggggagacatgaggcgttttcgacagctgactaccgactgtgcccctggaaaacaaaacatggttgttatggggcggcgcacatggctttcgattcccgcgggctgtcgaccattggcgggtag

SEQ ID NO: 12262 - DNA, 132 bp, unidentified; identical to SEQ ID NO: 3514
  source 1..132: mol_type = other DNA
  misc_feature 1..132: note = Synthetic

SEQ ID NO: 12263 - DNA, 993 bp, unidentified
  misc_feature 1..993: note = Synthetic
  source 1..993: mol_type = other DNA
aagcctaccagatttttccacgcaaaccaaccgccaatgccgcattcatacgagatggaggacttatgcttcgacgacatgcaatatcgctggtctccctcgaacacaccctatcgaagtatgtctaggcgatataaatccgtatctcggagcgggccttcgatgcgtgtacgctccagaacgccatgccgccgtcaaaccattcgaggaaaacttatgtcaaaggagcggtctgtgtaccgccattattttaattacatcgcaaggtcccccccagaagaactagctaccgttagaggcttaatcgtgccaattattaagacgacccctgtcacccttccgtttaacttgggtcagacagtggcggataactgcctgtcgttatccggaatgggttatcatttaggtctcggaggttattgtccgacatgcactgcatctggagaaccgcgtctatgtcgaaccgatcgggcggctctgatactagcatatgttcagcagcttaacaacatatacgaatatcgtgtgtttcttgcatccattttggcgctatcagaccgagccaacatgcaagcagcgtccgctgaacccctattgtcgagcgtattggcacaaccggaattattttttatgtatcatattatgagggaggggggcatgcgagatatacgcgtacttttttatcgtgatggagatgccggagggtttatgatgtatgttatatttccggggaaatctgttcacctccattacagactaatcgatcatatacaggccgcgtgtcgggggtataaaatagtcgcacacgtttggcagacaacatttttactgtcggtatgtcgcaacccagaacaacaaacagagactgtggtgccatccattggaacatcggacgtttactgtaaaatgtgtgaccttaactttgatggagaattgcttttggaatacaaaagactctacgcattatttgatgactttgttcctcctcggtga

SEQ ID NO: 12264 - DNA, 33 bp, unidentified; identical to SEQ ID NO: 3523
  misc_feature 1..33: note = Synthetic
  source 1..33: mol_type = other DNA

SEQ ID NO: 12265 - DNA, 6693 bp, unidentified
  source 1..6693: mol_type = other DNA
  misc_feature 1..6693: note = Synthetic
atgcctgcctatttgtcaaatatggataaacaggagtcaactcagaattcctcagacatcttatatccagaatgtcacttgaactctccgattgtaaaaagcaagattgctcaacttcacgttttgctagatatcaatcaaccctatgatttaaaagataacagtataataaatatcaccaaatacaaaatcagaaatggaggtttatcgccccggcagatcaaaatcagatcgctaggcaaaatccttaaacaagaaattaaggatattgatcgttacacttttgaaccttatccgattttctcattagagttactcagactggatatcccagaaatatgtgacaaaataagatccattttttcagtctctgatagattaataagagaactatcatctggatttcaagaattgtggttaaatattcttagacaattaggctgtgttgaagggaaagagggatttgactcattaaaggatgtagatatcatcccagatataactgataaatataataaaaacacatggtatcgcccattcttaacatggtttagcatcaaatatgatatgagatggatgcaaaagaataagtcggggaaccatttagatgtctcaaattctcacaattttcttgactgtaaatcatatattttgattatatatagagatttagtgataataataaataaattaaaattaaccggttatgtccttacacctgaattagtattaatgtattgtgatgttgtcgaaggaagatggaatatgtcttcagctggacgactcgataaaaggtcatcaaaaataacatgtaagggggaagaattatgggagcttatcgactctttatttcccaatcttggtgaggatgtatataatattatatcactactagaacctttatcacttgctttaatacagttggatgaccctgtaactaatttaaaaggagctttcatgagacatgttttgactgagctacatacaattttaataaaagataatatatacacagattcagaagcagacagcataatggaatcattgataaagattttcagagagacatcaattgatgaaaaagcagaaattttctccttttttagaacgtttggacatcctagcttagaagcaataactgctgccgataaagtaaggacacatatgtattcctccaaaaaaatcatactaaagacactatatgagtgtcatgcaatcttctgtgcaattataataaacggatatagagaaagacacggtggtcaatggccgccatgcgaattccccaatcatgtatgtcttgaactcaagaatgcacaaggatccaactctgcaatttcgtatgaatgtgccgtagacaattatagtagttttataggatttaaatttttaaaatttattgagcctcaattagatgaagatttgacaatttatatgaaggataaggctctatcacctaggaaagcagcatgggattcagtatatcccgacagtaatttatattacaaagtccctgaatcagaagagactcgtaggttaatcgaggtttttataaatgataataattttaaccctgcggatattattaattatgtagagtcaggagaatggttaaatgacgatagcttcaacatatcttacagtctcaaagaaaaagaaattaaacaagagggtcgactctttgccaagatgacatataagatgagagcagtccaggtattagcagaaacactactagcaaaaggagtaggtgagttattcagtgaaaatgggatggtaaagggagaaattgacctactaaagagactgactacattatctgtctcaggtgttccaagatccaactcagtttacaataatcccatattacatgagaaattgatcaaaaatatgaataagtgcaattcaaatgggtattgggatgaaagaaagaaatctaaaaatgaattcaaagctgcagactcatcaaccgaggggtatgagactctgagctgttttttaaccaccgatttgaaaaaatactgtctcaactggagatttgaaagtacagcgttgttcggtcaaagatgtaatgagatattcgggtttaaaactttctttaactggatgcaccctattctagaaaaaagtacaatttatgtaggagatccttactgtccagtacctgatagaatgcacaaagaactccaagatcatgatgataccggaatctttatccataatccaagagggggaatagagggttattgccagaaattatggacactaatctctattagtgcaatccatcttgcagctgttaaagttggtgtcagagtgtcagcaatggtacaaggagacaatcaagctatagcagtgacatccagagttcctgtcacacaaacctataagcaaaaaaagactcacgtctatgaagaaatcacaagatatttcggtgccttgagagaagttatgtttgatattggacatgaattaaaattaaatgagaccattataagtagcaaaatgtttgtatacagcaaacggatatattatgatgggaaaatcctcccacagtgcctcaaagctttaacaagatgtgtattttggtcagagactcttgtagatgaaaacaggtcagcatgctcaaacattgcaacatctatagccaaagctattgagaatggatattcacctatcttaggctattgtattgctctttttaaaacttgccaacaggtatgtatatcattaggaatgaccattaatcctactattacgtcaactatcaaagatcaatattttaaagggaaaaattggttaagatgtgcaatattgatcccagctaacataggagggttcaactatatgtctacagctagatgttttgtcagaaatataggtgatccagcagttgcagctctagcagacttaaagagattcatcaaagcaggtctgttagataaacaggtattatatcgtgtgatgaatcaagaaccaggagactcaagcttcttagattgggcatcagacccttattcatgcaatctcccacactcacaaagtataacaactataatcaaaaatgtaacagctagatcagtattgcaggaatcacctaatcctctcctatcaggtctcttttcagaatcaagtagtgaagaagatctcaacttagcatcatttttgatggataggaaagccatattgcccagagtagctcacgagatcttagataactcacttacaggtgtaagagaagctatagccgggatgcttgatacaacgaaatctctagtaagagctagtgtcaggagaggaggattatcatatagtatcttaagaagacttataaattatgatctattacaatatgagaccttaacaaggacactcagaaaaccggttaaggataatatagaatatgagtatatgtgttcagtagaattggcaataggattgaggcaaaaaatgtggtttcatctaacttatggaagaccaatccacggtttagaaactccagacccgttagaattattaagaggatcatttattgaaggctcagaaatatgtaaattttgtagatcagaagggaataaccctatgtatacttggttctatcttcctgacaacatcgacttagatacacttagcaatggaagtcctgccatacgtatcccttattttggttctgctactgatgaaagatcagaggctcaactaggttatgttaagaacttaagcaagccggcaaaagcagcaataagaatcgcaatggtttacacttgggcttatggaactgatgaaatatcatggatggaagcagcacttatagctcaaaccagggctaacttaagtttagagaatttgaagttactcacccctgtatcgacttctacaaatttgtcccacagattgagagatactgctacacagatgaaattttcaagtgctactttagttcgagcgagtcgatttattaccatatctaatgataatatggcattaaaagaggcaggagagtctaaagatactaatttagtttatcaacaaattatgttaaccggattgagcttatttgaattcaatatgaggtataaacaaggatcattatctaaacctatgatattacacttacatttgaataataaatgctgtatcatagaatctcctcaagaattgaatattcctcctagatctacattggacttagagatcactcaggaaaataacaagttaatctatgatcctgatcctctcaaggacatagatctagagttatttagtaaggttagggatgtagtacacacaattgatatgaattattggtctgatgatgaaataattagagcaactagtatatgtacagctatgactattgcagacacaatgtctcaattagatagagacaatcttaaagaaatgatagcactgataaatgatgatgatataaatagtttaatcaccgaatttatggttattgatatacccttattttgttccactttcgggggtattctaatcaatcaatttgcatattcactttacgggttaaacgtcagagggagggatgaaatatggggatatgtgatacgcataattaaagacacatcacatgcagtcctaaaagtactgtccaatgcattatcacatcctaaaatattcaaacgattctgggatgcaggagttgtagagcctgtttatggacctaacttgtccaatcaagacaagatactgttagccatttcagtatgtgaatactctgttgacctcttcatgcgtgattggcaagagggcataccgcttgaaatatttatttgtgataacgacccaaatatagcagaaatgagaaaactttcatttttagctagacatctagcatacttgtgtagtttggcagagatagctaaagagggaccaaaattggaatctatgacatctctcgaacgactcgaatcattgaaagagtatctagaacttacttttttagacgatcctatattaagatatagtcaattgacaggcttagttattaagatattcccttcaacgttaacttacatcaggaaatcttcaattaaggtgttgagagtaagaggtatagggataccagaagtcttagaggactgggatcctgatgccgatagtatgctactagataatataactgctgaggttcaacacaatatacctttaaagaagaacgaaagaactcccttctgggggttaagggtatcaaaatcacaagttctgcgacttagaggttatgaagagataaaaagggaagaaagaggaagatcaggtgtaggattaactctaccttttgatgggcgatatttatcacaccaattgagacttttcgggattaatagcaccagttgtttgaaagcattggaacttacctatttactgaatcctctagtcaataaggataaagatagattatatctcggagaaggtgcaggtgcaatgctgtcttgttatgatgctacattaggaccctgcatgaactattataattcaggtgttaattcttgtgatctcaacggacaaagagaattaaatatttatccttcagaagtggcactggtagggaagaaattgaataatgtcacgagtttatgtcaaagagttaaggttttattcaatgggaatcctggatcaacttggatagggaatgatgaatgtgaaacactaatctggaatgaattacagaataattcaatagggtttattcattgtgacatggaaggtggagaacacaaatgtgatcaggtggtcttacatgaacattatagtgtgatcaggattgcataccttgttggggataaggacgttatcttagtaagcaaaattgcaccaagattaggtacagactggacaaaacaattaagtttgtatttaagatactggagagatgtcagcttaatagtgttgaaaacatctaacccagcctctacagaaatgtatctgatatcaaaagatcctaaatctgatattatagaggatagtaatacagtattggcaaaccttcttccattatctaaagaggatagtattaagatagaaaaatggattctagttgagaaagccaaagttcatgattggatagttagagaattaaaggaagggagtgcatcgtcaggtatgctaagaccttaccatcaagcattacaaatcttcggatttgagcctaatttaaacaaattatgtagagatttcttatctacactaaatatagtagacacaaaaaattgtattatcacatttgatagagtattaagagatacaatctttgagtggactcggataaaagacgcagataagaagctaagacttacaggtaaatatgatctatatcctcttagagattcaggtaagttaaaagttatttctagaaggcttgtaatatcttggatagcattgtctatgtctacaagactagtaacagggtcatttccagacattaaatttgaatcaagactccaattaggtatagtatcaatatcctctcgtgaaatcaaaaatcttagggttatatcaaagattgtcattgacaaatttgaagatattatacatagtgtgacctataggttcttgactaaagaaataaaaatattgatgaaaattttgggagcagtcaaattatttggggcaagacagagcacatctgctgatatcactaatatcgatacatcggactccatacaatga

SEQ ID NO: 12266 - DNA, 75 bp, unidentified; identical to SEQ ID NO: 3525
  source 1..75: mol_type = other DNA
  misc_feature 1..75: note = Synthetic

SEQ ID NO: 12267 - DNA, 1710 bp, unidentified
  source 1..1710: mol_type = other DNA
  misc_feature 1..1710: note = Synthetic
ttgccggaagttcccgcttacaacgcctcagaaaaatacccaagcatgacttcagttaattctgcagaagccagcactggtgcaggaggggggggcagtaatcctgtcaaaagcatgtggagtgagggggccacttttagtgccaactctgtgacttgtacattttctagacagtttttaattccatatgacccagagcaccattataaggtgttttctcccgcagcaagtagctgccacaatgccagtggaaaggaggcaaaggtttgcaccattagtcccataatgggatactcaaccccatggagatatttagattttaatgctttaaacttatttttttcacctttagagtttcagcacttaattgaaaattatggaagtatagctcctgatgctttaactgtaaccatatcagaaattgctgttaaggatgttacagacaaaactggagggggggtgcaggttactgacagcactacagggcgcctatgcatgttagtagaccatgaatacaagtacccatatgtgttagggcaaggtcaagatactttagccccagaacttcctatttgggtatactttccccctcaatatgcttacttaacagtaggagatgttaacacacaaggaatttctggagacagcaaaaaattagcaagtgaagaatcagcattttatgttttggaacacagttcttttcagcttttaggtacaggaggtacagcaactatgtcttataagtttcctccagtgcccccagaaaatttagagggctgcagtcaacacttttatgagatgtacaatcccttatacggatcccgcttaggggttcctgacacattaggaggtgacccaaaatttagatctttaacacatgaagaccatgcaattcagccccaaaacttcatgccagggccactagtaaactcagtgtctacaaaggagggagacagctctaatactggagctgggaaagccttaacaggccttagcacaggtacctctcaaaacactagaatatccttacgcccggggccagtgtctcagccgtaccaccactgggacacagataaatatgtcacaggaataaatgctatttctcatggtcagaccacttatggtaacgctgaagacaaagagtatcagcaaggagtgggtagatttccaaatgaaaaagaacagctaaaacagttacagggtttaaacatgcacacctactttcccaataaaggaacccagcaatatacagatcaaattgagcgccccctaatggtgggttctgtatggaacagaagagcccttcactatgaaagccagctgtggagtaaaattccaaatttagatgacagttttaaaactcagtttgcagccttaggaggatggggtttgcatcagccacctcctcaaatatttttaaaaatattaccacaaagtgggccaattggaggtattaaatcaatgggaattactaccttagttcagtatgccgtgggaattatgacagtaaccatgacatttaaattggggccccgtaaagctacgggacggtggaatcctcaacctggagtatatcccccgcacgcagcaggtcatttaccatatgtactatatgaccctacagctacagatgcaaaacaacaccacagacatggatatgaaaagcctgaagaattgtggacagccaaaagccgtgtgcacccattgtaa

SEQ ID NO: 12268 - DNA, 186 bp, unidentified
  source 1..186: mol_type = other DNA
  misc_feature 1..186: note = Synthetic
gtggaaatgtctatccgcctgcgtgtatgtgtggggtgtgtatatgtgcgcgtgaccgtatccctccctgcctttaacccgatgagaaataaaatcggcgaatgtacacagtcacacacaatgtgcttacgtgccgtgttactgacaccacataacaaaaaaaaaaaacatacttcctgtccgtga

SEQ ID NO: 12269 - DNA, 186 bp, unidentified; identical to SEQ ID NO: 12268
  misc_feature 1..186: note = Synthetic
  source 1..186: mol_type = other DNA

SEQ ID NO: 12270 - DNA, 39 bp, unidentified; identical to SEQ ID NO: 3531
  source 1..39: mol_type = other DNA
  misc_feature 1..39: note = Synthetic

SEQ ID NO: 12271 - DNA, 633 bp, unidentified
  misc_feature 1..633: note = Synthetic
  source 1..633: mol_type = other DNA
ctgacaagcgacgagatggacactgtcattgagctgtccaaactcctgcacgatgaagagttcaaagacaacgcttcctgtacctcgacccccacgctaaagacagcacgaatcattgagagcgcagttaccggaatcacgctcactgcatccgtacccatgatcattatagtgattaccaccatgattctctatcacagagtcgcaaaacataacgctacttcattttacgtcatcacactctttgctagcgattttgtgctcatgtggtgtgtcttttttatgacagtgaacagagagcagctgttctcatttaaccgtttcttctgccagttagtttacttcatctatcatgcagtctgttcatatagcataagcatgctagctataatcgcaacaattaggtacaaaactttgcaccggcgtaagcagaccgaaagtaaaacatatagcacggggcgaaacataggaattctcctactagcttcctcaatgtgcgcgattcccaccgctctctttgtgcagattaacggagcaaaaaaaacgacgggaaaatgcgtcgtttatctatcctctccgaaagcttacgaactgtttctagcggtgaaaattgttttcagcttcatttggtga

SEQ ID NO: 12272 - DNA, 48 bp, unidentified; identical to SEQ ID NO: 3533
  source 1..48: mol_type = other DNA
  misc_feature 1..48: note = Synthetic

SEQ ID NO: 12273 - DNA, 51 bp, unidentified; identical to SEQ ID NO: 3536
  misc_feature 1..51: note = Synthetic
  source 1..51: mol_type = other DNA

SEQ ID NO: 12274 - DNA, 105 bp, unidentified; identical to SEQ ID NO: 3537
  misc_feature 1..105: note = Synthetic
  source 1..105: mol_type = other DNA

SEQ ID NO: 12275 - DNA, 39 bp, unidentified
  misc_feature 1..39: note = Synthetic
  source 1..39: mol_type = other DNA
atgggcattataagtatagcagacttctttatggtttaa

SEQ ID NO: 12276 - DNA, 18 bp, unidentified
  source 1..18: mol_type = other DNA
  misc_feature 1..18: note = Synthetic
attttgttaattctgtga

SEQ ID NO: 12277 - DNA, 135 bp, unidentified; identical to SEQ ID NO: 3541
  misc_feature 1..135: note = Synthetic
  source 1..135: mol_type = other DNA

SEQ ID NO: 12278 - DNA, 27 bp, unidentified
  misc_feature 1..27: note = Synthetic
  source 1..27: mol_type = other DNA
atttttatagttgtatacggaaaataa

SEQ ID NO: 12279 - DNA, 39 bp, unidentified; identical to SEQ ID NO: 3543
  misc_feature 1..39: note = Synthetic
  source 1..39: mol_type = other DNA

SEQ ID NO: 12280 - DNA, 3627 bp, unidentified
  misc_feature 1..3627: note = Synthetic
  source 1..3627: mol_type = other DNA
ctggaagatttgttatggcaacaaattctcagtatggatccggcggaacttctgtcggacaatgcaatctcgtccacgtgtgacgaaaacatcgcagctggacatcattttacgcaatctccgcacgttgaaatgtcagtccaatcaacgacatcggcgggtcatactggagtgatgacgacacagtcgcagttttccaatggcgtacgggatcaaaaccgcgaatcactgtcgactctgacgggcctctcgctggaaagcatcaacaatcaaatcaatgttcaacccactcagatgacctttcaacccatttccccgccgatgcagggtcagaattatgtctatagcaataatatgatcaatcccatcaaacctagatcaattatcaaatcacatggtcattcgatgggggagatgtcatttgcagaccattccttgtatgttaatgctcaaccgcctgtccaacagcctcaacttaaatcccttgtaggtatgcatccatgcatgaccgctacctcacagggtaaatatcagacaaataaaactgtggggccaccctctatttcagcttcccaaattactacgggaaatgccggtataagacccggggaatatcagtctgtccataatcaatcttctgtaaacgggtctaagtcttatgagatcactacggcatctggcgatgaatggatactgactacacccggcgggcaatcctggactctgaaacggaacccccctaatcctccgaataacagaactaattcagttgtcaacaaggcacaacaggtctcgcatgcccaaccttatgtctctgggtctagcgacggtttctatcagggggctgctctccaatcatgtgcgtatgtaaatacgccaggtttcactcctgtgtgcgaaacacagaatatgaacaactcacaggcgacacaactaagcgcatccatgaactgcataaatgcgttacaaactactatggatgcgattgtcacttctacttccaagccggtgggggcggtatcaaataatcggggtgctaattttggaatgggaggcatggagaattatatggataataacagtccatggaaccaatactgtaaagttcaagacattgtatctcaaaactgctcccagggaaaagttgtttcttcgacaccgggaatcgctcctaatctgatgaagggcaacgggttgaatgtttatggccatgtggggtgtgtagatgcggccatttccgataaacaaggtggcaccgctaacgtcgcatcttctctattgaatccggaacatcaagattggatgcgggtgaccgggacgagcacaaatctgttaaacaatataaatgctgaaacaaaaatggagaactatggttttccggaaaatgggaatgtccacggagccgtcaatacagctttaccactaactctatccagtggtcagccctacacatctgtgccacaacatggcgcatgtgaaggaaatggaacaattcccgtggtacagatctgcagtcccaatacagcgttcaaagcgcactacagtttgctcggtacagtggatgaaaacaaccccttgtccgtcagagagagcatacaggacacaagttttagtaatggatgtgctcctcagttgtcctcgcctggaggaaacccgacaataattgcacattcaatgattggaaataacggaaccccgaataaagatgtatgcaagcctacccccagcctacgtgcaataaaaaaattaaactttgactatgatgaccgaggggaaaatataggatttccttccaaattggcagcccttctgtctatgggagaaaacatgtcaaagatggacaatccttgttatggaacttctctagcgcagttcgaggaatcacatcagcagaatgcatcggagggtaaaatatccattgcggatttagagttttctgaagaagatgatgtgctttccagtgcagcctctgtcagctgtaatgacaactgcgtcatgaagatcggagcttcgcagcaaggtaccactgtggctgatttacaacaagggtttaagcaacaaatgaacggagaattctccatgtttgcagtggatgggaacattaaaacacaggagatgtcgaatgactgcgcgtcaaacgtcacggataatgcatgcgccattcgacaaaataaacgtatgcactgtgaaattgggatttcagaggatggccgggtgcgggaagaggagaaatgctcagacgtcgcaattcacgttccgcggaaaagtgcgcgtattcataacatgaagtccgaaggcgtgacttgcggtatgtgtgtgacggctgcggattccacacggcaggatgcgtctggaggttcgagcagcggaaccaagaaaggcgaaaagttgcaaggactttggaagggataccaggatgacgacgattcggaattaaccgaactgtcggatacagacagcgacaacgatgtccaaaactgtcacggagtaagaaagaccggttccaagacgtactcctcagtattttttaatcctgactatcgccaagccaagagattgcttgccgacattccatacagaagatggattccggacacattcaacatggaagaacacgagggtccattccttccaatagtgactagaccacccactgtgtttatgggcggtagacgccggaggacttacctccggcgaagtgtcacctctatcggtcctctgagtaaattaacttacttcaaggaattactgcagagctacgtgttgagaaatagcaactgttatttaagtatcggttggcctgccaaacacagggtgtatatcatgtcagaagagaaattggggtataatcatatacctaccttgagggagatgtttccactgccacccggatggatgattgtccttggaattgtcggttcagagacgcccgcggctctgtataaacacatggtggttctcctgtgtgaaaataaatgggtgcttctgcataattaccgggactctaaacacgagctgtatttcgccgcctcggatttgaaacagtttatggaggagggtctgtctagatgtgactgcatatattatgaaaagtcagtgccgtacggcgtggccatggaagactctgttcgagagttcttgagaaacagtaaaacgtttcagagtcttatggagtataggaagaatatgcacggatctacctggacctttaacggaatgcctggtagactgggcgacagagttatacatatctgcaatcctgaattggttaactcaatcccggcagacgaggccatcagatatgaaggaaaacctttgtatttctttgcatttgtcaccactttcaaatcgcaccccggtagcaaggccaacgtattgatcgctgcggataagaacttagggatatacggctatcataaaggtcgccccaggatacggtacttgtgcaagaacgtacaggctttttttagagccggagttagaaagatgtatttggattatgagattccatcgaaaacgttgcttgccgtcagcgaagatgactatctgtgtattctacaaaaagctccttgtctgctcttaaaaccagctgtgtttagaaagactttctctcaggaaggtaaataa

SEQ ID NO: 12281 - DNA, 78 bp, unidentified
  misc_feature 1..78: note = Synthetic
  source 1..78: mol_type = other DNA
ctggacatcattttacgcaatctccgcacgttgaaatgtcagtccaatcaacgacatcggcgggtcatactggagtga

SEQ ID NO: 12282 - DNA, 12 bp, unidentified
  source 1..12: mol_type = other DNA
  misc_feature 1..12: note = Synthetic
atgataggctga

SEQ ID NO: 12283 - DNA, 114 bp, unidentified; identical to SEQ ID NO: 3547
  misc_feature 1..114: note = Synthetic
  source 1..114: mol_type = other DNA

SEQ ID NO: 12284 - DNA, 45 bp, unidentified
  source 1..45: mol_type = other DNA
  misc_feature 1..45: note = Synthetic
gtgatgaagattaagaaaaagcctccttcagttgcaaggagctaa

SEQ ID NO: 12285 - DNA, 999 bp, unidentified
  misc_feature 1..999: note = Synthetic
  source 1..999: mol_type = other DNA
ataactgaaaaaaaaattactactattgttaatttagttatggaaccaatccttgcaaaaaatccaaatagatttgttatttttccaattcaatatcatgacatctggaatatgtataaaaaggcagaggcatcattttggacagtggaagaagtggatatatctaaagatatcaatgattggaataaactaacaccagacgaaaaatattttataaaacatgtattggcgttttttgcagccagtgacggaatagtgaatgaaaatttagcagaacgattttgtatagaagtacagattaccgaggctagatgtttctacggatttcaaatggccattgaaaacattcattcggaaatgtatagtcttttgattgatacatatgttaaagatagtaatgaaaaaaactatctctttaatgctatagagacaatgccttgtgtaaaaaagaaggccgattgggctcaaaagtggatacatgacagcgccggttatggagaaagacttattgcctttgcggcagtagaaggaattttcttttctggatcatttgcgtccatattttggcttaaaaagcgtggcctaatgcccggactcacgttttccaacgaattaattagtagagacgagggtctacactgcgatttcgcatgtttgatgtttaaacatttattgtatccaccgagtgaagaaacagtaagatctattataacagacgcggtctctattgaacaagaatttcttactgtggctcttccagttaaacttataggaatgaattgtgaaatgatgaaaacatatatggagtttgtcgcagatagattgatttctgaattgggatttaaaagaatctataatgttaccaatccatccgatttcatggaaaatatatcattagaaggtaaaactaattttttcgaaaaacgtgtgggtgaataccaaaaaatgggagttatgtctcaagaagacaatcatttttctttagatgttgacttttaa

SEQ ID NO: 12286 - DNA, 96 bp, unidentified
  misc_feature 1..96: note = Synthetic
  source 1..96: mol_type = other DNA
atgacatctggaatatgtataaaaaggcagaggcatcattttggacagtggaagaagtggatatatctaaagatatcaatgattggaataaactaa

SEQ ID NO: 12287 - DNA, 75 bp, unidentified; identical to SEQ ID NO: 3551
  misc_feature 1..75: note = Synthetic
  source 1..75: mol_type = other DNA

SEQ ID NO: 12288 - DNA, 75 bp, unidentified; identical to SEQ ID NO: 3551
  misc_feature 1..75: note = Synthetic
  source 1..75: mol_type = other DNA

SEQ ID NO: 12289 - DNA, 1926 bp, unidentified; identical to SEQ ID NO: 11074
  source 1..1926: mol_type = other DNA
  misc_feature 1..1926: note = Synthetic

SEQ ID NO: 12290 - DNA, 576 bp, unidentified; identical to SEQ ID NO: 11075
  source 1..576: mol_type = other DNA
  misc_feature 1..576: note = Synthetic

SEQ ID NO: 12291 - DNA, 1605 bp, unidentified
  source 1..1605: mol_type = other DNA
  misc_feature 1..1605: note = Synthetic
acgcacctcatcgcccaggccatggagatggacctctcagtgacgcacatctcccgactgcggcggctgctgaccaagctccgcgtcaacaccttcacggcggtggcgtgcctgcgagaggcgatcgcgcgcaagagctggctgccgcccgggcgcatgctgggcaccgacatcaacgaggacatgaccgtgctcgagtacatggtgcaggaggtggacaacgcgcgcgagaacatcgagccctacctctgcgtgatccagtgggcgcacaacgcggacgtgctggacgactgtctgcgcgaggccatggacgagatgtacggcgagtgcgtgccgcggatcggccgcggcgtcgtggagtgccgcttcccgcacctcgtcgcggaccgctgctactcctgcctgagcgtgctcttctccgaggacgcgtgcgtgcgcttcacgaacgagctcatgcgccagagccgcaccatggcgaggtgcatcgtcgatcgcgcgcacgagcccggcggctcgtacgacgagctcgtggacatggtgcggcaccagaacgtgagcaaggtgcggctctggccgcgcgtcgtggcgaacgtggtcgagaacgtgatcgccgcggaccttgagggcctgatggcgtactgccgcacgtgcctcatgagcgcgcgagtcgcctccggcgggctcatagacctcatcaaggaccgcatgggcccgctcatcgtggagtgcatcgagacgcacgtcgcggaggggaacctcgatcgcgcgctctgcctgtacgtgaactacgtggccgtgctcaagacccacggtctgcacgcaagggcgctggaaaagctctcgggcaagacgctctacggcgcggtggtcgcggcgccgccgtgcgacaccgacgtgctgctctcctacatcgggcgcctgccgcgcgaggagctggcggccttcgcgcgcgtggccttcgcgcgaatcgtgaagagcgtctacaccggcgtcaacctcgagaagcacatatcgctgaagctggccatggagctgtacccgccgatggcctcgcccgcgctcaacgacctggtgcgccggctcatgtccggacggctgctgctcccgctgctgccgccgccgcagcccatggagcacgacggcgaggagagcggccgccacgacccggagatggtgctcatgcccgtgaacgtgtacaccgtgcccacgccggtgccgctggccgcgatgacgccgccggagtcgctccgcggtgccgtggagtcggcgctcgcccgagcagacactgcctacgacgtggcgccgctggcggccttcgggcgcgcggagctaaccatccccgccgccggcgggcgcgagcaggaggtcatatgctccagcgcgcacctggtctgcattgtgctcatggacgaggccggcaagacgggcgtgacggtcgaggacgccgcgcggcacctaggcggcgacgcgcgcctggccgagatgacgctgacgagcctgtgcagagagaaaattgcaaagagaagaaccgttgacggcatgaaacggtttgccctgaacccccgactcgaggctcgcgactcgcccatggtcgtgttcaactag

SEQ ID NO: 12292 - DNA, 1122 bp, unidentified
  misc_feature 1..1122: note = Synthetic
  source 1..1122: mol_type = other DNA
ctgactgcaccgaccccaaccatggccacgtcagaactcaacctctatatcgacaaggactcaccccaggtgagattgctagcattccccatcatcatgaaacccaaagaaaatggggttagagagctgcaaccgcaactgaggactcagtacctcggtgacatcaccggaggaaagaaaagcgcgatatttgtgaattgctatgggttcgttgaagatcacggggggcgagacagcggattctcacccatcagtgaagaatccaaaggatcgacagtcactgcagcctgcatcactcttggcagcatcgagtatgatagtgacatcaaggaagtggcaaaggcctgctataatcttcaggtgtcagttaggatgtccgctgattcaactcagaaggttgtttacacaatcaatgctaaacctgcactgttgttctcctcccgtgttgtcagagctgggggttgtgtggttgcagcagagggtgcaatcaagtgccccgagaagatgacatccgatcgcctttacaagttccgcgtaatgtttgtttcattgaccttcttacatcgcagcagccttttcaaagttagccgtacggtgctgtcaatgaggaattctgctctaatagcagtacaggccgaagtgaagctgggattcgatctgccactagaccatccaatggcaaaatatctgagcaaagaggatggacagctctttgcgactgtgtgggtacatttgtgcaacttcaagcgcacagacagacggggagtagaccgatcggtggagaacatcagaaacaaagtacgggccatggggctgaagctcaccttgtgtgatctgtggggtcccacacttgtttgtgaagctacagggaagatgagcaagtacgcgctaggtttcttctcggagaccaaggttggctgtcatccaatctggaaatgcaactcgactgtcgcgaagatcatgtggtcatgcacaacctggatcgcatcagcaaaggccatcatacaggcctcctctgctcgtgccctgttgacatcagaggacatagaagccaagggagccatctccactgacaaaaagaaaacagatgggtttaatcccttcatcaagacagcaaagtag

SEQ ID NO: 12293 - DNA, 45 bp, unidentified; identical to SEQ ID NO: 3557
  source 1..45: mol_type = other DNA
  misc_feature 1..45: note = Synthetic

SEQ ID NO: 12294 - DNA, 3366 bp, unidentified
  misc_feature 1..3366: note = Synthetic
  source 1..3366: mol_type = other DNA
atgtctgcacatccggacgatttgttttggcaacaaattctcaatatggatccgacggaacttttgtcggacgatgtaatctcgtccacgtgtgacgaaaacactgcagctggaactgatattatgcagcctttgtgcgttgatatgtctgttcaaccgacgacatcggggtgtcataccggagcgatgatgtcagactcgtatttctccaatgacacaccggatcaaaactgccaatcgcattcgactttgacggacctttcgccggaagacatgaacaatcaaatcaatgttcaacccaatcagatgacctttcaacccatttccccaccgatacaggatcaaaattatggctatagcaataatatgattaatcccatcaaacctgcatcaattatcaaattacatggtcattcgataggagaaatgacagttacagacccttcctctcatgttaatgctcaacactttgtccaacagtctaatcctaaattctttctaaatatgtatccgtgcatgaccgctaactcacaaggacccggagaatgtcagtctgtccataatcaatcttctggaagcgggtctaattcttatgacattaatacggcaccccgcgatgaatggatattcactacatccggcggagaatcctgggttctgaaacggaacacccctaatcctccaaatagcagaactaatttaattttcaacaacgcacaaccgattttccatacccaacctcaagtatctgggtttagcgactgttcctatcaggggggtggtctcaattcacgtgagtatgtaaatttggcaggttacactcccgtgtgcaacatgcagaatatcaaaaactcatgggcgacacaactaggagcatccattgactgcatgactgcgtcaccaactggtatagatgcgaatgtcaactctgctttccagccggtgggggtggtatcaaataatcggggtgctaatgtttcaatgggaggcatgggtaattatatagagaataacagtccatggaaccaatactataaatcggaaatggctaataattccataaatgtcaaggagtcgaatgtttatggccatgtggggtgtgttaatgacgccatttccgataaacaaggtggcaccgctaacgtcccatcttctctattgaatccggatcaccaagattggatgaggatgactggtacgaacacacatatgttaaacaatataaatactaacacagaaatggaaaactatgattttccggaaaatgatggcaatgtccacggagccaccggtgtagatttatcaaccctgtccaatggtcagcagcatagcgcatttgaaggaaatggaacatttcccgtggtaaacaccggcaatccaagaacgacgttgaactgtgctcctcagttgttcttgcttggaggaaacccgacaattgcacatccaatgaatgggaataatgaaaccccagataaaaatgtatgcaagcctacccccagcacaggtgtaataaaaaaattaaactttgacggtgttgaccgagggggaggaataggaaattttcccaaactggcgtcttttgtagctatgagagaaaaaatgtcaaacacggtcaatccttcttgtggaacttttctagaacagttggagggattacgccagcagaattcatttgaaaaaaatatatcctttgctgatctacatttttctgaagaagatgatgtgctttccagtgcatcctcggtcagctgtaatagcaactgcgacatgaaaatcgaagtttcgcagcaaggtatcactgtgtctaatttacaacaaggatttaggcaacaaatgaacatgaactcatccgtggttaaaatggacgggagctataaaacacaagagatgtcaaatggctgcgcgacagacgtcacggataatgcaggcaccattcaacaaaataaacgtatacactctcaaaatgagaatccagaggatggccaggtacgggagggagggtgttcagacgtcagaaatgaacctccgcggaaaagtgcgcgtattcataacatgaagtccgaaggcgtgacttgcggtatgtgcatgacggctgcggattccacacggcaggatgcgtctggaggttcgagcagcggaaccaagaatgaatattacgatgatgaatcggaattaaccggattgtcggatacagacagcgacaacgaagtccaatgctgtcaagaagtaacaaaggtcggccccaagacgtactcctcagaaaactttaatcctgagtatcgccaagccaagagattgcttgccgacattccatacagaagatggattccagacccagtcaatatggaagacaacgacggtccgttcattccaatagtgactagaccagccactgtgtgtatgaacggtagacgccggaggactttcttccggcaatgtgttaccgctttcggtcctctgagtaagttaacttatttcaaagaattactgcagagctacgtgtccaaaaataacaatagttatttaagtatcagttggcctcccaaacacggggtatatgtcatgtcagagaagaaattagggtatgaacatatacctaccttgaaggacaagtttccactgccatgtgggtggatgatggtccttggagttgtcggtgcagaaccgcccgcggctctgaataaaaacatggtgattctcctgtgtgaaaatagatgggtgcttctgcataattactcaaactctacacacgagctgtttttagccgcctcggatttgaaacagtttatggaggagggtctgtctagatgtgatcctatatatgaagaatcaacagtgccgtacggtgtggccatggaaaactctcttcgagatttcttgagaaacagtagaacgtttcaggatcttatggatcaaagggacaacatgcacggatgtaactggacctttaacggaatgcctggtagactaggtgacagagtcatacatctctgcaatcctgaatcggttgattccataccaggagacgaggccgtcgtatgtgaaggaagacccttgtatttctttgcatatgttaccactttcaaatcaaaccccgctactaaggctaccgtgttaatagccgcggataaagatttaagaatatatggctatcataaaggtcgccccaggatacggtacttgtgtaagaacgtaaaaactttctttaaagccggggctagaaagttctatttagattttcagattacacctaaaaggttgcttgccgtcaacgaagaggagtatctgaatactctacaaaacgctccttgtctgctcttaaaaccatctgtgtttagaaatatttactctcaggaaggtaaataa

SEQ ID NO: 12295 - DNA, 663 bp, unidentified
  source 1..663: mol_type = other DNA
  misc_feature 1..663: note = Synthetic
atgcctttactaacctccgctcacccaacaggtggtgaaaatataacacaggtgacaccagcctctatcagcacacatcatgtgtccaccagttcgccagcaccccgcccaggcaccaccagccaagcgtcaggccctggaaacagttccacatccacaaaaccgggggaggttaatgtcaccaaaggcacgcccccccaaaatgcaacgtcgccccaggcccccagtggccaaaagacggcggttcccacggtcacctcaacaggtggaaaggccaattctaccaccggtggaaagcacaccacaggacatggagcccggacaagtacagagcccaccacagattacggcggtgattcaactacgccaagaccgagatacaatgcgaccacctatctacctcccagcacttctagcaaactgcggccccgctggacttttacgagcccaccggttaccacagcccaagccaccgtgccagtcccgccaacgtcccagcccagattctcaaacctctccatgctagtactgcagtgggcctctctggctgtgctgacccttctgctgctgctggtcatggcggactgcgcctttaggcgtaacttgtctacatcccatacctacaccaccccaccatatgatgacgccgagacctatgtataa

SEQ ID NO: 12296 - DNA, 207 bp, unidentified
  misc_feature 1..207: note = Synthetic
  source 1..207: mol_type = other DNA
atgtcaaattcctggtccacaattttcattgtcttccctctcagatgtcaaagaggctccgggtggaagatgacttcaaccccgtctacccctatggctacgcgcggaatcagaatatccccttcctcactcccccctttgtctcctccgatggattccaaaacttcccccctggggtcctgtcactcaaactggctgacccaatag

SEQ ID NO: 12297 - DNA, 390 bp, unidentified
  source 1..390: mol_type = other DNA
  misc_feature 1..390: note = Synthetic
atgcagactctgctcatgctgctatccctcctatcccctgccctcgccacttctgctgactctaaatgcaaattcgcggagatatggaatttcttagattgctatcaggagaaaattgatatgccctcctattacttggtgattgtgggaatagtcatggtctgctcctgcactttctttgccatcatgatctacccctgttttgatctcggctggaactctgttgaggcattcacatacacactagaaagcagttcactagcctccacgccaccgcccacaccgcctccccgcagaaatcagttcccactgattcagtacttagaagagccccctccccggcccccttccactgttagctactttcacataaccggcggcgatgactga

SEQ ID NO: 12298 - DNA, 54 bp, unidentified; identical to SEQ ID NO: 3562
  source 1..54: mol_type = other DNA
  misc_feature 1..54: note = Synthetic

SEQ ID NO: 12299 - DNA, 114 bp, unidentified; identical to SEQ ID NO: 3564
  source 1..114: mol_type = other DNA
  misc_feature 1..114: note = Synthetic

SEQ ID NO: 12300 - DNA, 1044 bp, unidentified
  misc_feature 1..1044: note = Synthetic
  source 1..1044: mol_type = other DNA
ttggtaagcttttcaagagcgtctgtgccgtccattgccggcgtggatatgaaggtgcaggctgaaaatgcggctcgcctgggtaggcaagtgttgggtcttttacctccaccaactcaccgggtatccctcactagaggaccggagtttgccaggggggtgcgggatttactctctaaatatgcggcgtccacacgacccacggttggctcgctgcatgaggccttgcggcaggcgccgtttaggcagccgacctatggagatttcctcgtgtattcacagacctttagtccccaggagcctctgggaacctttttattttcattcaagcaggaggacaacggctcgtctatggatatgctgctaacacccacgtccctgtttatgctctctggaatggaagcggcaaaagcgccacagactcacaaagtggccggtgtgtggtacggaagtggatccggcctggcggatttcatccctaacttgagtgaactcatggacactggggagtttcataccctccttaccccagtaggtccaatggtccagagtgtccacagtaccttcgtgaccaaggtcacctccgccatgaagggagttgggttggcccgggacgagccccgtgcacacgtaggcttgaccctcccttgtgatatgctagttgatttggatgagtcatgtcccatggtccagcgccgggaaccggcaggcctaaacgttactatttatgcctcgttggtttatctccgtgtgaaccagagaccatctatggcgctgacgtttttccagtctgggaagggctttgcggaggttgtggccatgataaaggatcactttacggatgtaatccggaccaagtatattcagctgaggcacgagctgtatataaatcggcttgtttttggggcggtttgtacgctgggcacagttccctttgattctcatccggtgcaccaaagtctgaacgtgaagggcacgtccttgcctgtactggtgtttgcgaactttgaggccgcgtgtggcccctggactgtgtttctgtaa

SEQ ID NO: 12301 - DNA, 1044 bp, unidentified; identical to SEQ ID NO: 12300
  misc_feature 1..1044: note = Synthetic
  source 1..1044: mol_type = other DNA

SEQ ID NO: 12302 - DNA, 1758 bp, unidentified
  misc_feature 1..1758: note = Synthetic
  source 1..1758: mol_type = other DNA
ttgactaagcccagcagtccagacaaccacggcttcggctacacttcccgcatggatcaagatgccctcatttctaaagaagattctgaagttgagagggaggcgtcaggaggacgagagtcgctctcggatgttatcggattcctcgacgcagtcctatcaagtgaaccaactgacatcggaggggacagaagctggctccacaataccatcaacaccctccaaaggccaggctctacccacagagtcaaaggtgagggcgagggagaagtctcgacatcgtcgacccaagataatcgatcaggtgaggagagtagagtctctgggggaacaagcgagccagaggcagaagcacatgctagaaacgttgataaacaaaatatacactgggccactgggagaggagctagtacagactctgtacctcaggatctgggcaatggaagagactccggaatccttgaagatcctccaaatgagggaggatatccgagatcaggtgctgaagatgaaaaccgagagatggctgcgaaccctgataagaggggagaagaccaagctgaaggacttccagaagagatacgaagaagtgcacccctacctgatgaaagagaaggtagagcagataataatggaagaggcgtggagcctggcagcccacatagtgcaagagtgactggagtcttggtgatccccagtcctgagctcgaagaggccgtgctacaaaggaacaagagacgacccgccaacagcgggtccagatctctcaccccagtggtcgtgcctagcactcggtctccaccaccggaccatgacaatagtacaaggtcaccaccaaggaaacccccaaccacgcaggatgagcacaccaaccccaggaacacccccgccgtcaggatcaaggatcggagacccccaacagggactcgctccgccccagaccgcccgaccgacggctatccaacccacccaagtccagagaccgatgcaacaaaaaagggcatagaagagaacacatcatctatgaaagagatggctacattgttaacgagtcttggtgtaatccagtctgctcaagaattcgagtcgtcccgagacgcgagttatgtgtttgcaaagcgtgccctaaaatctgcaaactatgcagagatggcatttaatgtatgcggcttgatcctttctgctgagaaatctttcgccaatagagtagacgagaataaacagctgcttaaacagatccaagaaagtgtagagtcatttcgggacatatacaagagattctctgagtatcagaaggaacagaactcactgctgatgtctaacctatctacccttcatattatcacagacagaggtggcaagactgacaatccagattctcccacaaggtccccctctgtttttgcaaaaacaaaagagaacaagaccaaagcaactaggtttgacccgtctatggagaccatgggggatatgaggtataaaccagacctactccgagaggatgaatttagagaagagatccgcaacccggtgtaccaggaaagagataccgaacccagagcatccaatgcatcacgtctgcttccatcaagagagaagcctacaatacactccctcaagctcgtcatagagagcagtcccctaagcagagctgaaaaggcagcatatgtgaaatcattatccaagtgcaagacagaccaagaagttaaggccgtcatggagcttgtagaagaagacatagaatcactgactaattaa

SEQ ID NO: 12303 - DNA, 648 bp, unidentified
  source 1..648: mol_type = other DNA
  misc_feature 1..648: note = Synthetic
acggcttcggctacacttcccgcatggatcaagatgccctcatttctaaagaagattctgaagttgagagggaggcgtcaggaggacgagagtcgctctcggatgttatcggattcctcgacgcagtcctatcaagtgaaccaactgacatcggaggggacagaagctggctccacaataccatcaacaccctccaaaggccaggctctacccacagagtcaaaggtgagggcgagggagaagtctcgacatcgtcgacccaagataatcgatcaggtgaggagagtagagtctctgggggaacaagcgagccagaggcagaagcacatgctagaaacgttgataaacaaaatatacactgggccactgggagaggagctagtacagactctgtacctcaggatctgggcaatggaagagactccggaatccttgaagatcctccaaatgagggaggatatccgagatcaggtgctgaagatgaaaaccgagagatggctgcgaaccctgataagaggggagaagaccaagctgaaggacttccagaagagatacgaagaagtgcacccctacctgatgaaagagaaggtagagcagataataatggaagaggcgtggagcctggcagcccacatagtgcaagagtga

SEQ ID NO: 12304 - DNA, 252 bp, unidentified
  misc_feature 1..252: note = Synthetic
  source 1..252: mol_type = other DNA
atgtcaaattcctggtccacaattttcattgtcttccctctcagatgtcaaagaggctccgggtggaagatgacttcaatcccgtctacccctatggctacgcgcggaatcaaaatatccccttccttactcccccctttgtctcctccaatggattccaaaacttcccccctggggttctgtcactcaaactggctaacccaatcaccatcaccaatggaaatgtctcactcaaggttggaggtgggctaa

SEQ ID NO: 12305 - DNA, 150 bp, unidentified; identical to SEQ ID NO: 3583
  source 1..150: mol_type = other DNA
  misc_feature 1..150: note = Synthetic

SEQ ID NO: 12306 - DNA, 39 bp, unidentified; identical to SEQ ID NO: 3584
  source 1..39: mol_type = other DNA
  misc_feature 1..39: note = Synthetic

SEQ ID NO: 12307 - DNA, 1059 bp, unidentified
  source 1..1059: mol_type = other DNA
  misc_feature 1..1059: note = Synthetic
ctgacaagcgacgagatggacactgtcattgagctgtccaaacttctgttcaaaggcaatgcttcctgtacctcgacacccacgctaaagacagcacgaatcatggagagcgcagttaccggaatcacgctcaccacatctatccccatgatcattatagtggttaccaccatgattctctaccacagagtcgcaaaacataacgctacttcattttacgtcatcacactctttgctagcgattttgtgctcatgtggtgtgtcttttttatgacagtgaacagaaagcaactgttctcattcaaccgttttttctgtcagttagtttacttcatctatcatgcagtctgttcatatagtataagcatgctagctataatcgcaactatcaggtacaaaaccttacaccggcgtaaaaagactgaaagtaaaacatctagcacggggcgaaacataggaattctcctactagcttcctcaatgtgcgcgattcctaccgctctctttgtgaagactaacggaatgaaaaaaacgggaaaatgcgtcgtttatatatcctcaaagaaagcttacgaactgtttctagcggtgaaaattgtcttcagcttcatttggggagtccttccaaccatggtattcagcttcttctacgttatattttgcaaagctttgcacgacgtcaccgagaaaaaatacaaaaagactctattttttattagaatccttctcctgtcatttttactcatacagatcccctatatagctatccttatatgtgaaatcgcatttctctacatgccgcagaacacctgcttttggttagcccgtgtagagatactgcagttaatcattcgattaatgccacaggtacattgtttctctaacccgttagtctacgcattcactggaggcgaactcagaaaccgatttaccgcctgttttcaatcattttttcccaaaacattatgtagtacacagaaacgcaaggattcagacgcatccgaacatgatcagaactcaaaatcaaaagcgtcagtggaaaaaaaccaacccctttaa

SEQ ID NO: 12308 - DNA, 30 bp, unidentified; identical to SEQ ID NO: 3586
  misc_feature 1..30: note = Synthetic
  source 1..30: mol_type = other DNA

SEQ ID NO: 12309 - DNA, 15 bp, unidentified
  misc_feature 1..15: note = Synthetic
  source 1..15: mol_type = other DNA
atgaatggacactag

SEQ ID NO: 12310 - DNA, 45 bp, unidentified; identical to SEQ ID NO: 613
  misc_feature 1..45: note = Synthetic
  source 1..45: mol_type = other DNA

SEQ ID NO: 12311 - DNA, 54 bp, unidentified; identical to SEQ ID NO: 3590
  misc_feature 1..54: note = Synthetic
  source 1..54: mol_type = other DNA

SEQ ID NO: 12312 - DNA, 90 bp, unidentified
  misc_feature 1..90: note = Synthetic
  source 1..90: mol_type = other DNA
atggctacttcgtcaccaatggggccatcggcacgcgcatggtcatctcagaagacaccaccttcagtttcaacggcatgtacaccctaa

SEQ ID NO: 12313 - DNA, 27 bp, unidentified
  misc_feature 1..27: note = Synthetic
  source 1..27: mol_type = other DNA
gtggcgcagctgctcaggctcatctga

SEQ ID NO: 12314 - DNA, 441 bp, unidentified
  misc_feature 1..441: note = Synthetic
  source 1..441: mol_type = other DNA
atgcgggctttgctacttctcatgcttctactattgctagctcccctggtcgccccctttcccctcaaatcccccacccagtcccccaaagaggttcgaaactgtaaattccaagaaccctggaaattcctcaaatgctaccagctcaaatcagacatgcaccccagctggataattatcatgggaatcgtgaacatccttgcctgcaccttcttttcctttgtgatttacccccgctttgactttggttggaacgcacccgaggcgctctggctcccgcctgatcccgacacaccaccacagcagcagcaaaatcaggcacacgcaccaccaccacagcctaggccccaatacatgcccatcttaaactatgaggccgagccacaacgagccatgcttcctgctattagttacttcaatctaaccggtggagatgactga

SEQ ID NO: 12315 - DNA, 48 bp, unidentified; identical to SEQ ID NO: 3595
  misc_feature 1..48: note = Synthetic
  source 1..48: mol_type = other DNA

SEQ ID NO: 12316 - DNA, 24 bp, unidentified
  source 1..24: mol_type = other DNA
  misc_feature 1..24: note = Synthetic
atgattaagaaaaacttaggatga

SEQ ID NO: 12317 - DNA, 747 bp, unidentified
  source 1..747: mol_type = other DNA
  misc_feature 1..747: note = Synthetic
ttgataagtacgatttgctcgacaacgcacacaacgcatcacgacctagtcagaatgaatggctcagctactggcaactcagctagtcttcccgctcctcagttttccgaatgtgtttttttaccgaaagatacattttgctccttactgaatgctacagctggggcccaaaataaaaacgtaacgccagctgctccgatatttaaaactgatgaatatataactccgtacccagaatctctgagcagaatggattatggaaatagaatgaattatcacataccacctccatattggtatccctctatgcctggatttaattataaatcttatcgtggttcccaaaaacggtgcgctccaacagattcggatgatgaaatgagctttccaggagatcctgactatacgacaaagaaaaagaagcggtatagagaagatgacgatcgtgaactcactaaagacaaaaatgatattaaagaactagttgatgcaatagggatgctgcgtcatgaaatttcagcgctaaagtatattcggtctcagtctcctcagagacagcattgtacagcggtagatacaatgccaacgattgaagaaaaaaacgtggcatcacctaaaccatcggttgtaaatgcctcgctaactccaggtcaagacaggaatcaaaatttgatgcaaagtgatcaatctttattgagtttgaacaaaaaattgtttgtagaagctttgaataaaatggacaattga

SEQ ID NO: 12318 - DNA, 66 bp, unidentified; identical to SEQ ID NO: 3602
  source 1..66: mol_type = other DNA
  misc_feature 1..66: note = Synthetic

SEQ ID NO: 12319 - DNA, 81 bp, unidentified; identical to SEQ ID NO: 3603
  source 1..81: mol_type = other DNA
  misc_feature 1..81: note = Synthetic

SEQ ID NO: 12320 - DNA, 228 bp, unidentified
  misc_feature 1..228: note = Synthetic
  source 1..228: mol_type = other DNA
atgcttgcttccggtgccggccgccggcgcctgtttccgctcgcgctgcttcccgctgagcgcagcacacttgtttttttttctttctctaggagctccgtgctgcggcaaccgcgcccgcgcgctttttgccgctcacagcttcgcgagcccggatcagccccgcgccagcagtccgccgtcgcccggcaggctcccgctgtcgcgcgtcgcggtcgcggagcttaa

SEQ ID NO: 12321 - DNA, 75 bp, unidentified; identical to SEQ ID NO: 1320
  source 1..75: mol_type = other DNA
  misc_feature 1..75: note = Synthetic

SEQ ID NO: 12322 - DNA, 1224 bp, unidentified
  misc_feature 1..1224: note = Synthetic
  source 1..1224: mol_type = other DNA
atgaacttcatcatcaccacccgagacttctccaacgacgattcagtcctgcgagccgccgagatgcgtgacaacgtggcaggctcgatttccaaagcgtacaagggcacggtacgcgccgaaggcaagaagaagctgctgctgaagcacttgcccgtgccgcccggcggctgctcgcgccgcaacagcaacctcttcgttttctgcaccgagcgcgactaccgcaagttccaccagggcatcgcacagctcaagcgcgcgccggccgaactggacccccacgagatccagcaagtcacggccagtatccgctgccgcctgcagcccagtctccgcgagccgcccacgccggccgacgagctgcagacggctgtgtcgcgcgtgtgcgcgctcttcaaccagctggttttcacggcccagctgcgccactactgcgagcaccaggacaaggtggtgagctacgcgcgcgacgagttgaccaaacgctgcggcgaaaaatcggcgctgggcgtagaggtgcatcaactggtagccttgctgccacacgagcgccaccgcgaactgtgccacgtcctcatcggcttgttgcaccagacgccgcacatgtgggcgcgctccatccgtctcatcggacacctgcgccactacctgcagaacagcttcctacacctgttgatgaactcaggtttggatatcgcacaagtcttcgacggctgttaccacagcgaggcctaccgcatgctcttccagatcggtcatacggactcggtgtcggcggccctggaactctcacacagcgcggcggccgggccgcccgaggccgatgagaacaacgacgagggagaggaggacgacgacgagctccgtcacagcgacccggcgccgcttcacgattccaagaagccccgcaacgcccgtcgtccccgcacacgcgtgccgcctcacgagcaaaagcccgaagaaaacgaggaggaagaagaggagctgtttccctcctgcaaggcaaccgcagcattcctgcgggcagaaccctccgtctccaacgacgacggcaacggtggcgaacgctgcgacacgctagcgaccgccctgcggcatcgcgccgacgaagaagacggacctctagccagccagacctctgtgcgagtcgccgcgaccccctcaccttcagtcacctcagcccttacccccgtcacgtcccccataaccccgttgtgtatttaa

SEQ ID NO: 12323 - DNA, 186 bp, unidentified; identical to SEQ ID NO: 3614
  source 1..186: mol_type = other DNA
  misc_feature 1..186: note = Synthetic

SEQ ID NO: 12324 - DNA, 99 bp, unidentified
  source 1..99: mol_type = other DNA
  misc_feature 1..99: note = Synthetic
atggcccattgtatcacccacggcccctgcctctacacagtatattggtatacatggtacacattattatttgtggccattatattattttattcctaa

SEQ ID NO: 12325 - DNA, 90 bp, unidentified; identical to SEQ ID NO: 3617
  misc_feature 1..90: note = Synthetic
  source 1..90: mol_type = other DNA

SEQ ID NO: 12326 - DNA, 1500 bp, unidentified
  misc_feature 1..1500: note = Synthetic
  source 1..1500: mol_type = other DNA
gtgagagtcacgccggcggcgtatgagggtccgcccccttcttacgaaagcgtgatgggatcagcgaacgtgccggccacgctggaggcgccttacgttcctcccagatacctgggacctacggagggcagaaacagcatccgttactccgagctggcacccctgtacgataccaccaaggtgtacctggtggacaacaagtcggcggacatcgcctccctgaattatcaaaacgatcacagcaattttctgactaccgtggtgcagaacaatgacttcaccccgacggaggcgggcacgcagaccattaactttgacgagcgttcccgctggggcggtcagctgaaaaccatcctgcacaccaacatgcccaacatcaacgagttcatgtccaccaacaagttcagggccaggctgatggttaaaaaggctgaaaaccagcctcccgagtacgaatggtttgagttcaccattcccgagggcaactattccgagaccatgactatcgatctgatgaacaatgcgatcgtggacaattacctgcaagtggggaggcagaacggggtattggaaagcgatatcggcgtaaaatttgataccagaaacttccgactggggtgggatcccgtgaccaagctggtgatgccaggcgtgtacaccaacgaggcttttcaccccgacatcgtgctgctgccggggtgcggtgtggacttcactcagagccgtttgagtaacctgttagggatcagaaagcgccgccccttccaagagggctttcagatcatgtatgaggacctggaaggaggtaacattccaggtttgctagacgtgccggcgtatgaagagagtgttaaacaggcggaggcgcagggacgagagattcgaggcgacacctttgccacggaacctcacgaactggtaataaaacctctggaacaagacagtaaaaaacggagttacaacattatatccggcactatgaataccttgtaccggagctggtttctggcttacaactacggggatcccgaaaagggagtgagatcatggaccatactcaccaccacggacgtgacctgcggctcgcagcaagtgtactggtccctgccggatatgatgcaagacccggtcaccttccgcccctccacccaagtcagcaacttcccggtggtgggcaccgagctgctgcccgtccatgccaagagcttctacaacgaacaggccgtctactcgcaactcattcgccagtccaccgcgcttacccacgtgttcaatcgctttcccgagaaccagattctggtgcgccctcccgctcctaccattaccaccgtcagtgaaaacgttcccgccctcacagatcacggaaccctgccgctgcgcagcagtatcagtggagttcagcgcgtgaccatcaccgacgccagacgtcgaacctgtccctacgtttacaaagctcttggcgtagtggctcctaaagtgctctctagtcgcaccttctaa

SEQ ID NO: 12327 - DNA, 894 bp, unidentified
  source 1..894: mol_type = other DNA
  misc_feature 1..894: note = Synthetic
atgagcaagatctttgtcaacccgagtgcaattcgagctggcttagctgaccttgagatggcggaagagacggttgacttagtcaacaaaaacatcgaggacaaccaagctcatctccaaggggagccgattgaggttgatgctcttccagaggatatgagcaagcttcaaatcagtgagaggaggcctgctcagttcaccgacaacacaggcgggaaagaagaaggaagcgatgaggacttctacatggctgaaagcgaagacccttatattcctctacaatcctacctcgagggtgttgggatccaactcgtgagacagatgaagaccggagaaagattcttcaagatatggtcccaggcagtggaggagatcatttcctatgtgaccgttcacttccctatgccgttgggaaaatccactgaagataagtccacccaaactcccgaggagaagttcaaaccaagccctcagcaggcagtcaccaagaaggagagtcaatcatccaaaatcaagacaatctctcaggaatcctcaggtccacctgcgctggaatggtccaccaccaatgatgaagaaaatgcatctgtggaggcagaaatagcgcatcagattgcagagagcttctcaaagaagtacaagttcccatccagatcctctggaatatttctgtttaacttcgaacagctaaagatgaatcttgacgacatcgtgaaagaggctaaaaagattcctggggtggtgcgcctggcacaggatggattcaggctccctctaagatgcatattggggggagtgggttcggtcaattcaaagaagttccaacttttggtcaattcagacaaattgggcaagataatgcaagatgatctcaatcggtatttggcatattga

SEQ ID NO: 12328 - DNA, 48 bp, unidentified; identical to SEQ ID NO: 3624
  source 1..48: mol_type = other DNA
  misc_feature 1..48: note = Synthetic

SEQ ID NO: 12329 - DNA, 2082 bp, unidentified
  misc_feature 1..2082: note = Synthetic
  source 1..2082: mol_type = other DNA
ctgcaaaaagctaaaatggacaaagtgctgaatagggaggaatccatggagcttatggatttattaggccttgataggtctgcatgggggaacattcctgtcatgagaaaagcttatctgaaaaaatgcaaagaactccaccctgataaaggtggggacgaagacaagatgaagagaatgaattttttatataaaaaaatggaacaaggtgtaaaagttgctcatcagcctgattttggtacatggaatagttcagaggtgccaacctatggaacagatgaatgggaatcctggtggaatacatttaatgagaagtgggatgaagacctgttttgccatgaagaaatgtttgccagtgatgatgaaaacacaggatcccaacactctaccccacctaaaaagaaaaaaaaggtagaagaccctaaagactttcctgtagatctgcatgcattcctcagtcaagctgtgtttagtaatagaactgttgcttcttttgctgtgtataccactaaagaaaaagctcaaattttatataagaaacttatggaaaaatattctgtaacttttataagtagacatggttttgggggtcataatattttgtttttcttaacaccacatagacatagagtgtcagcaattaataactactgtcaaaaactatgtacctttagttttttaatttgtaaaggtgtgaataaggaatacttgttttatagtgccctgtgtagacagccatatgcagtagtggaagaaagtattcaggggggccttaaggagcatgactttaacccagaagaaccagaagaaactaagcaggtttcatggaaattagttacacagtatgccttggaaaccaagtgtgaggatgtttttttgcttatgggcatgtacttagactttcaggaaaacccacagcaatgcaaaaaatgtgaaaaaaaggatcagccaaatcactttaaccatcatgaaaaacactattataatgcccaaatttttgcagatagcaaaaatcaaaaaagcatttgccagcaggctgttgatactgtagcagccaaacaaagggttgacagcatccacatgaccagagaagaaatgttagttgaaaggtttaatttcttgcttgataaaatggacttaatttttggggcacatggcaatgctgttttagagcaatatatggctggggtggcctggattcattgcttgctgcctcaaatggacactgttatttatgactttctaaaatgcattgtattaaacattccaaaaaaaaggtactggctattcaaggggccaatagacagtggcaaaactactttagctgcagctttacttgatctctgtgggggaaagtcattaaatgttaatatgccattagaaagattaaactttgaattaggagtgggtatagatcagtttatggttgtatttgaggatgtaaaaggcactggtgcagagtcaagggatttaccttcagggcatggcataagcaaccttgattgcttaagagattacttagatggaagtgtaaaagttaatttagagagaaaacaccaaaacaaaagaacacaggtgtttccacctggaattgtaaccatgaatgaatattcagtgcctagaactttacaggccagatttgtaaggcagatagattttagaccaaaggcctacctgagaaaatcactaagctgctctgagtatttgctagaaaaaaggattttgcaaagtggtatgactttgcttttgcttttaatctggtttaggccagttgctgactttgcagctgccattcatgagaggattgtgcagtggaaagaaaggctggatttagaaataagcatgtatacattttctactatgaaagctaatgttggtatggggagacccattcttgactttcctagagaggaagattctgaagcagaagactctggacatggatcaagcactgaatcacaatcacaatgcttttcccaggtctcagaagcctctggtgcagacacacaggaaaactgcacttttcacatctgtaaaggctttcaatgtttcaaaaaaccaaagacccctcccccaaaataa

SEQ ID NO: 12330 - DNA, 534 bp, unidentified
  misc_feature 1..534: note = Synthetic
  source 1..534: mol_type = other DNA
ctgcaaaaagctaaaatggacaaagtgctgaatagggaggaatccatggagcttatggatttattaggccttgataggtctgcatgggggaacattcctgtcatgagaaaagcttatctgaaaaaatgcaaagaactccaccctgataaaggtggggacgaagacaagatgaagagaatgaattttttatataaaaaaatggaacaaggtgtaaaagttgctcatcagcctgattttggtacatggaatagttcagaggttggttgtgattttcctcctaattctgataccctttattgcaaggaatggcctaactgtgccactaatccttcagtgcattgcccctgtttaatgtgcatgctaaaattaaggcatagaaacagaaaatttttaagaagcagcccacttgtgtggatagattgctattgctttgattgcttcagacaatggtttgggtgtgacttaacccaagaagctcttcattgctgggagaaagttcttggagacaccccctacagggatctaaagctttaa

SEQ ID NO: 12331 - DNA, 48 bp, unidentified; identical to SEQ ID NO: 3627
  misc_feature 1..48: note = Synthetic
  source 1..48: mol_type = other DNA

SEQ ID NO: 12332 - DNA, 177 bp, unidentified
  source 1..177: mol_type = other DNA
  misc_feature 1..177: note = Synthetic
atcggtctctgcgctcgctcacccgcagttgcttgtaccacaaaaacgaagatcagctgcagcgcactcttgaagacgccgaggctttgttccacaagtactgcgcgcttactcttaaagactaaggcgcgcccacccggaaaaaaggcgggaattacctcatcgccagcaccatga

SEQ ID NO: 12333 - DNA, 1500 bp, unidentified
  misc_feature 1..1500: note = Synthetic
  source 1..1500: mol_type = other DNA
ataaaaaacttgggaggcgcaaacggtatgttttccataataaatccgagtgatgatttctggactaaggacaaatatatcatgttgactatcaaaggccccatggagtgggaggcagaaatccctggaatatctacggattttttctgtaaattctctaacgtgtccgtgccacatttcagggatatgcactcaccgggagcgcccgatattaaatggataactgcatgtaccaaaatgatcgatgtcatactcaattactggaataataaaactgccgtccccacccctgcaaagtggtacgctcaagcggagaataaagctggcagaccctccctaatattattgatagctttagatggaattcccagcgcaacgataggaaaacacacaacggaaatcaggggcgtattaattaaagatttcttcgacgggaacgcccctaaaatagatgattggtgcacgtatgccaaaacaaagaagaatggtggcggaacccaggtcttcagtctaagttacatcccctttgcccttcttcaaattattagaccacagttccaatgggcgtggacaaatattaacgaactgggagacgtatgcgatgagatacatcgaaaacacatcatatcccattttaataaaaaacctaatgtcaaacttatgctgtttccaaaggatgggattaacgggatatctttaaaatctaaatttctgggaaccatcgaatggctgtctgatctcggaatagtcacggaagacgcgtggatacgaagagacattagatcatacatgcaattgttgacgctaacacacggggacgtgctaatccatagggctctatctatagctaaaaaaagaataagagcaactaggaaagctatcgattttatagcgcacatagacactgactttcagatttatgaaaacccggtttaccagctgttctgtctgcagtcttttgaccctatattagcaggaaccatattatatcagtggctaagccacagaggaggaaaaaaaaacaccgttagttttatcggtccacccggatgtggaaaatcgatgttaacgggagccattcttgaaaacatcccgttacatggaatattacatggatctctgaatacaaaaaatttaagagcttacggacaggttttagtcttgtggtggaaagacataagtatcaactttgacaattttaatattataaaatccctccttggaggtcaaaaaataatatttccgattaatgaaaacgaccatgtacagataggaccgtgtcccatcatagccacatcttgcgttgatatacgctcgatggtacattccaatctccacaaaataaatctatcacagagggtatataattttacatttgataaagtcatccctcgcaattttcctgtaattcagaaagacgacataaatcaatttctgttttgggccaggaaccgttctataaattgttttattgactacacggttccgaaaattttataa

SEQ ID NO: 12334 - DNA, 36 bp, unidentified; identical to SEQ ID NO: 3630
  misc_feature 1..36: note = Synthetic
  source 1..36: mol_type = other DNA

SEQ ID NO: 12335 - DNA, 1494 bp, unidentified
  source 1..1494: mol_type = other DNA
  misc_feature 1..1494: note = Synthetic
atcttggaaggcacaaacggtatgttttccataataaatccaagtgatgatttttggactaaggacaaatatatcatgttgactatcaaaggccccgtggagtgggaggcagaaatccctggaatatctacggattttttttgcaaattctctaacgtgcccgtgccacattttagagatatgcactcaccgggagcgcccgatattaaatggataactgcatgtaccaaaatgatcgatgtcatactcaattactggaataataaaactgccgtccccacccctgcaaagtggtacgctcaagcggagaataaagctggcagaccctccttaacattattgatagctttagatggaattcccaccgcaacgataggaaaacacacaacggaaatcaggggtgtattaattaaagatttcttcgacgggaacgcccctaaaatagatgattggtgcacgtatgccaaaacaaagaaaaatggtggcggaacccaggtcttcagtctaagttatatcccctttgcccttcttcaaattattagaccacagttccaatgggcatggacaaatattaacgaactgggagacgtatgcgatgaaatacatcgaaaacacatcatatcccatttcaataaaaaacctaatgttaaacttatgctgtttccaaaggatgggaccaacagaatatctttaaaatctaaatttctgggaaccatcgaatggctgtctgatcttggaatagtcacggaagacgcgtggatacgaagagacgttagatcatacatgcaattattgacactaacacacggggacgtgctaattcatagggctctatctatatctaaaaaaagaataagagcaactagaaaagctatcgattttatagcgcacatagacactgactttgaaatctatgaaaacccggtttaccagttgttctgtctgcagtcttttgaccctatattagcaggaaccatattatatcagtggctaagccacagaagagggaaaaaaaacaccgttagttttattggtccacccggatgtggaaaatcgatgttaacgggagccattcttgaaaatatcccgttacatggaatattacacggatctttgaatactaaaaatttaagagcttacggacaggttttagtcttgtggtggaaagacataagtatcaactttgaaaattttaatattataaaatccctccttgggggtcaaaaaataatattcccaattaatgaaaacgaccacgtacagataggaccgtgtcccatcatagccacatcttgcgttgatatacgctcgatggtacattcaaatatccacaaaataaatctatcacagagggtatataattttacatttgataaagttatccctcgcaattttcctgtaattcagaaagacgacataaatcaatttctgttctgggccagaaaccgttctataaattgttttattgactacacggttccaaaaattttataa

SEQ ID NO: 12336 - DNA, 222 bp, unidentified
  source 1..222: mol_type = other DNA
  misc_feature 1..222: note = Synthetic
atatctcctcttccatcaccaaaaaagttaatagcgttaactatcaaacaaactgctgaagtggtaggtcatactccatcaatttcaaaaagagcttatatggcaacgactattttagaaatggtaaaggataaaaattttttagatgtagtatctaaaactacgttcgatgaattcctatctatagtcgtagatcacgttaaatcatctacggatggatga

SEQ ID NO: 12337 - DNA, 222 bp, unidentified; identical to SEQ ID NO: 12336
  source 1..222: mol_type = other DNA
  misc_feature 1..222: note = Synthetic

SEQ ID NO: 12338 - DNA, 192 bp, unidentified
  source 1..192: mol_type = other DNA
  misc_feature 1..192: note = Synthetic
atagcgttaactatcaaacaaactgctgaagtggtaggtcatactccatcaatttcaaaaagagcttatatggcaacgactattttagaaatggtaaaggataaaaattttttagatgtagtatctaaaactacgttcgatgaattcctatctatagtcgtagatcacgttaaatcatctacggatggatga

SEQ ID NO: 12339 - DNA, 78 bp, unidentified; identical to SEQ ID NO: 3636
  source 1..78: mol_type = other DNA
  misc_feature 1..78: note = Synthetic

SEQ ID NO: 12340 - DNA, 837 bp, unidentified
  source 1..837: mol_type = other DNA
  misc_feature 1..837: note = Synthetic
atggcatccggcaagcaccatcagcccggggggacgcggagcctgaccatgcaaaaagtaagcctgcgcgtgaccccccgcctggtgctggaagttaaccgccataacgccatctgcgtggccaccaacgtccctgagttctacaatgccaggggggaccttaacgtccgagacctccgggcccacgtcaaggcccggatgatctcgtcccagttttgcggctacatcctcgtgagtctgctggactccgaggaccaggtcgaccacctcaacatattcccccacgtgttctccgagaggatgatcctgtacaaacccaacaatgtgaaccttatggagatgtgcgccctgctctcgatgattgagaatgccaagagcccctccataggcctctgccgggaggtgctgggtcgcctgaccctcttgcactccaagtgcaacaatctggactctctgtttctgtacaacggggccaggacgctgctgtccaccctggtcaagtaccacgacctggaggagggggctgccacccccgggccgtggaatgagggcctgagtctctttaagctgcacaaggagctgaagcgcgccccatccgaagcccgggacctcatgcagagcctctttttgacctcggggaagatggggtgcctggccaggtcacccaaggattactgcgcggatctaaacaaggaggaagatgccaactcgggcttcacatttaacctgttttatcaagattctttattgaccaagcatttccagtgccagactgtcctccagaccttgagacgcaagtgcctcgggagtgacacggtctcaaaaataattccctag

SEQ ID NO: 12341 - DNA, 78 bp, unidentified; identical to SEQ ID NO: 3639
  source 1..78: mol_type = other DNA
  misc_feature 1..78: note = Synthetic

SEQ ID NO: 12342 - DNA, 837 bp, unidentified
  source 1..837: mol_type = other DNA
  misc_feature 1..837: note = Synthetic
atggcatccggcaagcaccatcagcccggggggacacggagcctgaccatgcaaaaagtaagcctgcgcgtgaccccccgcctggtgctggaagttaaccgccataacgccatctgcgtggccaccaacgtccctgagttctacaatgccaggggggaccttaacatccgagacctccgggcccacgtcaaggcccggatgatctcgtcccagttttgcggctacgtcctcgtgagtctgctggactccgaggaccaggtcgaccacctcaacatattcccccacgtgttctccgagaggatgatcctgtacaaacccaacaatgtgaaccttatggagatgtgcgccctgctctcgatgattgagaatgccaagagcccctccataggcctctgccgggaggtgctgggtcgcctgaccctcttgcactccaagtgcaacaatctggactctctgtttctgtacaatggggccaggacgctgctgtccaccctggtcaagtaccacgacctggaggagggggctgccacccccgggccgtggaatgagggcctgagtctctttaagctgcacaaggagctgaagcgcgccccatccgaagcccgggacctcatgcagagcctctttctgacctcggggaagatggggtgcctggccaggtcacccaaggattactgcgcggatctaaacaaggaggaagatgccaactcgggcttcacatttaacctgttttatcaagattctttattgaccaagcatttccagtgccagaccgtcctccagaccttgagacgcaagtgcctcgggagtgacacggtctcaaaaataattccctag

SEQ ID NO: 12343 - DNA, 78 bp, unidentified; identical to SEQ ID NO: 3641
  misc_feature 1..78: note = Synthetic
  source 1..78: mol_type = other DNA

SEQ ID NO: 12344 - DNA, 837 bp, unidentified
  misc_feature 1..837: note = Synthetic
  source 1..837: mol_type = other DNA
atggcatccggcaagcaccatcagcccggggggacgcggagcctgaccatgcaaaaagtaagcctgcgcgtgaccccccgcctggtgctggaagttaaccgccataacgccatctgcgtggccaccaacgtccctgagttctacaatgccaggggggaccttaacatccgagacctccgggcccacgtcaaggcccggatgatctcgtcccagttttgcggctacgtcctcgtgagtctgctggactccgaggaccaggtcgaccacctcaacatattcccccacgtgttctccgagaggatgatcctgtacaaacccaacaatgtgaaccttatggagatgtgcgccctgctctcgatgattgagaatgccaagagcccctccataggcctctgccgggaggtgctgggtcgcctgaccctcttgcactccaagtgcaacaatctggactctctgtttctgtacaatggggccaggacgctgctgtccaccctggtcaagtaccacgacctggaggagggggctgccacccccgggccgtggaatgagggcctgagtctctttaagctgcacaaggagctgaagcgcgccccatccgaagcccgggacctcatgcagagcctctttctgacctcggggaagatggggtgcctggccaggtcacccaaggattactgcgcggatctaaacaaggaggaagatgccaactcgggcttcacatttaacctgttttatcaagattctttattgaccaagcatttccagtgccagaccgtcctccagaccttgagacgcaagtgcctcgggagtgacacggtctcaaaaataattccctag

SEQ ID NO: 12345 - DNA, 54 bp, unidentified; identical to SEQ ID NO: 3643
  source 1..54: mol_type = other DNA
  misc_feature 1..54: note = Synthetic

SEQ ID NO: 12346 - DNA, 153 bp, unidentified
  source 1..153: mol_type = other DNA
  misc_feature 1..153: note = Synthetic
atggtgcgcggcaccacgcggtacatggacagcagcgaacgcgggaacttgaccttggcgccggcgacgaccagcaggaagtcttcgcgcgagacgctgccggcgcagacggcgtcctcgtcgaagaggttctcgaagagggcgttcatttag

SEQ ID NO: 12347 - DNA, 96 bp, unidentified
  source 1..96: mol_type = other DNA
  misc_feature 1..96: note = Synthetic
ttgaatcaattgtttgctccgctccctatgtgcgccgtcgtgtcttggggcgtgtgttcccctccccgtggaacccaacatggagtacgcgtctga

SEQ ID NO: 12348 - DNA, 96 bp, unidentified; identical to SEQ ID NO: 12347
  source 1..96: mol_type = other DNA
  misc_feature 1..96: note = Synthetic

SEQ ID NO: 12349 - DNA, 45 bp, unidentified; identical to SEQ ID NO: 3648
  misc_feature 1..45: note = Synthetic
  source 1..45: mol_type = other DNA

SEQ ID NO: 12350 - DNA, 24 bp, unidentified
  misc_feature 1..24: note = Synthetic
  source 1..24: mol_type = other DNA
atgattcctattgtcttatattaa

SEQ ID NO: 12351 - DNA, 102 bp, unidentified; identical to SEQ ID NO: 3651
  source 1..102: mol_type = other DNA
  misc_feature 1..102: note = Synthetic

SEQ ID NO: 12352 - DNA, 102 bp, unidentified; identical to SEQ ID NO: 3652
  source 1..102: mol_type = other DNA
  misc_feature 1..102: note = Synthetic

SEQ ID NO: 12353 - DNA, 102 bp, unidentified; identical to SEQ ID NO: 3652
  source 1..102: mol_type = other DNA
  misc_feature 1..102: note = Synthetic

SEQ ID NO: 12354 - DNA, 189 bp, unidentified; identical to SEQ ID NO: 3655
  misc_feature 1..189: note = Synthetic
  source 1..189: mol_type = other DNA

SEQ ID NO: 12355 - DNA, 570 bp, unidentified
  source 1..570: mol_type = other DNA
  misc_feature 1..570: note = Synthetic
atggataaaactactttatcagtaaacgcatgcaatttagaatacgttagagaaaaggctatagtaggcgtacaagcagccaagacatcaacacttatattttttgttattatattggcaattagtgcgctattactctggtttcagacgtctgataatccagtctttaatgaattaacgagatatatgcgaattaaaaatacggttaacgattggaaatcattaacggatagcaaaacaaaattagaaagtgatagaggtagacttctagccgctggtaaggatgatatattcgaattcaaatgtgtggatttcggcgcctattttatagctatgcgattggataagaaaacatatctgccgcaagctattaggcgaggtactggagacgcgtggatggttaaaaaggcggcaaaagtcgatccatctgctcaacaattttgtcagtatttgataaaacacaagtctaataatgttattacttgtggtaatgagatgttaaatgaattaggttatagcggttattttatgtcaccgcattggtgttccgatcttagtaatatggaataa

SEQ ID NO: 12356 - DNA, 570 bp, unidentified
  source 1..570: mol_type = other DNA
  misc_feature 1..570: note = Synthetic
atggataaaactactttatcagtaaacgcgtgtaatttagaatacgttagagaaaaggctatagtaggcgtacaagcagccaagacatcaacacttatattctttgttattatattggcaattagtgcgctattactctggtttcagacgtctgataatccagtctttaatgaattaacgagatatatgcgaattaaaaatacggttaacgattggaaatcattaacggatagtaaaacaaaattagaaagtgatagaggtagacttctagccgctggtaaggatgatatattcgaattcaaatgtgtggattttggtgcctattttatagctatgcgattggataagaaaacatatctaccgcaagctattaggcgaggtactggagacgcgtggatggttaaaaaggcggcaaaggttgatccatctgctcaacaattttgtcagtatttgataaaacacaagtctaataatgttattacttgtggtaatgagatgttaaatgaattaggttatagcggttattttatgtcgccacattggtgttccgatcttagtaatatggaatag

SEQ ID NO: 12357 - DNA, 570 bp, unidentified
  misc_feature 1..570: note = Synthetic
  source 1..570: mol_type = other DNA
atggataaaactactttatcggtaaacgcgtgtaatttagaatacgttagagaaaaggctatagtaggcgtacaagcagccaaaacatcaacacttatattctttgttattatattggcaattagtgcgctattactctggtttcagacgtctgataatccagtctttaatgaattaacgagatatatgcgaattaaaaatacggttaacgattggaaatcattaacggatagcaaaacaaaattagaaagtgatagaggtagacttctagccgctggtaaggatgatatattcgaattcaaatgtgtggatttcggcgcctattttatagctatgcgattggataagaaaacatatctgccgcaagctattaggcgaggtactggagacgcgtggatggttaaaaaggcggcaaaggtcgatccatctgctcaacaattttgtcagtatttgataaaacacaagtctaataatgttattacttgtggtaatgagatgttaaatgaattaggttatagcggttattttatgtcaccgcattggtgttccgattttagtaatatggaatag

SEQ ID NO: 12358 - DNA, 570 bp, unidentified
  source 1..570: mol_type = other DNA
  misc_feature 1..570: note = Synthetic
atggataaaactactttatcggtaaacgcgtgtaatttagaatacgttagagaaaaggctatagttggcgtacaagcagccaagacatcaacacttatattctttgttattatcttggcgattagtgcgctattactctggtttcagacgtctgataatccagtctttaatgaattaacgagatatatgcgaattaaaaatacggttaacgattggaaatcattaacggatagcaaaacaaaattagaaagtgatagaggtagacttctagccgctggtaaggatgacatattcgacttcaaatgtgtggatttcggcgcctattttatagctatgcgattggataaaaaaacatatctgccgcaagctattaggcgaggcactggagacgcgtggatgattaaaaaggcggcaaaggtcgatccatctgctcaacaattttgtcagtatttgataaaacacaagtctaataatgttattacttgtggtaatgagatgttaaatgaattaggttatagcggttattttatgtcaccgcattggtgttccgatcttagtaatatggaatag

SEQ ID NO: 12359 - DNA, 132 bp, unidentified; identical to SEQ ID NO: 3661
  misc_feature 1..132: note = Synthetic
  source 1..132: mol_type = other DNA

SEQ ID NO: 12360 - DNA, 453 bp, unidentified
  misc_feature 1..453: note = Synthetic
  source 1..453: mol_type = other DNA
atggaaaggaacagtctgttagtctgtcagctattatgtctggtggcgcgcgcggcagcaacgagtactgctcagactacactgccctccaccgttaacagcaccgcaacaggagttacctctgactctcaacagaacacaactcagctgcctgcttcttctgctgctgccttaagtcttccatctgcgtcagcggtgcaagcccattccccgagctcattttcagacacataccctaccgccacggccttgtgcggcacactggtggtggtgggcatcgtgctgtgcctaagtctggcctccactgttaggagcaaggagctgccgagcgaccatgagccgctggaggcatgggagcagggctcggatgtggaagctccgccgctaccggagaagagcccatgtccggaacacgtacccgagattcgcgtggagatcccacgctatgtttaa

SEQ ID NO: 12361 - DNA, 24 bp, unidentified
  misc_feature 1..24: note = Synthetic
  source 1..24: mol_type = other DNA
atgtattgcgccaaatataaataa

SEQ ID NO: 12362 - DNA, 150 bp, unidentified
  misc_feature 1..150: note = Synthetic
  source 1..150: mol_type = other DNA
acggaactcttttccccggagatgacgatcttgcaattccagcaactgaatttttctctacaaaggctgctaaaaatccagagactaaacgcgaagcaattgttaaagcctatggagacgacaatgaggaaactctcaaacaacggctaa

SEQ ID NO: 12363 - DNA, 2553 bp, unidentified
  source 1..2553: mol_type = other DNA
  misc_feature 1..2553: note = Synthetic
atggagatgaatttgttacagaaactatgcgtagtgtgttcgaaatgcaacgaatacgccatggagctggagtgtctaaagtactgcgatccgaacgtgttactggcggagtccacgccgttcaagagaaacgcggcggctatagtgtatctgtaccggaagatctacccggaggtggtggcgcagaatcgtacgcagagttcgctgctgactctctatctggagatgctgctgaaggcgctgcacgaggatacggctttgctggatcgggcgctgatggcctactcgcgccagccggaccgggcggccttctaccgtaccgtcctccgtttggatcgctgcgatcgccatcacaccgtggagctccagtttacggacaacgtccgtttcagcgtcagtctggccacactcaacgacatcgagcgcttcctgtgcaaaatgaactacgtgtacgggatcctggcgccggaggccggcctggaggtctgcgcgcagctgctggagctcctccgtcgcctatgcggcatctcgccggtggcgcgtcaggaagtgtacgtcgaagggacgacatgcgcccaatgctacgaggagctgaccatcatcccgaatcagggccgctcgctgaacaagcggctgcagggcttgctgtgcaaccatatagcggtccaccgtccgtcaagccagtccgatgtgaatatccagacggtggagcaggacctgctggacctgacaacgcgcatcccccacttggctggagtcctttcggccctcaaaagcctattctcttcttcatcggcctaccacagctacatccaggaggcggaggaggcgctgagggagtacaacctgtttacggatataccggaacgaatatattccttgtcggattttacctactggtcccgtacctcggaggttatcgtcaagcgggtgggcatcaccatccagcagctaaatgtgtatcaccagctgtgccgggcgctcatgaacggcatcagtcgccatctgtacggggaggacgtggaggacatcttcgtgctcggggaaaaggcgttggacggggaggagcgcatgttcgtggggtcggtctttgccgcccccaacaggatcatcgacctcatcacatccctcagcattcaagctttcgaggacaacccggtgttcaacaagctccacgaaagcaacgagatgtacaccaaaatcaagcatattctcgaggagattcgacgtccgctgcccgatggcacggggggcgacggccccgagggcgaggttattcacctgcgtggacgggaggcgatgtcggggacgggtacgactttgatgacggccagcaacagcagcaacagcagtactcacagtcagaggaataacggtggcggcggccgggcccgtggaggaggcaagaaagctgtagggggaggggcgaatgggcaggacggcgacggcagcgaaaacggcttacgggtgcgcaactgcgacgaacacgaagctctcgacttggtggacgcgcgttcccgcatccacaacgtcacccgcgaggtgaacgtgcgcaaacgcgcctacctgcagaaggtctcggaggtgggctatggcaaggtgatccgttgcatcaaaacgcaggagcgtctgactagcaaactcatcgatgtcaacctagtggggcccttgtgtctggactttatctctaagctcatgaatgggtttctataccgcagccaataccaccaggaccaagacgtggtggacgtggggaatcagttcacgtacgatgagcacctgtatgtggtcaataacctgatccacaagagtctgcctgtggaatccctcccgctactgggtcagcagatctacgagttgtgtaacgggcccctcttcacacactgtaccgatcgctatcccctctctcacaatgtggacatggcctatgcctgcgacaacgcgggcgtactaccccacgtcaaggacgatttggtcaaatgcgcggaaggtaccgtgtatcccagtgagtggatggtggtgaagtacatgggttttttcaatttttcggactgtcaggacctaaacgtgctgcagaaggagatgtggatgcacgtgcgggagctcgtgctctccgtcgcactatataatgaaactttcgggaaacaactctcgatcgcgtgcctgcgcgacgaactgcacccggacagagatgtgattctcacgtataacaaagagtggccgctgctgcttcgtcacgaaggaagtctttataagtccaaagatctatatctcctcctctacaggcatctgtccagaccggatgagagtggcgacgtgccaacagctcccgtggccaagccctccaccctgacggccgccgcggccgtctcgggtgccttcagggagccggaccgaccttggctgccaagtccgtacccctcctcctcgaccgcgggcgtttcccggagggtccgcgcaacacgcaagagaccacgacgcgcctcatcgctgctggatttggcccgcgacgaacatggaatccaggatctggtgcctggtagtctgcgttaa

SEQ ID NO: 12364 - DNA, 33 bp, unidentified; identical to SEQ ID NO: 3675
  misc_feature 1..33: note = Synthetic
  source 1..33: mol_type = other DNA

SEQ ID NO: 12365 - DNA, 33 bp, unidentified; identical to SEQ ID NO: 3675
  misc_feature 1..33: note = Synthetic
  source 1..33: mol_type = other DNA

SEQ ID NO: 12366 - DNA, 159 bp, unidentified; identical to SEQ ID NO: 3677
  source 1..159: mol_type = other DNA
  misc_feature 1..159: note = Synthetic

SEQ ID NO: 12367 - DNA, 639 bp, unidentified
  source 1..639: mol_type = other DNA
  misc_feature 1..639: note = Synthetic
atgcaactttttcacctctgcctaatcatctcttgttcatgtcctactgttcaagcctccaagctgtgccttgggtggctttggggcatggacatcgacccttataaagaatttggagctactgtggagttactctcgtttttgccttctgacttctttccttcagtacgagatcttctagataccgcctcagctctgtatcgggaagccttagagtctcctgagcattgttcacctcaccatactgcactcaggcaagcaattctttgctggggggaactaatgactctagctacctgggtgggtgttaatttggaagatccagcgtctagagacctagtagtcagttatgtcaacactaatatgggcctaaagttcaggcaactcttgtggtttcacatttcttgtctcacttttggaagagaaacagttatagagtatttggtgtctttcggagtgtggattcgcactcctccagcttatagaccaccaaatgcccctatcctatcaacacttccggagactactgttgttagacgacgaggcaggtcccctagaagaagaactccctcgcctcgcagacgaaggtctcaatcgccgcgtcgcagaagatctcaatctcgggaatctcaatgttag

SEQ ID NO: 12368 - DNA, 723 bp, unidentified
  source 1..723: mol_type = other DNA
  misc_feature 1..723: note = Synthetic
atggacaagttggatctagtcaatgatggcctcgatattattgactttattcagaagaaccaaaaagaaatacaaaagacatacggacgatcaagcatccaacaaccaagtaccaaagacaggacaagagcatgggaggacttcttgcagagcaccagtggagaacatgaacaggctgaggggggaatgcctaagaatgatggaggtactgaaggaagaaatgtggaggatctatccagtgttacttcctcagatggaactattggacaaagagtgtcaaacacccgagcttgggcagaagacccagatgacatacaactggacccaatggttacagacgttgtataccatgatcatggaggagaatgtaccggacatggaccttcttcaagccctgagagagggtggagttatcacatgtcaggaacacacgatgggaatgtacgtgctgtacctgatacaaaggtgttgcccaatgctcccaaaactacagttcctgaagaagttagggaaattgatttaattgggttggaggacaaatttgcatcagcgggattaaatccagctgcagttccctttgtccccaagaatcaatcaaccccaactgaggagcctccagtcatcccggagtattactatggatctgggaggagaggagatctctcaaaatctcctcctagaggtaatgtcaatctggacagcatcaagatttacacttcggac

SEQ ID NO: 12369 - DNA, 498 bp, unidentified
  source 1..498: mol_type = other DNA
  misc_feature 1..498: note = Synthetic
atggcctcgatattattgactttattcagaagaaccaaaaagaaatacaaaagacatacggacgatcaagcatccaacaaccaagtaccaaagacaggacaagagcatgggaggacttcttgcagagcaccagtggagaacatgaacaggctgaggggggaatgcctaagaatgatggaggtactgaaggaagaaatgtggaggatctatccagtgttacttcctcagatggaactattggacaaagagtgtcaaacacccgagcttgggcagaagacccagatgacatacaactggacccaatggttacagacgttgtataccatgatcatggaggagaatgtaccggacatggaccttcttcaagccctgagagagggtggagttatcacatgtcaggaacacacgatgggaatgtacgtgctgtacctgatacaaaggtgttgcccaatgctcccaaaactacagttcctgaagaagttagggaaattgatttaa

SEQ ID NO: 12370 - DNA, 327 bp, unidentified
  source 1..327: mol_type = other DNA
  misc_feature 1..327: note = Synthetic
ttgtctgcaaaactccctctaccattcacaatggggaaagcccagtccaaacaaaaccacatagcccaaggctctgagcccaggacggagctgatacctgacgcctcaggctatgggcctgagttctgcaaaagctgctggtttgagagaaggggtcttgtcaaatgttatgaccattatttatgcatgaattgtctgacattgcttcttacaatctccgacagatgcccaatctgcaagtatcctctgccaacaaaactgcagatcaacaaaacaccaaccgctcccaaagagtcggccagcaatcccccgccgtacagtccctga

SEQ ID NO: 12371 - DNA, 90 bp, unidentified
  misc_feature 1..90: note = Synthetic
  source 1..90: mol_type = other DNA
acgcctcaggctatgggcctgagttctgcaaaagctgctggtttgagagaaggggtcttgtcaaatgttatgaccattatttatgcatga

SEQ ID NO: 12372 - DNA, 24 bp, unidentified
  source 1..24: mol_type = other DNA
  misc_feature 1..24: note = Synthetic
atgtgttgcaccaaatataaataa

SEQ ID NO: 12373 - DNA, 150 bp, unidentified
  source 1..150: mol_type = other DNA
  misc_feature 1..150: note = Synthetic
acggaactcttttccccggagatgacgatcttgcaattccagcgactgaatttttctctacaaaggctgctaagaagccagaggctaaacgcgaagcaattgttaaagctgagggagatgacaatgaagaaactctcaaacaacgactaa

SEQ ID NO: 12374 - DNA, 24 bp, unidentified
  misc_feature 1..24: note = Synthetic
  source 1..24: mol_type = other DNA
atgtgttgcaccaaatataaataa

SEQ ID NO: 12375 - DNA, 105 bp, unidentified
  source 1..105: mol_type = other DNA
  misc_feature 1..105: note = Synthetic
ctgaatttttctctacaaaggctgctaaaaagccagaggctaaacgcgaagcaattgttaaagccgatggagacaataatgaggaaactctcaaacaacggctaa

SEQ ID NO: 12376 - DNA, 42 bp, unidentified; identical to SEQ ID NO: 2370
  misc_feature 1..42: note = Synthetic
  source 1..42: mol_type = other DNA

SEQ ID NO: 12377 - DNA, 699 bp, unidentified
  source 1..699: mol_type = other DNA
  misc_feature 1..699: note = Synthetic
aggaactcaacccgtccacactctccgtcgaagcagcccccccgagacatgccgcccaagggaaccgccaagcagctgatcgctcggcagagagcgaagaagcaagagctgctccagcagcaggtggaggacgaggaagagatgtgggacagccaggcagaggaggtgtcagaggacgaggaggagatggaaagctgggacagcctagacgaggaggaggacgagctttcagaggaagaggcgaccgaagaaaaaccacctgcatccagcgcgccttctctgagccgacagccgaagccccggcccccgacgcccccggccggctcactcaaagccagccgtaggtgggacgccaccgaatctccagcggcagcggcaacggcagcggcccctacgaaacgctcggagaaaaaagctaaggcctcctccgccgcgaggaaaaactccgccgccgctgccgccgccaaggatccaccggccaccgaagagctgagaaagcgcatctttcccactctgtatgctatctttcagcaaagccgcgggcagcaccctcagcgcgaactgaaaataaaaaaccgctccttccgctcgctcacccgcagctgtctgtaccacaagagagaagaccagctgcagcgcaccctggacgacgccgaagcactgttcagcaaatactgctcagcgtctcttaaagactaa

SEQ ID NO: 12378 - DNA, 594 bp, unidentified
  misc_feature 1..594: note = Synthetic
  source 1..594: mol_type = other DNA
aggaactcaacccgtccacactctccgtcgaagcagcccccccgagacatgccgcccaagggaaccgccaagcagctgatcgctcggcagagagcgaagaagcaagagctgctccagcagcaggtggaggacgaggaagagatgtgggacagccaggcagaggaggtgtcagaggacgaggaggagatggaaagctgggacagcctagacgaggaggaggacgagctttcagaggaagaggcgaccgaagaaaaaccacctgcatccagcgcgccttctctgagccgacagccgaagccccggcccccgacgcccccggccggctcactcaaagccagccgtaggtgggacgccaccgaatctccagcggcagcggcaacggcagcgggtaaggccaaacgcgagcggcgggggtattgctcctggcgggcccacaaaagcagtattgtgaactgcttgcaacactgcgggggaaacatctcctttgcccgacgctacctcctcttccatcacggtgtggccttccctcgcaacgttctctattattaccgtcatctctacagcccctacgaaacgctcggagaaaaaagctaa

SEQ ID NO: 12379 - DNA, 105 bp, unidentified
  misc_feature 1..105: note = Synthetic
  source 1..105: mol_type = other DNA
aagagctgctccagcagcaggtggaggacgaggaagagatgtgggacagccaggcagaggaggtgtcagaggacgaggaggagatggaaagctgggacagcctag

SEQ ID NO: 12380 - DNA, 105 bp, unidentified; identical to SEQ ID NO: 12379
  source 1..105: mol_type = other DNA
  misc_feature 1..105: note = Synthetic

SEQ ID NO: 12381 - DNA, 24 bp, unidentified
  source 1..24: mol_type = other DNA
  misc_feature 1..24: note = Synthetic
atgtgttgtaccaaatataaataa

SEQ ID NO: 12382 - DNA, 165 bp, unidentified
  source 1..165: mol_type = other DNA
  misc_feature 1..165: note = Synthetic
ctgtactttaaatggacggaactcttttccccggagatgacgatcttgcaattccagcaactgaatttttttctacaaaggctgctaaaaagccagaggctaaacgcgaagcaattgttaaagccgatgaagacgacaatgaggaaactctcaaacaacggctaa

SEQ ID NO: 12383 - DNA, 897 bp, unidentified
  source 1..897: mol_type = other DNA
  misc_feature 1..897: note = Synthetic
ctggcctatgcttcacaacacgggcccgttgtgtttgacaccgtacgccaaattgccataaagactgcccaaggagagggactggtgcttgttaacaccaattacgaccaggctctcgccacctacaatgcttggttcataggtggtacagtacctgacccagtgggtcacactgaaggaacccacaaaatagtgtttgagatggagggcaatggctccaacccagagccaaagcagagcaacaacccgatggtcgttgacccgcctggcacaacaggtccgaccacatcccacgttgttgttgctaatccggagcaacccaatggggccgcacagcgcctggagttggctgttgccactggtgcaatccaatccaatgtccctgaggcaatacgcaactgctttgcagtctttcgtacttttgcttggaacgacaggatgcccacgggaacttttcttggatctatatcgcttcatcccaacattaacccgtacactgctcacctctctgggatgtgggccgggtggggcggtagttttgaggtccggctatcgatctctggttctggcgtgttcgctgggcgtatcattgcttctgtcataccaccaggggttgatccctcgtccatcagggacccaggcgtgttgcctcacgctttcgttgatgctcgcatcactgagccagtttctttcatgatccctgatgttagagcagtggactaccataggatggacggtgctgagcccacttgctcattaggattttgggtttaccaaccattgctcaacccgttttccaccaccgccgtttcaacatgttgggtgtcagtagagactaaaccaggcggtgattttgatttctgcctactaaggccaccaggtcaacagatggagaat

SEQ ID NO: 12384 - DNA, 21 bp, unidentified
  misc_feature 1..21: note = Synthetic
  source 1..21: mol_type = other DNA
atggtgtttaacaaagtttga

SEQ ID NO: 12385 - DNA, 207 bp, unidentified
  misc_feature 1..207: note = Synthetic
  source 1..207: mol_type = other DNA
ttgagacaggcaaagagtatgtgtactggtattggccaaactttaccttctgaagacatagttaaactatatccttggctcggcaaatacctaaccggaacatggtctgacaaaggtggcgtatttggatcttcaggaagcacttcagaagtctggagcggtgctagcgagcaggaaaaagcattcttttgtgttgcaaaactttaa

SEQ ID NO: 12386 - DNA, 87 bp, unidentified
  misc_feature 1..87: note = Synthetic
  source 1..87: mol_type = other DNA
atgcgggcatgtccctggagtgcgaccacatccacattccgaagcagtcgttgtcgtgcgcggtctgcagctcgctcctcagcataa

SEQ ID NO: 12387 - DNA, 2028 bp, unidentified
  source 1..2028: mol_type = other DNA
  misc_feature 1..2028: note = Synthetic
atggaatcgcccgcgtgcgcgtcagatttttttaacgcaaagttcgacctggtcccgggctacgacaatgcgggcatgtccctggagtgcgaccacatccacattccgaagcagtcgttgtcgtgcgcggtctgcagctcgctcctcagcataaaccgcgaggacatggtttccgccggggcgcgcgcccagcggcccgtgcgcagctcttcgcagcgaagatcctcgaggaggtccaggtcttcgtcttcctccagccgcggcagcgccgcgcgcccgtcgtccgcgcgccctggctcgcgccagtccggcagcgccgcgcagtcgtcttccgacagcgtgctcatgcctgtggaccgcatgacctccatgcacgactggcagatgaagatccgtaaggagggcgagatgatcgctgactacctgcggtccacgcgccgagaccacaagaacatgaccatccaggagctcatgtccgtgatggcaaaggtcgggatccagaacagagaccggtcggagctgttcgatctgctgaacagcgtgcgcgccgccatgacggactcggggctatccgtgagccagacgcacccgctggtgatcatctacgggaggaactcgacccgcgtaaacaagcagatgaaggagatcgacgacctgcagagcatgtccagctaccagaacttgctctccgccacgcagttccagtctgtgcacttcaaagacatgagctcctcgggcgacctgctcttctcgttcaagtcgtccgactccgtgggcttcgtgcaccccatcgccatggcgctgttcggcgtaaagctgccggccatcgagtccgcgttcgtcaacggggacagcctctcgctcctggcgcagctccaccacaacagccgcgtgcgacccagcaactaccagctgctggtgaacaagctcaccgaggaaacgcccatcgtgatgcccggcgtcagcgactccgtgtccatggagatccagcgcgcagtgctgcacaccaacctgcggcggtgcatcctgaacctccgcatgggcgtcttctactgcgagagcgacgagtccatcgacaacgccctaatgaagatcatccacccctcgtgcgcctccatcatgaccgacgaggagcagattttggcctccatcttctccatagtctcgttcaagccgacgctcgtgagcgtgtcgcggccgtcgttcggaacggggatcgggggcatgggcgacatggccatgcacacggtgccctacctggtggtggactccagcaagatgatcacgacatcgacggcgcccatccacgtgggcggggagcagcccttctcgtgcaccgcggaggccgggcgagtgctgtacatgcccgcccagaacatgggcgcggtctctcgcacagacgtggcgtccgccgtgtgcgcggcgagcggctacctttacgagcgcgaccgcgcgcccgtgatcacgaacggcgtgctggtgttcctggtgaaccggcgcgggggcatggccagcacgggcgactgcttcacgaacatgcggcccgtgatcagcgacattcccatcgaggtgtcgcaggacatgatgctcaacggcatcatgtaccggctggtctccgcagtgtgctacagggtcggtgacggcatcgacaactgcggcggcgcggacgccttcgccaacgggtactgcaccatcctgttcacggacgcaggcccctggctctacgaccccatgaccgtgctcagccgctcggccagggaggccaggctcatgcgcgccatgcgcaacgccttcgcgcaggagagcggcgacggccagtgtctgaacgagtggctgcgcggcgacggcgcggccgcgatggccgccaagcagagccagcacatgcagcacaaggccatgttcgaggacgacctgctcaccatggaggaggccatgctcatgatctcgcggtactgcaccatcctcatctacgggcaggagtacgacccgtacatgtcctcgcgcaacatgtgcgacgttctgtgttaa

SEQ ID NO: 12388 - DNA, 1836 bp, unidentified
  misc_feature 1..1836: note = Synthetic
  source 1..1836: mol_type = other DNA
attaacatagcgggcacaatggtgcaggcaccgtctgtatacgtctgcggcttcgtggagcgcccggacgccccacccaaggacgcctgccttcacctggatcccctcaccgtcaagagccagctccctctgaagaagcccttgccactcacggtggaacacctgccggatgctccggtcggctcagtctttggcctttaccagagccgagcgggtctctttagcgcagcctcgattacctctggggacttcctgtccctgctggactcaatttaccacgattgcgatattgcacagagtcagcgcctgcccctccctcgagaacccaaggtggaggctctgcacgcctggctcccctcactgtcactggcctccctccacccagacataccccaaaccaccgcagatggaggcaagctgtccttctttgaccatgtgtctatctgtgccctgggtcgccggcgcggcaccacggcagtctacggtacagaccttgcgtgggtcctgaagcactttagtgacctggaaccgtctatcgccgcccagattgagaatgacgccaatgctgcaaagcgtgaatccggatgcccggaagaccaccctctgcccctcacgaagctcatagctaaggcaatcgatgctggatttctgagaaaccgcgtggagactctgaggcaggacaggggtgtggccaatatcccagccgagtcgtatttaaaggccagcgacgccccggacctacaaaagccggacaaggcacttcagagcccaccaccggcctccacagacccagccaccatgctatcaggtaacgcaggagaaggagcaacagcctgcggaggttcggccgccgcgggccaggacctcatcagcgtcccccgcaacacctttatgacactgcttcagaccaacctggacaacaaaccgccgaggcaaaccccgctaccctacgcggccccgctgccccccttttcccaccaggcaatagccaccgcgccttcctacggtcctggggccggagcggtctccccggccggcggctactttacctccccaggaggttactacgccgggcccgcgggcggggacccgggtgccttcttggcgatggacgctcacacctaccacccccacccacacccccctccggcctactttggcttgccgggcctctttggcccccctccacccgtgcctccttactacggatcccacttgcgggcagactacgtccccgctccctcgcgatccaacaagcggaaaagagaccccgaggaggatgaagaaggcgggggactattcccgggggaggacgccaccctctaccgcaaggacatagcgggcctctccaagagtgtgaatgagttacagcacacgctacaggccctgcgccgggagacgctgtcctacggccacaccggagtcggatactgcccccagcagggcccctgctacacccactcggggccttacggatttcagcctcatcaaagctacgaagtgcccagatacgtccctcatccacccccaccaccaacttctcaccaggcagctcaggcgcagcctccacccccgggcacacaggcccccgaagcccactgtgtggccgagtccacgatccctgaggcgggagcagccgggaactctggaccccgggaggacaccaaccctcagcagcccaccaccgagggccacccccgcggaaagaaactggtgcaggcctctgcatccggagtggctcagtctaaggagcccaccacccccaaggccaagtctgtgtcagcccacctcaagtccatcttttgcgaggaattgctgaataaacgcgtggcttga

SEQ ID NO: 12389 - DNA, 51 bp, unidentified; identical to SEQ ID NO: 3711
  source 1..51: mol_type = other DNA
  misc_feature 1..51: note = Synthetic

SEQ ID NO: 12390 - DNA, 1836 bp, unidentified
  misc_feature 1..1836: note = Synthetic
  source 1..1836: mol_type = other DNA
attaacatagcgggcacaatggtgcaggcaccgtctgtatacgtctgcggcttcgtggagcgcccggacgccccacccaaggacgcctgccttcacctggatcccctcaccgtcaagagccagctccctctgaagaagcccttgccactcacggtggaacacctgccggatgctccggtcggctcagtctttggcctttaccagagccgagcgggtctctttagcgcagcctcgattacctctggggacttcctgtccctgctggactcaatttaccacgattgcgatattgcacagagtcagcgcctgcccctccctcgagaacccaaggtggaggctctgcacgcctggctcccctcactgtcactggcctccctccacccagacataccccaaaccaccgcagatggaggcaagctgtccttctttgaccacgtgtctatctgtgccctgggtcgtcggcgcggcaccacggcagtctacggtacagaccttgcgtgggtcctgaagcactttagtgacctggaaccgtctatcgccgcccagattgagaatgacgccaatgccgcaaagcgtgaatccggatgcccggaagaccaccctctgcccctcacgaagctcatagctaaggcaatcgatgctggatttctgagaaaccgcgtggagactctgaggcaggacaggggtgtggccaatatcccagccgagtcgtatttaaaggccagcgacgccccggacctacaaaagccggacaaggcacttcagagcccaccaccggcctccacagacccagccaccatgctatcaggtaacgcaggagaaggagcaacagcctgcggaggttcggccgccgcgggccaggacctcatcagcgtcccccgcaacacctttatgacactgcttcagaccaacctggacaacaaaccgccgaggcagaccccgctaccctacgcggccccgctgccccccttttcccaccaggcaatagccaccgcgccttcctacggtcctggggccggagcggtcgccccggccggcggctactttacctccccaggaggttactacgccgggcccgcgggcggggacccgggtgccttcttggcgatggacgctcacacctaccacccccacccacacccccctccggcctactttggcttgccgggcctctttggcccccctccacccgtgcctccttactacggatcccacttgcgggcagactacgtccccgctccctcgcgatccaacaagcggaaaagagaccccgaggaggatgaagaaggcggggggctattcccgggggaggacgccaccctctaccgcaaggacatagcgggcctctccaagagtgtgaatgagttacagcacacgctacaggccctgcgccgggagacgctgtcctacggccacaccggagtcggatactgcccccagcagggcccctgctacacccactcggggccttacggatttcagcctcatcaaagctacgaagtgcccagatacgtccctcatccgcccccaccaccaacttctcaccaggcagctcaggcgcagcctccacccccgggcacacaggcccccgaagcccactgtgtggccgagtccacgatccctgaggcgggagcagccgggaactctggaccccgggaggacaccaaccctcagcagcccaccaccgagggccaccaccgcggaaagaaactggtgcaggcctctgcgtccggagtggctcagtctaaggagcccaccacccccaaggccaagtctgtgtcagcccacctcaagtccatcttttgcgaggaattgctgaataaacgcgtggcttga

SEQ ID NO: 12391 - DNA, 51 bp, unidentified; identical to SEQ ID NO: 3711
  source 1..51: mol_type = other DNA
  misc_feature 1..51: note = Synthetic

SEQ ID NO: 12392 - DNA, 1740 bp, unidentified
  source 1..1740: mol_type = other DNA
  misc_feature 1..1740: note = Synthetic
ctggatcccctcaccgtcaagagccagctccctctgaagaagcccttgccactcacggtggaacacctgccggatgctccggtcggctcagtctttggcctttaccagagccgagcgggtctctttagcgcagcctcgattacctctggggtcttcctgtccctgctggactcaatttaccacgattgcgatattgcacagagtcagcgcctgcccctccctcgagaacccaagttggaggctctgcacgcctggctcccctcactgtcactggcctccctccacccagacataccccaaaccaccgcagatggaggcaagctgtccttctttgaccacgtgtctatctgtgccctgggtcgtcggcgcggcaccacggcagtctacggtacagaccttgcgtgggtcctgaagcactttagtgacctggaaccgtctatcgccgcccagattgagaatgacgccaatgccgcaaagcgtgaatccggatgcccggaagaccaccctctgcccctcacgaagctcatagctaaggccatcgatgctggatttctgagaaaccgcgtggagactctgaggcaggacaggggtgtggccaatatcccagccgagtcgtatttaaaggccagcgatgccccggacctacaaaagccggacaaggcacttcagagcccaccaccggcctccacagacccagacaccatgctatcaggtaacgcaggagaaggagcaacagcctgcggaggttcggccgccgcgggccaggacctcatcagcgtcccccgcaacacctttatgacactgcttcagaccaacctggacaacaaaccgccgaggcagaccccgctaccctacgcggccccgctgccccccttttcccaccaggcaatagccaccgcgccttcctacggtcctggggccggagcggtcgccccggccggcggctactttacctccccaggaggttactacgccgggcccgcgggcggggacccgggtgccttcttggcgatggacgctcacacctaccacccccacccacacccccctccggcctactttggcttgccgggcctctttggcccccctccacccgtgcctccttactacggatcccacttgcgggcagactacgtccccgctccctcgcgatccaacaagcggaaaagagaccccgaggaggatgaagaaggcggggggctattcccgggggaggatgccaccctctaccgcaaggacatagcgggcctctccaagagcgtgaatgagttacagcacacgctacaggccctgcgccgggagacgctgtcctacggccacaccggagtcggatactgcccccagcagggcccctgctacacccacccggggccttacggatttcagcctcatcaaagctacgaagtgcccagatacgtccctcatccgcccccaccaccaacttctcaccaggcagctcaggcgcagcctccacccccgggcacacaggcccccgaagcccactgtgtggccgagtccacgatccctgaggcgggagcagccgggaactctggaccccgggaggacaccaaccctcagcagcccaccaccgagggccaccaccgcggaaagaaactggtgcaggcctctgcgtccggagtggctcagtctaaggagcccaccacccccaaggccaagtctgtgtcagcccacctcaagtccatcttttgcgaggaattgctgaataaacgcgtggcttga

SEQ ID NO: 12393 - DNA, 51 bp, unidentified; identical to SEQ ID NO: 3711
  misc_feature 1..51: note = Synthetic
  source 1..51: mol_type = other DNA

SEQ ID NO: 12394 - DNA, 27 bp, unidentified
  misc_feature 1..27: note = Synthetic
  source 1..27: mol_type = other DNA
atgggttgtttggagagtacaggataa

SEQ ID NO: 12395 - DNA, 63 bp, unidentified; identical to SEQ ID NO: 3716
  source 1..63: mol_type = other DNA
  misc_feature 1..63: note = Synthetic

SEQ ID NO: 12396 - DNA, 201 bp, unidentified; identical to SEQ ID NO: 10839
  source 1..201: mol_type = other DNA
  misc_feature 1..201: note = Synthetic

SEQ ID NO: 12397 - DNA, 168 bp, unidentified
  source 1..168: mol_type = other DNA
  misc_feature 1..168: note = Synthetic
acgctggccaacctgagcaccattctctactacacgcgctacgacccggtgctctgtttcctggttttctacgtgccggggctttccgcgaccacgaagatcacgcccggcgtggagttcctcatggagaagctatcgctcgcgcccgagaacgtggtgctgctgtag

SEQ ID NO: 12398 - DNA, 66 bp, unidentified; identical to SEQ ID NO: 3726
  source 1..66: mol_type = other DNA
  misc_feature 1..66: note = Synthetic

SEQ ID NO: 12399 - DNA, 228 bp, unidentified
  source 1..228: mol_type = other DNA
  misc_feature 1..228: note = Synthetic
ctgccccccactatttcatacatcaaagtgctcctagatttgctaaaacaaagtctgcaatccttaaaggcgaaccagtctggcaaaagcgacagtggaatcagcagaatagatctgtctatacatagttcctggaggattacacttatctctgaacccaacaaatgttcaccagttctgaatcgatgcaggaagaggttcccaaggacatcactaatcttttcatag

SEQ ID NO: 12400 - DNA, 54 bp, unidentified; identical to SEQ ID NO: 3731
  misc_feature 1..54: note = Synthetic
  source 1..54: mol_type = other DNA

SEQ ID NO: 12401 - DNA, 39 bp, unidentified; identical to SEQ ID NO: 3734
  misc_feature 1..39: note = Synthetic
  source 1..39: mol_type = other DNA

SEQ ID NO: 12402 - DNA, 57 bp, unidentified
  misc_feature 1..57: note = Synthetic
  source 1..57: mol_type = other DNA
aggagaatgaacaaaccggaacccagaaagccaaccacagcaatcaaccaggattga

SEQ ID NO: 12403 - DNA, 684 bp, unidentified
  misc_feature 1..684: note = Synthetic
  source 1..684: mol_type = other DNA
atggcttgcaaacacggatacccagacgtgtgccctatttgcacagccgttgacgctactcccgactttgaatatttgctcatggcagacggagaatggttccctacggaccttctttgtgtggacttggacgatgacgtcttctggccttcggacacgagcactcaacctcaaacaatggaatggactgatgtaccgctcgtatgcgatactgtcatggaaccccagggaaatgcctcgtcatctgataagagtaactcccagtcctcaggaaatgagggggttatcattaataacttctattccaatcaataccagaactcaattgatttgtctgccagtggtggcaacgctggcgatgctccccagaacaatggacaactgtccagcattctgggtggagctgcaaatgcttttgctactatggcacctctcctcatggaccagaacacagaggagatggaaaacctctctgacagagtagcttctgacaaagcagggaattcggccacaaacacacagtctactgttggccggctctgtggctatggaaagtcccaccacggagaacacccaacctcttgtgccgatgccgcgactgacaaggtcctcgcggctgaacgttactacactatcgatctggctagttggaccacttcccaagaagctttctctcacatcagg

SEQ ID NO: 12404 - DNA, 435 bp, unidentified; identical to SEQ ID NO: 11867
  misc_feature 1..435: note = Synthetic
  source 1..435: mol_type = other DNA

SEQ ID NO: 12405 - DNA, 18 bp, unidentified
  source 1..18: mol_type = other DNA
  misc_feature 1..18: note = Synthetic
acgatgccgccaacgtaa

SEQ ID NO: 12406 - DNA, 255 bp, unidentified
  misc_feature 1..255: note = Synthetic
  source 1..255: mol_type = other DNA
ctggctgccatcaaaaccccaccctcgcagcggcatacgccccctccgcgtcccgcacccgagaccccggcccggctgccctcaccaccgaagcccacctcgtcactgtggggtgttcccagcccgcgttgggatgacggattcccctggcggtgtggcccccgcctcccccgtggaggacgcgtcggacgcgtccctcgggcagccggaggagggggcgccctgccaggtggtcctgcagggcgccgaacttaa

SEQ ID NO: 12407 - DNA, 60 bp, unidentified; identical to SEQ ID NO: 3741
  misc_feature 1..60: note = Synthetic
  source 1..60: mol_type = other DNA

SEQ ID NO: 12408 - DNA, 87 bp, unidentified; identical to SEQ ID NO: 3742
  source 1..87: mol_type = other DNA
  misc_feature 1..87: note = Synthetic

SEQ ID NO: 12409 - DNA, 309 bp, unidentified
  source 1..309: mol_type = other DNA
  misc_feature 1..309: note = Synthetic
atccgcgctttctcgcaggccgggcgccgccttcgtggacgggacaccatgtcttgggccctgaaaacgacggacatgtttctggattcttcgcggtgcacacaccggacgtatggcgatgtctgcgcggagatccataaaagggaacgggaggaccgagaggcggccagaactgcggtgaccgacccggagctcccgctgctgtgtcctccggacgtgcgatcggatcccgcgagtcgaaatcccacacagcagacccgtgggtgtgctagatcgaacgagcggcaggatcgcgtgctggccccttga

SEQ ID NO: 12410 - DNA, 600 bp, unidentified
  source 1..600: mol_type = other DNA
  misc_feature 1..600: note = Synthetic
atgtccaatccacagacgaccatcgcgtatagcctatgccacgccagggcctcgctgaccagcgcactgcccgacgccgcgcaggtggtgcatgtttttgagtacggcacccgcgcgatcatggtacggggccgggagcgccaggaccgcctgccgcgcggaggcgttgttatccagcacacccccattgggctgttggtgattatcgactgtcgcgccgaattttgtgcctaccgctttataggccgggacagcaaccagaagctcgaacgcgggtgggacgcccatatgtacgcgtatccgttcgactcctgggtcagctcctcgcgcggcgaaagcgcccggagcgccacggccggcattttgaccgtggtctggaccgcggacaccatttacatcactgcaaccatttacgggtcgcccccagaggagacgccaggcgcggcacacggggtgggcgccgcgcctccacccccgacaaccgcctgccccgggacggccgagtttctccagcccaccgcggacctgctggtagaggtgctgcgggagattcaactgagccccgccctggaatacgcagacaaacttttggggtcctag

SEQ ID NO: 12411 - DNA, 21 bp, unidentified
  source 1..21: mol_type = other DNA
  misc_feature 1..21: note = Synthetic
atgttcacttcgcgatgttga

SEQ ID NO: 12412 - DNA, 1029 bp, unidentified
  source 1..1029: mol_type = other DNA
  misc_feature 1..1029: note = Synthetic
aggaggatgtccaagcgcaaattcaaggaagagatgctccaggtcatcgcgcctgagatctacggccccgcggtggtgaaggaggaaagaaagccccgcaaaatcaagcgggtcaaaaaggacaaaaaggaagaagatgacgatctggtggagtttgtgcgcgagttcgccccccggcggcgcgtgcagtggcgcgggcggaaagtgcacccggtgctgagacccggcaccaccgtggtcttcacgcccggcgagcgctccggcagcgcttccaagcgctcctacgacgaggtgtacggggacgaggacatcctcgagcaggcggccgagcgcctgggcgagtttgcttacggcaagcgcagccgccccgccctgaaggaagaggcggtgtccatcccgctggaccacggcaaccccacgccgagcctcaagcccgtgaccctgcagcaggtgctgccgagcgcagcgccgcgccgggggttcaagcgcgagggcgaggatctgtaccccaccatgcagctgatggtgcccaagcgccagaagctggaagacgtgctggagaccatgaaggtggacccggacgtgcagcccgaggtcaaggtgcggcccatcaagcaggtggccccgggcctgggcgtgcagaccgtggacatcaagatccccacggagcccatggaaacgcagaccgagcccatgatcaagcccagcaccagcaccatggaggtgcagacggatccctggatgccatcggctcctagccgaagaccccggcgcaagtacggcgcggccagcctgctgatgcccaactacgcgctgcatccttccatcatccccacgccgggctaccgcggcacgcgcttctaccgcggtcatacaaccagccgccgccgcaagaccaccacccgccgccgccgtcgccgcacagccgctgcatctacccctgccgccctggtgcggagagtgtaccgccgcggccgcgcgcctctgaccctaccgcgcgcgcgctaccacccgagcatcgccatttaa

SEQ ID NO: 12413 - DNA, 93 bp, unidentified
  misc_feature 1..93: note = Synthetic
  source 1..93: mol_type = other DNA
aggaagaagatgacgatctggtggagtttgtgcgcgagttcgccccccggcggcgcgtgcagtggcgcgggcggaaagtgcacccggtgctga

SEQ ID NO: 12414 - DNA, 390 bp, unidentified
  source 1..390: mol_type = other DNA
  misc_feature 1..390: note = Synthetic
atggcgaccgtgcactactcccgccgacctgggaccccgccggtcaccctcacgtcgtcccccagcatggatgacgttgcgacccccatcccctacctacccacatacgccgaggccgtggcagacgcgccccccccttacagaagccgcgagagtctggtgttctccccgcctctttttcctcacgtggagaatggcaccacccaacagtcttacgattgcctagactgcgcttatgatggaatccacagacttcagctggcttttctaagaattcgcaaatgctgtgtaccggcttttttaattctttttggtattctcacccttactgctgtcgtggtcgccattgttgccgtttttcccgaggaacctcccaactcaactacatga

SEQ ID NO: 12415 - DNA, 1356 bp, unidentified
  misc_feature 1..1356: note = Synthetic
  source 1..1356: mol_type = other DNA
ctgctagccctaggggagaaagcaaacaggtgggggctcgtccgggatcgatcacctctctgtatctgcccttccccaatcagaaccatgggaaagacttatagctctccggtaaaccctatccccaaagccccaaaagggctagcaattcaccactggctaaactttctccaagccgcgtaccgactgcagccagggccctctgaatttgacttccatcagttacggaagttcctaaaactagccatcaagaccccggtgtggttaaatcccatcaattactctgtccttgccgggctcattcccaagaactacccgggcagggtccatgaaatagtagccatcctaattcaagagacccctgcgcgcgaggcgcccccatcggccccaccagcagatgaccctcaaaagcctccaccctaccccgagcatgcacaggtagaacctcagtgcctccctgtccttcacccccacggggccccagccactcaccgcccctggcaaatgaaggatctccaggctatcaagcaggaagttagttcttccgcccctggcagcccccagttcatgcagaccgtgcgtctagctgtccagcagtttgaccccacagctaaagatctccatgatctcctacagtacttatgctcctcgctagttacctccctgcaccatcagcaacttgagactctcatagcccaggcagaaacccaaggtataacaggctataaccctctggccggccccctacgagtacaggctaacaacccaaatcagcaagggcttcggagagaatatcaaaacctgtggttatcggccttttccgccctcccgggaaacaccaaggaccccacctgggcggccatcctccaaggacctgaagaacctttctgctctttcgtggagaggcttaatgtggctttggataatggccttccggaaggtacccccaaagatccaatccttaggtccctcgcctattcaaacgctaataaagaatgtcaaaaactcctacaggcccgaggacagaccaatagcccgttaggggaaatgctcagggcctgccaaacctggacaccccgagataaaaacaaaatactaatgatacaacctaaaaagactcctcccccaaaccaaccatgcttccgctgtgggcaagcaggtcattggagcagagattgtaaacagccccgaccccctccgggcccctgccctctctgccaggaccccgcccattggaagcgggactgcccacagttaaaagcagataccaaaggcagtgaagacctactcctagacctgccctgtgaagcctcccatgtccgggagcaaaaaaactcctcagggggggaggactaa

SEQ ID NO: 12416 - DNA, 780 bp, unidentified
  misc_feature 1..780: note = Synthetic
  source 1..780: mol_type = other DNA
atgaccaatctgctttcgttggtcgaccaggaggacctggccttctgcgccgggtttccgtccttcgacgagaccatgctcgtgatcgcaggggcgcgagtgcgcttcccgcgctcgctgctctcgctcttcaacgtggtgccgcgcaccatgacgcgctacgaaaccgagctcgtgggcaccgagatggtggtgggcgccgtgttcaccaccgcgtacaacatccgccgaaacctgggcctcggcgaggatcccgtgaccatgcgcgacatcgagaagtacttcctagactccgacaacgaggtgctcacgctcatcgtgcacaacaccgacttttccgccatgagcggcgtgcgccggcgcggcggccggcgcatcaccaaccccgtcatcttccgcagcgggtccacgccgctgctcatcgtgatggagtcgcgcaagaagaccaacatataccgcgagcgcaccgcggagcaggccaacgcctcctacagggaggtcggctcctcgctcgcgctggtcactcggtacgcgggtctgcagctggttgacgtgcacacgcccagctccgtgctaacggtctccgccgtctacggcttcaccgaggacaaggggctcaagaagctgggctccgacaaggagctcgcggactaccagtccacgccgctcaccgaccccatccggctcagcgacttctccaagctattcgacggcgtcaagaagagcatccagctcacgaacgtgcccgtgccctccgccggcgccgaggccgcgccgtag

SEQ ID NO: 12417 - DNA, 24 bp, unidentified
  source 1..24: mol_type = other DNA
  misc_feature 1..24: note = Synthetic
atgcgtagaagaaaagggtggtga

SEQ ID NO: 12418 - DNA, 60 bp, unidentified
  misc_feature 1..60: note = Synthetic
  source 1..60: mol_type = other DNA
atgccaaaaattccgttctgcaaagtttggctccccactgctgtcttcacaaaaaaataa

SEQ ID NO: 12419 - DNA, 1023 bp, unidentified
  misc_feature 1..1023: note = Synthetic
  source 1..1023: mol_type = other DNA
atggattccgcggccccagccctctcccccgctctgacggcccttacgggccagagcgcgacggcggacctggcgatccagattccaaagtgccccgaccccgagaggtacttctacacctcccagtgtcccgacattaaccacctgcgctccctcagcatccttaaccgctggctggaaaccgagcttgttttcgtgggggacgaggaggacgtctccaagctttccgagggcgagctcagcttttaccgcttcctcttcgctttcctgtcggccgccgacgacctggttacggaaaacctgggcggcctctccggcctgtttgagcagaaggacattctccactactacgtggagcaggaatgcatcgaagtcgtacactcgcgcgtgtacaacatcatccagctggtgcttttccacaacaacgaccaggcgcgccgcgagtacgtggccggtaccatcaaccacccggccatccgcgccaaggtggactggttggaagcgcgggtgcgggaatgcgcctccgttccggaaaagttcattctcatgatcctcatcgagggcatcttttttgccgcctcgtttgccgccatcgcctaccttcgcaccaacaaccttctgcgggtcacctgccagtcaaacgacctcatcagccgggacgaggccgtgcacacgacggcctcgtgttacatctacaacaactacctcggcgggcacgccaagcccccgcccgaccgcgtgtacgggctgttccgccaggcggtcgagatcgagatcggatttatccgatcccaggcgccgacggacagccatatcctgagcccggcggcgctggcggccatcgaaaactacgtgcgattcagcgcggatcgcctgttgggccttatccacatgaagccactgttttccgccccaccccccgacgccagctttccgctgagcctcatgtccaccgacaaacacaccaattttttcgagtgtcgcagcacctcctacgccggggcggtcgtcaacgatctgtga

SEQ ID NO: 12420 - DNA, 39 bp, unidentified; identical to SEQ ID NO: 3769
  misc_feature 1..39: note = Synthetic
  source 1..39: mol_type = other DNA

SEQ ID NO: 12421 - DNA, 57 bp, unidentified
  source 1..57: mol_type = other DNA
  misc_feature 1..57: note = Synthetic
aggatcaccctcaaggtccggcccacggagtgcggatttctatcgaaggcaaaatag

SEQ ID NO: 12422 - DNA, 15 bp, unidentified
  source 1..15: mol_type = other DNA
  misc_feature 1..15: note = Synthetic
atgaagagcttttaa

SEQ ID NO: 12423 - DNA, 12 bp, unidentified
  source 1..12: mol_type = other DNA
  misc_feature 1..12: note = Synthetic
aagcacaagtag

SEQ ID NO: 12424 - DNA, 57 bp, unidentified; identical to SEQ ID NO: 3778
  source 1..57: mol_type = other DNA
  misc_feature 1..57: note = Synthetic

SEQ ID NO: 12425 - DNA, 183 bp, unidentified
  source 1..183: mol_type = other DNA
  misc_feature 1..183: note = Synthetic
gtgttgggtcgtttgttcataaacgcggggttcggtcccagggctggcactctgtcgataccccaccgagaccccattgggaccaatacgcccgcgtttcttccttttccccaccccaacccccaagttcgggtgaaggcccagggctcgcagccaacgtcggggcggcaagccctgccatag

SEQ ID NO: 12426 - DNA, 24 bp, unidentified
  source 1..24: mol_type = other DNA
  misc_feature 1..24: note = Synthetic
atgggacccacagaccgcccgtga

SEQ ID NO: 12427 - DNA, 24 bp, unidentified
  misc_feature 1..24: note = Synthetic
  source 1..24: mol_type = other DNA
attgggggctcgtccgggatttga

SEQ ID NO: 12428 - DNA, 1344 bp, unidentified
  misc_feature 1..1344: note = Synthetic
  source 1..1344: mol_type = other DNA
ttgggggctcgtccgggatttgaattcctccattctcacattatgggacaaatccacgggctttccccaactccaatacccaaagcccccagggggctatcaacccaccactggcttaactttctccaggctgcttaccgcttgcagcctaggccctccgatttcgacttccagcagctacgacgctttctaaaactagcccttaaaacgcccatttggctaaatcctattgactactcgcttttagctagccttatccccaagggatatccaggaagggtggtagagattataaatatccttgtcaaaaatcaagtctcccctagcgcccccgccgccccagttccgacacctatctgccctactactactcctccgccacctccccccccttccccggaggcccatgttccccccccttacgtggaacccaccaccacgcaatgcttccctatcttacatcccccaggagccccctcagctcataggccctggcagatgaaagacttacaggccatcaagcaggaggtcagctcctctgctcttggcagcccccagttcatgcagaccctccggctggcggtacaacagtttgaccccaccgccaaggacttacaagatctcctccagtacctatgctcctccctcgtagtttccttacaccatcagcagcttaacacactaattaccgaggctgagacccgcgggatgacaggctacaaccccatggcagggcccctaagaatgcaggctaataaccccgcccagcaaggtcttagacgggagtaccagaatctttggctggctgctttctccaccctgccaggcaatacccgtgacccctcttgggcagctatcctacaggggctggaggaaccctattgcgcgttcgtagagcgccttaacgtggcccttgacaacggcctccccgagggtacccccaaagagcccatcttacgttccctagcgtactcaaacgccaacaaagaatgccaaaaaatcttacaagcccgcggacacactaacagcccccttggggagatgctccggacatgtcaggcgtggacacccaaggacaaaaccaaggtccttgtggtccaaccacggaggcccccccccacacagccctgctttcgttgtggcaaggtaggacactggagtcgggactgtacccagccacgcccccctcctggcccctgccccctatgccaagatccttctcactggaaaagggactgcccacaactcaaaccccctcaggaggaaggggaacccctcctgttggatctcccttccacctcaggcactactgaggaaaaaaactccttaaggggggagatctaa

SEQ ID NO: 12429 - DNA, 222 bp, unidentified
  misc_feature 1..222: note = Synthetic
  source 1..222: mol_type = other DNA
attcagcggatgcaggaccttgagcaagcgtgtaaggattttgttgcacgtgttgtaactcagggtaaagagatgttgaccatccagcttgtggcgggttattatggtgtggaagttggtatggttgaggtggtttggggggctttgaaggcctgcgccgcagcccgcgagaccctagtgaccaacaggttgccggtactaaacttatctaaggaggactga

SEQ ID NO: 12430 - DNA, 2205 bp, unidentified
  source 1..2205: mol_type = other DNA
  misc_feature 1..2205: note = Synthetic
atgtttggccagcagctggcgtccgacgtgcagcagtacctggagcgcctggagaaacagaggcaacagaaggtgggcgtcgacgaggcgtcggcgggcctgacgctcggcggcgatgcgctgcgcgtcccttttttggattttgccaccgcgacgcccaagcgccaccagaccgtggtcccgggcgtcgggacgctccacgactgctgcgagcactcgccgctcttctcggccgtcgcgcggcggttgctgtttaatagcctggtgccggcgcaactcagggggcgtgactttgggggcgaccacacggccaagctggagttcctggcccccgagctggtgcgggcggtggcgcgcctgcggtttcgggagtgcgcgccggaggacgccgtgccccaacgcaacgcctactacagcgtcctgaacacgtttcaggccctgcaccgctccgaagcctttcggcagttggttcacttcgtgcgggacttcgcccagttgttgaaaacctcgttccgggcctctagtctcgcggagactacgggccccccgaagaaacgggccaaggtggacgtggccacccacgggcagacgtacggcaccttggagctcttccagaaaatgatactaatgcacgcgacctactttctggccgccgtgctgctcggggaccacgcggagcaggtcaacacgttcctgcggctcgtgttcgagatccccctgtttagcgacacggccgtgcggcacttccgccagcgcgccaccgtgtttctagtccccaggcgccacggaaagacctggtttttggtgcccctcatcgcgctgtcgctcgcgtccttccgggggatcaagataggctacacggcccacatccgcaaggcgaccgagcccgtgtttgatgagatcgacgcctgcctgcggggctggtttggctcgtcccgggtggaccacgtcaagggggaaaccatctcgttctcgttcccggacggctcgcgcagcacgatcgtgtttgcctccagccacaacacgaacggaatccggggccaggactttaacctgcttttcgtcgacgaggccaactttattcgcccggatgcggtccagacgattatgggctttctcaatcaggccaactgcaagatcatcttcgtctcgtcgaccaacaccgggaaggccagcacgagctttttgtacaacctccgcggggccgccgacgagctgctcaacgtggtcacctatatatgcgacgaccacatgccgcgggtggtgacgcacaccaacgccacggcctgttcctgctatatcctgaacaaacccgtgtttatcacgatggacggcgccgttcgccggacggccgatctgtttctgcccgactccttcatgcaggagatcatcggggggcaggcccgcgagaccggcgacgaccggcccgtcctaacaaagtcggcgggggagcggtttctgctgtaccgcccctccaccaccaccaacagcggcctgatggcccccgagctgtacgtgtacgtggacccggcgttcacggccaacacgcgcgcctccggcaccggcatcgcggtcgtcgggaggtaccgcgacgatttcattatcttcgccctggagcactttttcctccgcgcgctcacgggatcggcccccgcggacatcgcccgctgcgtcgtgcacagcctcgcccaggtgctggcgctgcaccccggggcgtttcgcagcgttcgcgtggcggtcgagggcaacagcagccaggactcggccgtggccatcgccacacacgtgcataccgagatgcaccgcatcctggcctcggcgggggccaacggcccggggcccgagctcctcttctatcactgcgagccgcccggcggcgcggtattgtaccccttctttctgctcaacaaacagaagacgcccgccttcgaatactttatcaaaaagttcaactccgggggcgtcatggcgtcccaggagctcgtctccgtgacggtgcgcctgcagaccgacccggtcgagtatctgtccgagcagctcaacaacctcatcgaaaccgtctctcccaacaccgacgtccgcatgtactccggaaaacgcaacggtgccgcggacgacctcatggtcgcggtcatcatggccatttacctggcggccccgaccgggatccccccggccttttttccgatcacgcgcacgtcttga

SEQ ID NO: 12431 - DNA, 21 bp, unidentified
  source 1..21: mol_type = other DNA
  misc_feature 1..21: note = Synthetic
atgtctattgatctcttttag

SEQ ID NO: 12432 - DNA, 1143 bp, unidentified
  misc_feature 1..1143: note = Synthetic
  source 1..1143: mol_type = other DNA
gtggacctcaaagaagagggggggataaccatggacgaggacggggaagaggacgaggacgaggaggcggaagaccaggagctccgggcggctcaggatcagggccaagacatagagatggtgtccggagaccccaaaaacgtccaagttgcattggctgcaaaggggcccacggtggaacaggagcaggaggaggggcaggagcaggaggggcaggagcaggaggggcaggagcaggaggggcaggagcaggaggggcaggagcaggaggggcaggagcaggaggggcaggagcaggaggggcaggagcaggaggggcaggagcaggaggggcaggagcaggaggaggggcaggagcaggaggggcaggagcaggaggggcaggagcaggaggaggggcaggagcaggaggaggggcaggagcaggaggaggggcaggagcaggaggaggggcaggagcaggaggaggggcaggagcaggaggaggggcaggagcaggaggaggggcaggagcaggaggaggggcaggagcaggaggaggggcaggagcaggcggggcaggagcaggcggggcaggagcaggaggaggggcaggagcaggaggaggggcaggagcaggaggaggggcaggagcaggaggaggggcaggagcaggaggaggggcaggagcaggaggaggggcaggagcaggaggaggggcaggagcaggaggaggggcaggagcaggaggaggggcaggagcaggaggaggggcaggagcaggaggaggggcaggagcaggaggaggggcaggagcaggaggaggggcaggagcaggaggaggggcaggagcaggaggaggggcaggagcaggaggaggggcaggagcaggaggaggggcaggagcaggaggtggaggccggggtcgaggaggcagtggaggccggggtcgaggaggtagtggaggccggggtcgaggaggtagtggaggccgccggggtagaggacgtgaaagagccagggggggaagtcgtgaaagagccagggggagaggtcgtggacgtggtgaaaagaggcccaggagtcccagtagtcagtcatcatcatccgggtctccaccgcgcaggccccctccaggtagaaggccatttttccaccctgtag

SEQ ID NO: 12433 - DNA, 21 bp, unidentified
  source 1..21: mol_type = other DNA
  misc_feature 1..21: note = Synthetic
atgtctattgatctcttttag

SEQ ID NO: 12434 - DNA, 21 bp, unidentified
  misc_feature 1..21: note = Synthetic
  source 1..21: mol_type = other DNA
atgttcacttcgcgatgttga

SEQ ID NO: 12435 - DNA, 1494 bp, unidentified
  source 1..1494: mol_type = other DNA
  misc_feature 1..1494: note = Synthetic
atggggtccctagaaatggtgccaatgggcgcgggtccccctagccccggcggggatccggatggggacgatggcggaaacaactcccaatatccatctgcttctggctcttctgggaacacccccaccccaccgaacgatgaggaacgtgaatctaatgaagagcccccaccgccttatgaggacccatattggggcaatggcgaccgtcactcggactatcaaccactaggaacccaagatcaaagtctgtacttgggattgcaacacgacgggaatgacgggctccctccccctccctactctccacgggatgactcatctcaacacatatacgaagaagcgggcagaggaagtatgaatccagtatgcctgcctgtaattgttgcgccctacctgttttggctggcggctattgccgcctcgtgtttcacggcctcagttagtaccgttgtgaccgccaccggcttggccctctcacttctactcttggcagcagtggccagctcatatgccgctgcacaaaggaaactgctgacaccggtgacagttcttactgcggttgtcactttctttgcaatttgcctaacatggaggattgaggacccaccttttaattctcttctgtttgcattgctggccgcagctggcggactacaaggcatttacgttctggtgatgcttgtgctcctgatactagcgtacagaaggagatggcgccgtttgactgtttgtggcggcatcatgtttttggcatgtgtacttgtccttatcgtcgacgctgttttgcagctgagtcccctccttggagctgtaactgtggtttccatgacgctgctgctactggctttcgtcctctggctctcttcgccagggggcctaggtactcttggtgcagcccttttaacgttggcagcagctctggcactgctagcgtcactgattttgggcacacttaacttgactacaatgttccttctcatgctcctatggacacttgtggttctcctgatttgctcttcgtgctcttcatgtccactgagcaagatccttctggcacgactgttcctatatgctctcgcactcttgttgctagcctccgcgctaatcgctggtggcagtattttgcaaacaaacttcaagagtttaagcagcactgaatttatacccaatttgttctgcatgttattactgattgtcgctggcatactcttcattcttgctatcctgaccgaatggggcagtggaaatagaacatacggtccagtttttatgtgcctcggtggcctgctcaccatggtagccggcgctgtgtggctgacggtgatgactaacacgcttttgtctgcctggattcttacagcaggattcctgattttcctcattggctttgccctctttggggtcattagatgctgccgctactgctgctactactgccttacactggaaagtgaggagcgcccaccgaccccatatcgcaacactgtataa

SEQ ID NO: 12436 - DNA, 1494 bp, unidentified
  misc_feature 1..1494: note = Synthetic
  source 1..1494: mol_type = other DNA
atggggtccctagaaatggtgccaatgggcgcgggtccccctagccccggcggggatccggatggggacgatggcggaaacaactcccaatatccatctgcttctggctcttctgggaacacccccaccccaccgaacgatgaggaacgtgaatctaatgaagagcccccaccgccttatgaggacccatattggggcaatggcgaccgtcactcggactatcaaccactaggaacccaagatcaaagtctgtacttgggattgcaacacgacgggaatgacgggctccctccccctccctactctccacgggatgactcatctcaacacatatatgaagaagcgggcagaggaagtatgaatccagtatgcctgcctgtaattgttgcgccctacctgttttggctggcggctattgccgcctcgtgtttcacggcctcagttagtaccgttgtcagcgccaccggcttggccctctcacttctactcttggcagcagtggccaactcatctgccgctgcacaaaggaaactgctgacaccggttacagttcttactgcggttgtcactttctttgcaatttgcctaacatggaggattgaagacccaccttttaattctattctgtttgcattgctggccgcagctggcggactacaaggcatttacgttctggtgatgcttgtgctcctgatactagcatacagaaggagatggcgccgtttgactgtttgtggcggcatgatgtttttggcatgtctagttgtcctcatcgtcgacgctgttttgcagctgagtcccctccttggagctgtaactgtggtttccatgacgctgctgctactggctttcgtcctctggctctcttcgccagggggcctaggtactcttggtgcagcccttttaacattggcagcagctctggcactgctagcgtcactgattttgggcacacttaacttgactacaatgttccttctcatgctcctatggacacttgtggttctcctgatttgctcttcgtgctcttcatgtccactgagcaaggttcttctggcacgactgttcctatatgctctagcactcttgttgctagcctccgcgctaaccgccggtggcagtattttgcaaacaaacttcaagagtttaagtagcactgaatttatacctcatttgttctgcatgttattactgattgtcgctggcatactctttattcttgctatcctgaccgaatggggaagtggaaatagaacatacggtcccgtttttatgtccctcggcggcctgctcaccatggtagccggcgctgtgtggctgacggtgatgactaacacgcttttgtctgcctggattcttacagcaggattcctgattttcctcattggctttgccctctttggggtcattagacgctgccgttactgctgctactactgccttacactggaaagtgaggagcgcccaccgaccccatatcgcaacactgtataa

SEQ ID NO: 12437 - DNA, 1494 bp, unidentified
  source 1..1494: mol_type = other DNA
  misc_feature 1..1494: note = Synthetic
atggggtccctagaaatggtgccaatgggcgcgggtccccctagccccggcggggatccggatgggtacgatggcggaaacaactcccaatatccatctgcttctggctcttctgggaacacccccaccccaccgaacgatgaggaacgtgaatctaatgaagagcccccaccgccttatgaggacccatattggggcaatggcgaccgtcactcggactatcaaccactaggaacccaagatcaaagtctgtacttgggattgcaacacgacgggaatgacgggctccctccccctccctactctccacgggatgactcatctcaacacatatacgaagaagcgggcagaggaagtatgaatccagtatgcctgcctgtaattgttgcgccctacctcttttggctggcggctattgccgcctcgtgtttcacggcctcagttagtaccgttgtgaccgccaccggcttggccctctcacttctactcttggcagcagtggccagctcatatgccgctgcacaaaggaaactgctgacaccggtgacagtgcttactgcggttgtcactttctttgcaatttgcctaacatggaggattgaggacccaccttttaattctcttctgtttgcattgctggccgcagctggcggactacaaggcatttacgttctggtgatgcttgtgctcctgatactagcgtacagaaggagatggcgccgtttgactgtttgtggcggcatcatgtttttggcatgtgtacttgtcctcatcgtcgacgctgttttgcagctgagtcccctccttggagctgtaactgtggtttccatgacgctgctgctactggctttcgtcctctggctctcttcgccagggggcctaggtactcttggtgcagcccttttaacattggcagcagctctggcactgctagcgtcactgattttgggcacacttaacttgactacaatgttccttctcatgctcctatggacacttgtggttctcctgatttgctcttcgtgctcttcatgtccactgagcaagatccttctggcacgactgttcctatatgctctcgcactcttgttgctagcctccgcgctaatcgctggtggcagtattttgcaaacaaacttcaagagtttaagcagcactgaatttatacccaatttgttctgcatgttattactgattgtcgctggcatactcttcattcttgctatcctgaccgaatggggcagtggaaatagaacatacggtccagtttttatgtgcctcggtggcctgctcaccatggtagccggcgctgtgtggctgacggtgatgtctaacacgcttttgtctgcctggattcttacagcaggattcctgattttcctcattggctttgccctctttggggtcattagatgctgccgctactgctgctactactgccttacactggaaagtgaggagcgcccaccgaccccatatcgcaacactgtataa

SEQ ID NO: 12438 - DNA, 21 bp, unidentified
  misc_feature 1..21: note = Synthetic
  source 1..21: mol_type = other DNA
atgtctattgatctcttttag

SEQ ID NO: 12439 - DNA, 114 bp, unidentified; identical to SEQ ID NO: 3805
  misc_feature 1..114: note = Synthetic
  source 1..114: mol_type = other DNA

SEQ ID NO: 12440 - DNA, 33 bp, unidentified; identical to SEQ ID NO: 3807
  misc_feature 1..33: note = Synthetic
  source 1..33: mol_type = other DNA

SEQ ID NO: 12441 - DNA, 24 bp, unidentified
  misc_feature 1..24: note = Synthetic
  source 1..24: mol_type = other DNA
atgatgttttttccaaaaacctaa

SEQ ID NO: 12442 - DNA, 42 bp, unidentified; identical to SEQ ID NO: 3809
  misc_feature 1..42: note = Synthetic
  source 1..42: mol_type = other DNA

SEQ ID NO: 12443 - DNA, 120 bp, unidentified
  misc_feature 1..120: note = Synthetic
  source 1..120: mol_type = other DNA
atagatcagtcaacggaaaatacaagtatagatacaacggttactatcaatattatttatctagcgattatgaaaattataatgaatattattatgatgattatgatagaactggtatga

SEQ ID NO: 12444 - DNA, 45 bp, unidentified; identical to SEQ ID NO: 3815
  source 1..45: mol_type = other DNA
  misc_feature 1..45: note = Synthetic

SEQ ID NO: 12445 - DNA, 507 bp, unidentified
  source 1..507: mol_type = other DNA
  misc_feature 1..507: note = Synthetic
atgaaatcgcttaatagacaaactgtaagtaggtttaggaagttgtcggtgccggccgctataatgatgttactctcaaccattattagcggcataggaacatttctacattacagagaagaactgatgcctagtgcttgcgccaatggatggatacaatacgataaacattgttatctggataccaacattaaaatgtctacggataatgcagtttatcagtgtcgcaaattacgagctagattgcctggacctgatactagacatctgagagtattgtttagtattttttataaagattattgggtaagtttaaaaaagaccaatgataaatggttagatattaataatgataaagatatagatattagtaaattaacaaattttaagcaactaaacagcacaacggattctgaagcgtgttatatatacaagtctggaaaactggttaaaacagtatgtaaaagtactcaatctgtactatgcgttaaaagattctacaagtga

SEQ ID NO: 12446 - DNA, 393 bp, unidentified
  misc_feature 1..393: note = Synthetic
  source 1..393: mol_type = other DNA
atcccctccgctcccgcctccggcccgattcttacggcgcgacccaaggtcccgatggccgccccgcagtttcaccgccccagcaccattaccgccgacaacgtccgggcgctcggcatgcgcgggctcgtgttggccaccaacaacgctcagttcatcatggataacagctacccgcatccgcacggaacgcagggtgcggtgcgagagtttcttcgcgggcaggccgcggcgctgacggacctcggggtgacccacgccaacaacacgttcgccccgcagcctatgttcgcgggcgacgccgcggccgaatggctgcggccctcgttcggtcttaagcgcacgtattccccctttgtcgttcgcgaccccaagacccccagcaccccgtga

SEQ ID NO: 12447 - DNA, 333 bp, unidentified
  source 1..333: mol_type = other DNA
  misc_feature 1..333: note = Synthetic
atgaaaacagcattagttcttttctttatgttaatcccagtttgggctagttcttgtcaactacataaaccatggaattttttagattgttatactaaagaaacaaactacataggctgggtttatggaattatgtctggcttagtatttgtctcctctgtagtttctttacaactgtatgcgcgccttaattttagttggaataagtatactgatgatcttcccgaatatccaaacccccaggatgatttacccctaaatattgtatttccagagcccccgcgtcctccttctgttgttagctattttaagttcaccggtgaagatgattga

SEQ ID NO: 12448 - DNA, 198 bp, unidentified
  source 1..198: mol_type = other DNA
  misc_feature 1..198: note = Synthetic
ctgagcgaccgcgagctgatgctgagcctgcgccgggcgctggtagggggcgccgccagcggcgaagagtcccactttgacatgggggcggacctgcattggcagccgagccggcgcgccttggaggccgcctacggtccagaggacttggatgaggatgaggaagaggaggaggatgcacccgctgcggggtactga

SEQ ID NO: 12449 - DNA, 183 bp, unidentified
  misc_feature 1..183: note = Synthetic
  source 1..183: mol_type = other DNA
ctgatgctgagcctgcgccgggcgctggtagggggcgctgccggcggcgaggagtcctacttcgacatgggggcggacctgcattggcagccgagccggcgcgccttggaggccgcctacggtccagaggacttggatgaggaagaggaagaggaggaggatgcacccgctgcggggtactga

SEQ ID NO: 12450 - DNA, 72 bp, unidentified; identical to SEQ ID NO: 3827
  misc_feature 1..72: note = Synthetic
  source 1..72: mol_type = other DNA

SEQ ID NO: 12451 - DNA, 45 bp, unidentified; identical to SEQ ID NO: 3828
  source 1..45: mol_type = other DNA
  misc_feature 1..45: note = Synthetic

SEQ ID NO: 12452 - DNA, 72 bp, unidentified; identical to SEQ ID NO: 3827
  misc_feature 1..72: note = Synthetic
  source 1..72: mol_type = other DNA

SEQ ID NO: 12453 - DNA, 72 bp, unidentified; identical to SEQ ID NO: 3829
  misc_feature 1..72: note = Synthetic
  source 1..72: mol_type = other DNA

SEQ ID NO: 12454 - DNA, 45 bp, unidentified; identical to SEQ ID NO: 3828
  source 1..45: mol_type = other DNA
  misc_feature 1..45: note = Synthetic

SEQ ID NO: 12455 - DNA, 36 bp, unidentified; identical to SEQ ID NO: 3833
  source 1..36: mol_type = other DNA
  misc_feature 1..36: note = Synthetic

SEQ ID NO: 12456 - DNA, 312 bp, unidentified
  source 1..312: mol_type = other DNA
  misc_feature 1..312: note = Synthetic
ttgctacgtcgtaacgcgcaagttggaggcggaacagactactttcggtactccgtgtttccttattattttatacaacaatttatggtgacattgactgatactattgagttcgcccgcttgccattgaatattgccttgtattaccttatagcatttcaaaaagccacagatctcaccctcgagctcattcactttgcagtttgtttgaatcgcatacacaagacatttgaacatgggagcccagttgagcagaaatactgccgggagccacactactggaacctacgctaccggaggctcaaccattaa

SEQ ID NO: 12457 - DNA, 1851 bp, unidentified
  misc_feature 1..1851: note = Synthetic
  source 1..1851: mol_type = other DNA
atgagaccgccgagacgttctgcgccgatactcgtgtgcgcgatttccatggcgacagccctgtcgaatgctacggtccaccgagatgcgggaaccgtggaatccacaccgccgccggacgacgaagacaactataccgcaaaatactatgacgacagcatttattttaacatttacgacggtacaaatcctacgcccagaagacgaacgctacccgaaatcatctctaaattttctacctccgaaatgtcacgtctaggaggccttaaagcttttgtccccgtagattataccccaactactaccttagaagatatagaagacctcctgaactacgccatttgcgatgataacagctgcggttgtctcatagagacagaggcacgcatcatgttcggagatatcataatctgcgttcccctctcggccgaaagcagaggagtgagaaatttaaaaagcagaataatgcctatgggtctatcacagattctctctagcggcctcggccttcacttctctctgctatatggcgctttcgggagcaactataatagtttggcctatatggaacgcctgaaaccactaaccgcgatgacggcgatagctttttgtccaatgactagtaaattggagctacgccagaactacagactggaaaaggctcgatgcgaactgatcgtcaatatcgaactcttgaagatacaaaaccatggcggacagactatcaaaacgttaacctcgtttgcgatcgttcgaaaagacagcgacgggcaagattgggaaacctgcacgcgcttcgcgtccgttagcatagaggacatattgaggtctaaacctgccgccaatggcacatgttgtcctccccgagacgtgcaccatgatcgtcctacgttacaatcttctaactcatggactcggactgagtatttcgaaccgtggcaggacgtcgttgacgcatacgtccctataaacgataatcattgtccaaacgatagctacgtcgtatttcaaaccctgcaaggtcacgaatggtgttcacgtttgaataagaacgacacgaagaattatttatcttctgtactagcgtttaaaaatgcactgtacgaaactgaggaactgatggaaaccatcggaatgcgacttgcctcacaaatattgtcactggtcggacagcgaggaacatctatacgcaacatagatccggccatcgtaagcgcattgtggcactctttgccagaaaaactgacaacgactaatataaaatacgatatagccagtccgacacatatgagtcccgcattatgcaccatctttatacagaccggaacttcaaaacaacgtttcagaaatgcgggactactgatggttaacaacatcttcactgtgcaagcgagatatagtaaacaaaatatgttcgaaaaaaaaatatatggatatgaacacctcggacaagctttatgcgaggacggtgaaattctgtttcaaaatgcaggccagaaattttgtcgacctttcacggacaatagaacaattgtatatactatgcaagaccaagttcaaagaccctggtccgtaacatggatggatttcaatctagtcattagtgactacggaagagctgtgatagaaaatttaaccgaaagtgctatgtcagcacacaaaaacgggccaagatatctacagatggaaacgtttatatcggatttattccggtatgaatgtcatcgagataatcgttatgttttagagaaaaaactacaaatgttttatccgactactcatatgaacgaattacttttttatccctcagaccctacgttgccctcaccttatggcaacggacattattaa

SEQ ID NO: 12458 - DNA, 174 bp, unidentified
  source 1..174: mol_type = other DNA
  misc_feature 1..174: note = Synthetic
atgcgggaaccgtggaatccacaccgccgccggacgacgaagacaactataccgcaaaatactatgacgacagcatttattttaacatttacgacggtacaaatcctacgcccagaagacgaacgctacccgaaatcatctctaaattttctacctccgaaatgtcacgtctag

SEQ ID NO: 12459 - DNA, 1968 bp, unidentified
  misc_feature 1..1968: note = Synthetic
  source 1..1968: mol_type = other DNA
attaacgtcttcatccccccgcttctacacgcaacgctgcatacagctatgctcacactctatctcttcacagcgacatgttgcttcgtctgtgcactgccgcgacaagcacaagtggacaccgccatctgccaccacacatggcccatgtgctccgacgtcccgcatccaacgtcgtctgctcacaacacggcgctttcttcctcgcacgccatctccatcgaacaccgtctgctgcattcgccgtcgcctccacgagagaacatacgccacagcatgcgctgtcgccgccgcgccatagcctcctcggcttccacaccggtttcgcacacccagcccctggctgccaaccacagacgttcaaggatcacgtacgcgacgaccgatcccaccaattctccaacggcctcgcccgccaagtcagacaagctggaagccgacgcagacccagcactccatcgacgcccagactcgctgttgcgccacctcttccagccctgccacgcccaacgcggcacttccaacagagccacatcccagagggcttccttgaacgccgtgcaccacaaactctgcggcgcgatgatatcttcgtcgtggtccaccacttgcacaccggcgattatggacttgccgtcgctgtccgtggaactatctgcaggacacaagaaaaaagaaacaccaaccgagggtgggtggggcggtgaagaaggggaggacgacgttctcgccacgatccgcaacacgttatccgccccaacctcacctgctgcggctaccacacatcgactgtcgttccctgaaggatcgagcttctgcctcaccgctgtttccgagtactcacaacgtctaacatcaacggcagcattaacgccgccgccgccagcggtagctgctccgttctctttttcgtccacggtctccgagaccggcgcttttccgcagagcacagcaggccgcacacgtgtcgacgacaccgccgtcgttaccgccggagacccgcgctctcctgtgacacacgtaactctcctccagatattccgtctgcgtagctcgctgctgacgagcaggtccggcgacactctccgcggcggtgagcacgaggccatccccaaagtcgcgtcgctgttttggacgctgctaaaagcaacacaaactgttgagatcactcacaaaacaccgagtgccgactctcaccgcaacccacaaaaatacaccgaccgcccacaacgtctgctgttgacagcacttgccatctggcaacgaacctacaataacacgcgtgccgatcacgcgccgcaagtgcgcttgctcggcaacatcctcacttaccgcagaccgcaaactgccaccgcgtctgccaaagcacacacgcagcagcagccagaggaaccaaaaggccaacagatctgggcgcagacagccggccaggccgcgccacacggcgacgagccgcatagcgacggcgagctacgccgcgagtcgcattctgcaccgccgacgtctcgtacactacccgatacaattttggcagtgaaacgccgttccgttgcccaacggtcacacgtccgactggacgcgaaacccggactgaatgaccgggacggctttcgccgacggttgttgctccccttatccggctatttccgcgccaacgagctccggaatcaacaatttatgggctatggaacggagaacggccttaagaatacttgcctcacccgccctctgggtgccgcggggggtgtgcgggagacgattggggagcgacaagacagggacgtggcggactctgcgacgcaacgcgttttccacacgttgtacgccgcactgcagaccgtacgggtgtggtataccgcgttaggcaccgcgtggcgtacctcggggtctcgtacgcgtgactctctgttcgatggtccacgacgtcgcgatcggcaggcgggccggctacggcgcttggagctgtag

SEQ ID NO: 12460 - DNA, 159 bp, unidentified
  source 1..159: mol_type = other DNA
  misc_feature 1..159: note = Synthetic
atgctctcccggatattattgtcttctcaaaggatcatccggatgcaaggcatgtgtttcccaaacaaaatgtggaataggatacggagtatccggagacgtcatctgttctccgtgtggtctcggaacatattctcacaccgtctcttccgcagataa

SEQ ID NO: 12461 - DNA, 159 bp, unidentified; identical to SEQ ID NO: 12460
  source 1..159: mol_type = other DNA
  misc_feature 1..159: note = Synthetic

SEQ ID NO: 12462 - DNA, 48 bp, unidentified; identical to SEQ ID NO: 3847
  source 1..48: mol_type = other DNA
  misc_feature 1..48: note = Synthetic

SEQ ID NO: 12463 - DNA, 204 bp, unidentified
  source 1..204: mol_type = other DNA
  misc_feature 1..204: note = Synthetic
ttgcatgtctttagttctatgatgacacaaaccccgcccagcgtcttgtcattggcgaattcgaacacgcagatgcagtcggggcggcgcggtcccaggtccacttcgcatattaaggtgacgcgtgtggcctcgaataccgagcgaccctgcagcgacccgcttaacagcgtcaacagcgtgccgcagatcttggtggcgtga

SEQ ID NO: 12464 - DNA, 21 bp, unidentified
  source 1..21: mol_type = other DNA
  misc_feature 1..21: note = Synthetic
atgtctttagctccaggatga

SEQ ID NO: 12465 - DNA, 216 bp, unidentified
  source 1..216: mol_type = other DNA
  misc_feature 1..216: note = Synthetic
atgacgcacacacctcccaacgttttgtcattggcgaattcgaacacgcagatgcagtctgggcggcgcggcccgaggtccacttcgcatattaaggtgacgcgcgtggcctcgaacagcgagcgaccctgcagcgacccgctcatcagcgtcagcagcgttccacaaatcctggtggcgttgaactcccgcacctctcgggcgaacgccttgtag

SEQ ID NO: 12466 - DNA, 111 bp, unidentified; identical to SEQ ID NO: 3851
  misc_feature 1..111: note = Synthetic
  source 1..111: mol_type = other DNA

SEQ ID NO: 12467 - DNA, 519 bp, unidentified
  misc_feature 1..519: note = Synthetic
  source 1..519: mol_type = other DNA
gtgatgctcatctgcttcggtgtgatattattgcagcttggggtgactaaagtgtgtcagcataatgaagtgcaactgggcaacgaatgctgtcctccgtgtggtttgggacaaagagttactaaagtatgcacggagcgtaccagcgtaacgtgtaccccttgccccaacggcacgtatgtatcgggactttacaactgtaccgattgcactcaatgtaacgtcactcaagtcatgattcgtaactgcacttccaccaataataccgtatgcgcgcctaagaaccatacgtacttttccactccaggcgtccaacatcacaagcaacgacagcaaaatcataccgcacatataaccgtcaaacaaggaaaaagcggtcgtcatactctagcctggttgtctctctttatctttcttgtgggtatcatacttttaattctctatcttatagccgcctatcggagtgagagatgccaacagtgttgctcaatcggcaaaattttctaccgcaccctgtaa

SEQ ID NO: 12468 - DNA, 726 bp, unidentified
  misc_feature 1..726: note = Synthetic
  source 1..726: mol_type = other DNA
atggagaagtttgcacctgaatttcatggagaagatgcaaataacaaagctaccaaattcctagaatcaataaagggcaagttcgcatcatccaaagatcctaagaagaaagatagcataatatctgttaactcaatagatatagaagtaaccaaagagagcccgataacatctggcaccaacatcatcaatccaacaagtgaagccgacagtaccccagaaaccaaagccaactacccaagaaaacccctagtaagcttcaaagaagatctcaccccaagtgacaaccctttttctaagttgtacaaagaaacaatagaaacatttgataacaatgaagaagaatctagctactcatatgaagagataaatgatcaaacaaatgacaacattacagcaagactagatagaattgatgaaaaattaagtgaaatattaggaatgctccatacattagtagttgcaagtgcaggacccacttcagctcgcgatggaataagagatgctatggttggtctgagagaagaaatgatagaaaaaataagagcggaagcattaatgaccaatgataggttagaggctatggcaagacttaggaatgaggaaagcgaaaaaatggcaaaagacacctcagatgaagtgcctcttaatccaacttccaaaaaattgagtgacttgttggaagacaacgatagtgacaatgatctgtcacttgatgatttttga

SEQ ID NO: 12469 - DNA, 39 bp, unidentified; identical to SEQ ID NO: 3855
  source 1..39: mol_type = other DNA
  misc_feature 1..39: note = Synthetic

SEQ ID NO: 12470 - DNA, 63 bp, unidentified; identical to SEQ ID NO: 3856
  source 1..63: mol_type = other DNA
  misc_feature 1..63: note = Synthetic

SEQ ID NO: 12471 - DNA, 177 bp, unidentified
  source 1..177: mol_type = other DNA
  misc_feature 1..177: note = Synthetic
aagatggataaagttttaaacagagaggaatctttgcagctaatggaccttctaggtcttgaaaggagtgcctgggggaatattcctctgatgagaaaggcatatttaaaaaaatgcaaggagtttcatcctgataaaggaggagatgaagaaaaaatgaagaaaatgaatactctg

SEQ ID NO: 12472 - DNA, 33 bp, unidentified; identical to SEQ ID NO: 3807
  source 1..33: mol_type = other DNA
  misc_feature 1..33: note = Synthetic

SEQ ID NO: 12473 - DNA, 21 bp, unidentified
  misc_feature 1..21: note = Synthetic
  source 1..21: mol_type = other DNA
atgttttttctaaaaacctaa

SEQ ID NO: 12474 - DNA, 33 bp, unidentified; identical to SEQ ID NO: 3807
  misc_feature 1..33: note = Synthetic
  source 1..33: mol_type = other DNA

SEQ ID NO: 12475 - DNA, 21 bp, unidentified
  misc_feature 1..21: note = Synthetic
  source 1..21: mol_type = other DNA
atgttttttctaaaaacctaa

SEQ ID NO: 12476 - DNA, 33 bp, unidentified; identical to SEQ ID NO: 3807
  misc_feature 1..33: note = Synthetic
  source 1..33: mol_type = other DNA

SEQ ID NO: 12477 - DNA, 24 bp, unidentified
  source 1..24: mol_type = other DNA
  misc_feature 1..24: note = Synthetic
atgatgttttttctaaaaacctaa

SEQ ID NO: 12478 - DNA, 129 bp, unidentified
  misc_feature 1..129: note = Synthetic
  source 1..129: mol_type = other DNA
atgttaaaaatgtccgccgtcgactttttggaacgtttgataaaagcgggtgtttatatttatgttttacggacaaagtatgtaattacagctttactagtaaaaaactattccataaaagacgaataa

SEQ ID NO: 12479 - DNA, 1470 bp, unidentified
  source 1..1470: mol_type = other DNA
  misc_feature 1..1470: note = Synthetic
atgggtttgttcgggatgatgaagtttgcccacacacaccatctggtcaagcgccggggccttggggccccggccgggtacttcacccccattgccgtggacctgtggaacgtcatgtacacgttggtggtcaaatatcagcgccgataccccagttacgaccgcgaggccattacgctacactgcctctgtcgcttattaaaggtgtttacccaaaagtcccttttccccatcttcgttaccgatcgcggggtcaattgtatggagccggttgtgtttggagccaaggccatcctggcccgcacgacggcccagtgccggacggacgaggaggccagtgacgtggacgcctctccaccgccttcccccatcaccgactccagacccagctctgccttttccaacatgcgccggcgcggcacctctctggcctcggggacccgggggacggccgggtccggagccgcgctgccgtccgccgcgccctcgaagccggccctgcgtctggcgcatctgttctgtattcgcgttctccgggccctggggtacgcctacattaactcgggtcagctggaggcggacgatgcctgcgccaacctctatcacaccaacacggtcgcgtacgtgtacaccacggacactgacctcctgttgatgggctgtgatattgtgttggatattagcgcctgctacattcccacgatcaactgtcgcgatatactaaagtactttaagatgagctacccccagttcctggccctctttgtccgctgccacaccgacctccatcccaataacacctacgcctccgtggaggatgtgctgcgcgaatgtcactggacccccccgagtcgctctcagacccggcgggccatccgccgggaacacaccagctcgcgctccacggaaaccaggccccctctgccgccggccgccggcggcaccgagacgcgcgtctcgtggaccgaaattctaacccaacagatcgccggcggatacgaagacgacgaggacctccccctggatccccgggacgttaccgggggccaccccggccccaggtcgtcctcctcggagatactcaccccgcccgagctcgtccaggtcccgaacgcgcagctgctggaagagcaccgcagttatgtggccaaccggcgacgccacgtcatccacgacgccccagagtccctggactggctccccgatcccatgaccatcaccgagctggtggaacaccgctacattaagtacgtcatatcgcttatcggccccaaggagcgggggccgtggactcttctgaaacgcctgcctatctaccaggacatccgcgacgaaaacctggcgcgatctatcgtgacccggcatatcacggcccctgatatcgccgacaggtttctggagcagttgcggacccaggcccccccacccgcgttctacaaggacgtcctggccaaattctgggacgagtag

SEQ ID NO: 12480 - DNA, 21 bp, unidentified
  source 1..21: mol_type = other DNA
  misc_feature 1..21: note = Synthetic
atgccatcagcgaatcggtag

SEQ ID NO: 12481 - DNA, 21 bp, unidentified
  source 1..21: mol_type = other DNA
  misc_feature 1..21: note = Synthetic
atggtggcgcggctgacctag

SEQ ID NO: 12482 - DNA, 21 bp, unidentified
  misc_feature 1..21: note = Synthetic
  source 1..21: mol_type = other DNA
atggtggcgcggctgacctag

SEQ ID NO: 12483 - DNA, 657 bp, unidentified
  source 1..657: mol_type = other DNA
  misc_feature 1..657: note = Synthetic
acgggaaataatatgctgcggcttctgcttcgtcaccactttcactgcctgcttctgtgcgcggtttgggcaacgccctgtctggcgtctccgtggtcgacgctaacagcaaaccagaatccgtccccgccatggtctaaactgacgtattccaaaccgcatgacgcggcgacgttttactgtccttttctctatccctcgcccccacgatcccccttgcaattctcggggttccagcgggtatcaacgggtcccgagtgtcgcaacgagaccctgtatctgctgtacaaccgggaaggccagaccttggtggagagaagctccacctgggtgaaaaaggtgatctggtacctgagcggtcggaaccaaaccatcctccaacggatgccccgaacggcttcgaaaccgagcgacggaaacgtgcagatcagcgtggaagacgccaagatttttggagcgcacatggtgcccaagcagaccaagctgctacgcttcgtcgtcaacgatggcacacgttatcagatgtgtgtgatgaagctggagagctgggctcacgtcttccgggactacagcgtgtcttttcaggtgcgattgacgttcaccgaggccaataaccagacttacaccttctgcacccatcccaatctcatcgtttga

SEQ ID NO: 12484 - DNA, 2811 bp, unidentified
  misc_feature 1..2811: note = Synthetic
  source 1..2811: mol_type = other DNA
atggccaccccatcgatgctgccccagtgggcgtacatgcacatcgccggacaggacgcttcggagtacctgagtccgggtctggtgcagttcgcccgcgccacagacacctacttcagtctggggaacaagtttaggaaccccacggtggcgcctacccacgatgtgaccaccgaccgcagccagcggctgacgctgcgctttgtgcccgtggaccgggaggacaacacctactcgtacaaagtgcgctacacgctggccgtgggcgacaaccgcgtgctggacatggccagcacctactttgacatccgcggcgtgctggatcggggccctagcttcaaaccctactccggcactgcctacaacagcctggctcccaagggagcgcccaacacctgccagtggaaggattctgacagcaaaatgcatacctttggggcagctgccatgcccggtgttactgggaaaaagatagaagctgatgggctgcctattagaatagattcaacttctggaactgacacagtaatttatgctgataaaactttccaaccagaaccacaagttggaaatgacagttgggttgacaccaatggtgcagaggaaaaatatggaggcagagctctaaaggacactacaaaaatgaaaccctgttatggttcattcgccaagcctaccaacaaagaaggtggtcaggctaacttaaaagattcagaacccgccgccaccactcctaactatgatatagacctggctttctttgacagcaaaactattgttgctaactacgatccagatattgtaatgtacacagaaaatgttgacttgcagactccagatactcatattgtatacaaacctggaacagaggacaccagctctgaatccaatttgggtcagcaggccatgcctaacagacccaactacattggcttcagagacaattttatcgggctcatgtactacaacagcactggcaatatgggggtgctggccggtcaggcctctcagctgaatgctgtggttgacttgcaagacagaaacactgaactgtcctaccagctcttgcttgactctctgggtgacagaacccggtatttcagtatgtggaatcaggcggtggacagctatgatcctgatgtgcgcattattgaaaaccatggtgtggaggatgaattgccaaactattgctttccgttgaatggtgtgggattgacagacacttaccagggtgttaaagttaaaacagatgcaggttctgaaaagtgggacaaagatgacaccacagttagtaatgctaatgaaatccatgtaggcaatccttttgccatggaaatcaacatccaagccaacctgtggaggaacttcctctatgccaatgttgccctctatttgcctgataaatacaaatacacaccggccaacatcaccctgcccaccaacaccaacacctacgagtacatgaacggccgggtggtggcgccctcgctggtggacgcctacattaacattggggcgcgctggtcgctggaccccatggacaacgtaaatcccttcaaccaccaccgcaatgcgggcttgcgctaccgctccatgctcctgggcaacgggcgctacgtgccattccacatccaggtgccccagaaattttttgccattaagagcctcctgctcctgcccgggtcctacacctacgagtggaacttccgcaaggacgtcaacatgatcctgcagagttcccttggcaacgacctgcgcacagacggggcctccatcaccttcaccagcattaacctctacgccaccttcttccccatggcgcacaacaccgcctccacgcttgaggccatgctgcgcaacgacaccaatgaccaatccttcaacgactacctctcggcggccaacatgctctatcccatcccggccaacgccaccaacgtgcccatctccatcccctcgcgcaactgggccgcctttcgcggctggtccttcacgcgtctcaagaccaaagagacgccctcgctgggctccgggttcgacccctacttcgtctactcgggctccatcccctacctcgacggcaccttctacctcaaccacaccttcaagaaggtctccatcaccttcgactcttccgtcagctggcccggcaacgaccggctcctgacgcccaacgagttcgaaatcaagcgcaccgtcgacggcgagggatacaacgtggcccagtgcaacatgaccaaggactggttcctggtccagatgctggcccactacaacatcggctaccagggcttctacgtgcccgagggctacaaggaccgcatgtactccttcttccgcaacttccagcccatgagccgccaggtggtggacgaggttaactacaaggactaccaggccgtcaccctggcctaccaacacaacaactcgggcttcgttggatacctcgcgcccactatgcgccagggccagccctaccccgccaactacccctacccgctcatcggcaagagcgccgttaccagcgtcacccagaaaaagttcatctgcgacagggtcatgtggcgcatccccttctccagcaacttcatgtccatgggcgcgctcaccgacctcggccagaacatgctctatgctaactccgcccacgcgctagacatgaatttcgaagtcgaccccatggatgagtccacccttctctatgttgtcttcgaagtcttcgacgtcgtccgagtgcaccagccccaccgcggcgtcattgaggccgtctacctgcgcacccccttctcagccggtaacgccaccacataa

SEQ ID NO: 12485 - DNA, 135 bp, unidentified; identical to SEQ ID NO: 3871
  misc_feature 1..135: note = Synthetic
  source 1..135: mol_type = other DNA

SEQ ID NO: 12486 - DNA, 135 bp, unidentified; identical to SEQ ID NO: 3871
  source 1..135: mol_type = other DNA
  misc_feature 1..135: note = Synthetic

SEQ ID NO: 12487 - DNA, 135 bp, unidentified; identical to SEQ ID NO: 3872
  source 1..135: mol_type = other DNA
  misc_feature 1..135: note = Synthetic

SEQ ID NO: 12488 - DNA, 27 bp, unidentified
  misc_feature 1..27: note = Synthetic
  source 1..27: mol_type = other DNA
atcttggcagccgggcaaggctcttaa

SEQ ID NO: 12489 - DNA, 102 bp, unidentified; identical to SEQ ID NO: 3876
  source 1..102: mol_type = other DNA
  misc_feature 1..102: note = Synthetic

SEQ ID NO: 12490 - DNA, 57 bp, unidentified; identical to SEQ ID NO: 3877
  misc_feature 1..57: note = Synthetic
  source 1..57: mol_type = other DNA

SEQ ID NO: 12491 - DNA, 12 bp, unidentified
  misc_feature 1..12: note = Synthetic
  source 1..12: mol_type = other DNA
atgatggattag

SEQ ID NO: 12492 - DNA, 264 bp, unidentified
  source 1..264: mol_type = other DNA
  misc_feature 1..264: note = Synthetic
acggcaatcccagcagaaactacaaaagcagtgggacgaggaggagacgtgggacgacagccaggcagaggaagtttcagacgaggaggcggaggagcagatggagagctgggacagcctagacgaggaggacctagaggacgtggaggaagaaaccatcgccagcgacaaggcaccatctttcaaaaaacccgttcggagccaacctccgaaaactatcccgcccctgccaccgcaaccatgttcactgaaagccagccgtag

SEQ ID NO: 12493 - DNA, 264 bp, unidentified; identical to SEQ ID NO: 12492
  misc_feature 1..264: note = Synthetic
  source 1..264: mol_type = other DNA

SEQ ID NO: 12494 - DNA, 114 bp, unidentified; identical to SEQ ID NO: 3882
  source 1..114: mol_type = other DNA
  misc_feature 1..114: note = Synthetic

SEQ ID NO: 12495 - DNA, 1473 bp, unidentified
  source 1..1473: mol_type = other DNA
  misc_feature 1..1473: note = Synthetic
atccgcgctagcgatacgctcgacgtgtactgttcgcactcgtcgtccccaatgggacgcccggcccccagaggatctcccgactccgcgccccccacgaaaggcatgaccggggcgcggacggcgtggtgggtctggtgtgtgcaggtggcgacgtttgtggtctctgcggtctgcgtcacggggctcctcgtcctggcctctgtgttccgggcacggtttccctgcttttacgccacggcgagctcttatgccggggtgaactccacggccgaggtgcgcgggggtgtagccgtgcccctcaggttggacacgcagagccttgtgggcacttatgtaatcacggccgtgttgttgttggccgtggccgtgtatgccgtggtcggcgccgtgacctcccgctacgaccgcgccctggacgcgggccgccgtctggctgcggcccgcatggccatgccgcacgccacgctgatcgccggaaacgtctgctcttggttgctgcagatcaccgtcctgttgctggcccatcgcatcagccagctggcccacctggtttacgtcctgcactttgcgtgtctggtgtattttgcggcccatttttgcaccaggggggtcctgagcgggacgtatctgcgtcaggtgcacggcctgatggagctggccccgacccatcatcgcgtcgtcggcccggctcgcgccgtgctgacaaacgccttgctgttgggcgtcttcctgtgcacggccgacgccgcggtatccctgaataccatcgccgcgttcaactttaatttttcggccccgggcatgctcatctgcctgaccgtgctgttcgccattctcgtcgtatcgctgttgttggtggtcgagggggtgttgtgtcactacgtgcgcgtgttggtgggcccccacctgggggccgtggccgccacgggcatcgtcggcctggcctgcgagcactattacaccaacggctactacgttgtggagacgcagtggccgggggctcagacgggagtccgcgtcgccctcgccctggtcgccgcctttgccctcggcatggccgtgctccgctgcacccgcgcctatctgtatcacaggcggcaccacaccaaattttttatgcgcatgcgcgacacgcgacaccgcgcacattccgccctcaagcgcgtacgcagttccatgcgcggatcgcgagacggccgccacaggcccgcacccggcagcccgcccgggattcccgaatatgcggaagacccctacgcgatctcatacggcggccagctcgaccggtacggagattccgacggggagccgatttacgacgaggtggcggacgaccaaaccgacgtattgtacgccaagatacaacacccgcggcacctgcccgacgacgatcccatctatgacaccgttggggggtacgaccccgagcccgccgaggaccccgtgtacagcaccgtccgccgttggtag

SEQ ID NO: 12496 - DNA, 90 bp, unidentified; identical to SEQ ID NO: 3885
  misc_feature 1..90: note = Synthetic
  source 1..90: mol_type = other DNA

SEQ ID NO: 12497 - DNA, 645 bp, unidentified
  misc_feature 1..645: note = Synthetic
  source 1..645: mol_type = other DNA
gtgctactgcgtctccccattcgcagcatgtccccgaaagccgcaaaacaggctattgcgcagcaacgctcaaagaaacagcagcaacggcaggaaatctgggaggaagaatcttgggagagtcaggcagaggacgaggtcgaggacttggaagaatgggaggaggaggaggcggacagcctagacgaggatccagaggaggaggaggaaggttccaaggacggagcgaccgccgccaaaccgtcgctttcaaccaagccctctccaatgaaacccgctgtgagcaaatctcagaaagccaaccgtagatgggacaccattgaaaccagcgccgcaaacttggcccctttgaagagctcgacaaggaaccgacctgcaacagccaagcggcccactagaatcggcaacagcagcaacaaggaaagtcctgaggcgcgcgagttaagaaaacgcatttttcccactttatatgctatttttcagcagagtcgaggtcaagaacacgaactgaaaataaaaaaccgttccctgcgttcacttacccgcagctgtctctacctcaaaagcgaagatcagttgcaacgcaccttgcaggacgcagaagctctgttcaataaatactgctccctctcgcttaaagagtaa

SEQ ID NO: 12498 - DNA, 576 bp, unidentified
  source 1..576: mol_type = other DNA
  misc_feature 1..576: note = Synthetic
gtgctactgcgtctccccattcgcagcatgtccccgaaagccgcaaaacaggctattgcgcagcaacgctcaaagaaacagcagcaacggcaggaaatctgggaggaagaatcttgggagagtcaggcagaggacgaggtcgaggacttggaagaatgggaggaggaggaggcggacagcctagacgaggatccagaggaggaggaggaaggttccaaggacggagcgaccgccgccaaaccgtcgctttcaaccaagccctctccaatgaaacccgctgtgagcaaatctcagaaagccaaccgtagatgggacaccattgaaaccagcgccgcaaacttgggtaagaatcgcaagcaggcgcgtcggggctactgctcatggcgggctcaccaaagtaatattgtagcctgctttcagcactgcggggggaatatctcatttgcaaggcggtatttgctataccatgatggagtggcgattccaaggaatgtcctccattactaccgtcatctctacagcccctttgaagagctcgacaaggaaccgacctgcaacagccaagcggcccactag

SEQ ID NO: 12499 - DNA, 15 bp, unidentified
  source 1..15: mol_type = other DNA
  misc_feature 1..15: note = Synthetic
attagagcctcctag

SEQ ID NO: 12500 - DNA, 495 bp, unidentified
  source 1..495: mol_type = other DNA
  misc_feature 1..495: note = Synthetic
atggcacataacacgtttgagacggatagcgagtcggctaacaacgcgaactatgttgcgtcagttaagcgtcaaaaagccatccgtcgttatattaaactgttcttccgtattgttgcagcaattgccataattgtactagctatactggtggtactgctggctttggagctagataagtgcaaagaacaatcaacacaccaagattaccaccatacaacaaataaaacatgtgatggattattcccagagaacaaatggtgtttaacaaagtttgatccctttactttgagacaggcaaagagtatgtgtactggtattggccaaactttaccttctgaagacatagttaaactatatccttggctcggcaaatacctaaccggaacatggtctgacaaaggtggcgtatttggatcttcaggaagcacttcagaagtctggagcggtgctagcgagcaggaaaaagcattcttttgtgttgcaaaactttaa

SEQ ID NO: 12501 - DNA, 81 bp, unidentified; identical to SEQ ID NO: 3893
  source 1..81: mol_type = other DNA
  misc_feature 1..81: note = Synthetic

SEQ ID NO: 12502 - DNA, 132 bp, unidentified; identical to SEQ ID NO: 3895
  source 1..132: mol_type = other DNA
  misc_feature 1..132: note = Synthetic

SEQ ID NO: 12503 - DNA, 30 bp, unidentified; identical to SEQ ID NO: 3899
  misc_feature 1..30: note = Synthetic
  source 1..30: mol_type = other DNA

SEQ ID NO: 12504 - DNA, 8697 bp, unidentified
  misc_feature 1..8697: note = Synthetic
  source 1..8697: mol_type = other DNA
atggggttgctttggctgttctccgtgttccaggtggctgggggccttttgtccccagcctcccacgcttgtgcgttcaaggggcaattttacctgacaaactgctgcgcccagtctgacgtctacatgtgcctcgaagggggttgcattgtggcgttagggtgcaccatttgtaccgacacctgttggcctttgtatcgggccggagtggcggtgcgacccgggtatccgcccggggccatagtgggctccttggggtgggcctaccctcccatggcaactgcggcgtatgtcgctggagtcactgggtttggggaagtctactccttggcgctcatgattggtgcatttgccacccgacaacaccaaccagtgcccgatctacgctgcgatgttgactgcaatgcaacatggcactcggacttgtggtacctgtcgcaggaggttgcggcggaagcttggtatgtacagtacctgtggaagctgcccttcgatttctggcggggaatgctgggcctgacaccgcttctcggatttctggctgtgctcttggggctggagcagcggttcgtgatgctattcctgctcgtcactatgggtgggatggcgtcgggagcccctgtttcaaccctaggagtgcggccagttgaccatggccccccctgggaccagtgcaactgcgtagctgggggtaaggtcgtgcgtctatgggagcgcggtaatgataccatgcattgccaatgcccgaatggtgactggtactgggttccatccaactgcgggcgagttgggtggtacgtggatgacaagttggtgatgtggtcccacggcgagcatcagtggccgttgacctgcccgcaccgggtgtcaggtccggtatctgttgtttgccagtgggggtctcgatcctggtacgctcgcaccatggtcgaaggcccgctgaacctactgtcattggtgccagaggggtccgcgctctgtcaggtacgtgtccattctcttttagccgatgctcaacaggacatcaatgagcattggggtagagtgtgtgccacctgcctgatagaccgtcgtcccttttcttgtggaacttgtgtacgtgattgctggccggatactggtaggatggcgttgtcctttgcccgttgtggcacaggacctcgcttgactggtactctggaggcatttgcgttcgcaaaccggtccacgggatacaccttccacggcccagttggggatcaaggagctggcaaccccacccgtactcccctggaaccagggaagtatgccgtcactgtcatcgatgagtcattgcacctcgttaagtgccctgtggatttacccagaccttcggggacctacgggttcttccctggtgagccgccagttaacgcttgcgtcaccaggggttccgaagtgtctgaggtgctggggggtgctggtttgacagggggcttctacgagccggtgttccggccctgtacgggctttctgtccgagccgtatcgagtgtgcccgggctacgcttgggtgagtggagcgggaccagatggattcataactgtcaggggggatgagcaggcggtgacaccccggtggtgggtaccgcctccgcgatggctcctccttgactttgtgtttgtccttctgttcctaatgaagctcgccgaagcgaagttagtcccattgattctcctggcggtttggtggtggatgaaccagattacggcagaagctgctttacatcatggcttcttcgccgcgccaattgctgcttggtgcctcaggtctgaatggattgttatggtgctagggacgttgaacctggccatctacatgaggtggctgggcccaacgcgcctgatggctctggcatgctggaaactggctaagggcgctttcccattggtgctcctgttggtcgcaggggctactcgtgggaggacgtctgtgctgggactacagttttgctttgactttaccgtagactggcagccctcccttcttgggtgggctgctgcgttggtggtgagttgggctatttttgtcacaagcaccatgagtgtgggaggctggaagcataaagctcgcctctacggcggttggtgtagggtgtaccagctgatcaggtactatgtggcggccagtcctggcggaaccaggtctgaaagtcgtgtactgcttggttgctggttgggagcgcagttcttgtttccggaagagtgtggcctggtagtgctggtcgtgatgtgtttctgtggtctgttagacggaacagattgggccatagagatacttctcaccagtagaccccagttcggccggatggcgagactgctaaactccctaattgaatccggtgacagagtgtcttcaacccgattggctgaagccttggccaggcgtggaatcttcctgtatgatcatatggggcaggttacacgtagggctagggatcagttactcgagtgggaggctttcctggagccggtcagtttcaccaaccgtgacgccgagatcatcagggacgccgcgcgagttctgacctgtggtgctagcgtcgctgggaaaccagtggtggcgcgccgcggtgatgaagtcctcatcggcactctgctgtcgctcggtgaattgcccccaggattcgtccccaccgcaccagttgtcatccgacggtgtgggaagagtttcttgggagtcgtcaaagccagcttgacgggaagagacatggatcaacatcctggcaatgtgatggtactgggcaccgccaccaatcgatcgatgggaacgtgcttggggggtttgatgtacacagcctttcacggggctggtgctcggaccctttctagtccttcgggcccgttgaaccctaggtggtggtctcccagtgatgatgtgacggtgtatccgcttcctgatgctgccgtttccttggagccgtgtacttgtaacccatgttccgcgtgggtcatcaggaacgacggttctttgtgtcatggtacgctcgctgcggatatgaaggtcgagctggatgtagccatggaggttggagacttccgtggctcctcagggtccccaatcctctgtgatgaggggcacgcgatcggcatgctgattagtgtccttcatctgggggggcgggtgaccgctgcccggtacaccaagccctggaatcaggttccctcggacgccaaaacaacgactgaaccgccgaaagttccaactcgaggtgagttccgagaggctccattgttcatgccaactggcacgggcaaaactaccaagattccttacgagtataccaagttggggcataaggttctagtccttaacccctccgtggcaacagtgaagagtcttggtggttatatggagaagcttactggaaaacatcccagtgtgtactgcggacatgacacgactgcatacactcggactacagattccccgttgacatatgccacttatggtaggtttctggccaatccccgatcaatgttgagaggggtatcggtagtcatctgcgatgagtgccatagccatgaccccacagtcttgctgggcatcggtcgtgtgcgggagttggccaaggaagcaggggcgaatttagtattgtacgccactgcaacaccaccaggtgctcctatggtcagtcacccgtccattatcgaggccaagctggacgtgggcgagatccccttttacggccacggcctcccgcttgagcgctacaggactggcagacacctcatattttgccattcaaaggcagagtgtgatcggctggctggcaacttggctgctcgcggtgtgaaggcggtgtcgtactacaggggaaaggacgtgtccatcatcaccgagggagacctggtggttgtggccacggacgccttgtctacgggctattctggaaactttgacactgttactgactgtggattggtggttgaggaagtggtcgaggtgaccctggatcccaccattacaatatcactgaggactgtaccagccagcgctgagctccggatgcaacgcagaggccgaactggtcggggtaggacgggacggtactatcatgctggggtggggtccgccccatccggcgtggtacgtaccggaccggtctggtccgccattgaggccgctgttacttggtacgggttggagcctgatctggctgcgtctttgctaagactatacgacgactgcccctacaccgcagccgtcgcagctgacattggtgaagcctctgtgtttttcgcaggtctcactcccctgcgaatgcatcctgatgttagctgggcaaaaacaagaggaacaaactggcccttacttgtgggggttcagcggacaatgtgtcgggaagtcctggctcccggcccatccgacgacccagaatgggcaggcctcaagggtccaaatcccactccactactgctgaggtggggtgggcatgctccagagaggattagcggacaccacatagtggatgacctggtgcgtcggttaggtgtggctgagggatttcaacgctgtgatgcggggccaattctcctagtgggcttagcggtcgctggggggatgatctatgcacactataccggctcattggtcgtggtgaccgactgggaagtcaaggggggcggtcaccccctccacaacaaacaacccatcatcagtacgacagtccagggtactcggcatcctggctctgaaacggctccaaatgatgcaaaggtcaacatagaagcggtcgagatgatccaagatcaggtggactggagcctcatgaacatgtccattgcagagatcatggctcttgctaaactgaaggggtgtgcagcttatgaggccacatccaggtgggtcgccggcacatacaccgggggcaaagcagctgctcctagtgtctggtcatccttgatggcgggcgggtgggccgccatagtgggccactgccagtccgtcattgctgctgccgtagctgcctacggtgcggtgcgtaatccaccattagcagcgggcgcctgtttcctcatggggacaggcgtctgcggtaacatccatgtcaagttggcaagcagcttgctacttggagctgttggtactgctttggggactcccctggttggtctgaccatggcagggtcgttcctgggcggcgccacagtagcaccatcactgaccactatccttctaggggcagttggaggctgggaaggagttgtgagtgcggcttcggctactttcgacttcatgaacggtaggttggcccttgaggatttgtggtatctcatcccagtactgaccagtcccggggcagggttagctggagtcgccctggggttggtgctgcatgctggcaacagcagcggcaacactaactggatcaataggctgttgacggctttgcccagatcgtcagtcataccagatgggtttttccatgaggctgactatgtggagaaagtgtcgcttctcctgcgccgcatgtccctgacacgcttcatcgttggtctcgtcgagcgcaagactgaagtctccgagacaacggtggggtacgtctgggacctctgggagtggttgatgcgactgctacgtcggctgaaggaccgcctgaaagcgtattgcccccaactggctctgcccttgtggcactgcggtgaggggtggtgcggtgaatggcttaccgacggtcacgtagaggctcgttgtctgtgtggctgtgtggtcacgggcgacgtcgtcaacaatcttctgacagacatacattactccactaaaacttgccgccattactggatgggcacgattccggtcaatatgttaggatatggtgacgccattcccctggttgacccagggaaagccaagaccgtcccggtgggaacatcggggtggctcgaggtgatggtgacgccaaactccgtcattttgcgccgggcatcgtcatacaagttaatcagagggcaagttatggccgctgcaaccagtgaggcctattatgtggacggcactccttgttcgtgggattcagacgccagagccccagctctggtgtacggcccgggacagagcgtggagatagacggtgaaaggcacactctcccatacaccatgcgcatcaacagatgggtggaatcggaggacagttatcgggtaactccgctggcggatgaacccgatctgactccgaaacccgctcaatcggaggtgagcttggagggggagctgccgcctgccgccgcagccctctacgccctggaacaggccgctaaggttctggaaccccatgtcaacttgttgtgcccagcagtgatggatgattgcagcactccatcactttgtggctcatctcgaatgatgccctgttacgactccttgccggccaccccggaacccggggtgatcggtcatgacaagttgggacagttggtgatcattccgcaggattcatcatcaatggatgagccagaactttcatctgagtgtccaccagacctgcgagaaggttccatggaggagcttagcgaggaaccgccaccggatcttcgcgaagaacctgaacaggagctgagtagcagttcaatttgtccttgcactgatgagtcatctctggaaagttgggtggatctgcccctgcagagtccgccaaatgagccagtagtggaggcaacagtgaccaaggccattgtgcaccgtgaagatgagagtgctatgcatgcagttctgacagctttgagatccattctcccatctaaggaagccacccggaagctagctgtgcgcatggaatgctgttgcgagaggtacatcactcgatacttttcgctcagcctcaccgtcgcagatgtagcaaatttgtgtgatatagatgtggagaatcacaaggcctattgtgactcggtgtcagtcgccttcaccctgagggtggctgacttggttggcaatgttcttcattttgaatgtgacaagactgagggacgcaaggagacggcctgttcttactcctatgtgtggtacggggccccattaggggggaggcccacaaagcctcctgtgactaggcccgttggctcgctgttagcagcggacgctagcgctacctatgttacatctcccgaccacgtcggacggaggatagataaggtcaccttctggcggaaacccagggtgtgtgattcattccttgtgactgaaatcgagcgcgcgcggcaacgtgcgtgcaaagtggattcacatgggtatgattacgaggaagcaatcaagactgtaagaccacatgctgccatgggctggggatctaatgttagtgtaagcaaacttgccactccggaaggcaagaatgctgtatatgagagactcaatgacatagtggcacaaaaggaaataccatttaccctgactatgaaaaaggaagtgttcttcaaggaccgtgcggagcccaaggccccgaggctgatttgcttcccgcccctagacttcagagtgtgtgaaaaactcattctcggagacccggggcgggtggcgaaagcagttttgggaccggcctacgcatttcagtatactcccaatcagcgcgtgaaaaccctggttgagatgtggaaaagaaagagaactccctgtagtattacggtcgatgctacctgcttcgatagtagtatcacagaggaggatgtggaactggagacagaattgtacgctttggccagcaacaaacctgagctggtaaaggctttgggaaagtactacgcggccggacccatggttaacccggaagggattcccgtgggggagcgccgctgcagatcttctggtgtgttgaccaccgctgctagcaactccatttcctgttttatcaaggtgagcgctgcatgcgctcgcattggtttacgggacgtggagatgctggtggcgggggacgactgcatcataatctgcgagagacctatctcagacccttgcgtggagctagaaatggctctacgctcttatggctacaacactgaacccaaatttcatgtcagtctggacacagccaatttttgctccacctggttggcggagtgcaatgcggatggttccagacactatttcttgaccactgatatgcgcaaggccttagcccgcatgtccagtgaatactctgaccccatagcctcggccttggggtatacccttttgtacccttggcatcctatcatacgctgggttgtactacctcatctccttaacgtcgcctttcgaggtggcggtaagcctgacgatccagtatggtgtcaagtacatggtaattactacaagttcccgctgtcgctcctaccgcggatcatcgtatcactacatggtccagctgctctgagagtgacagcggatacaaccaagacaaagatggaagccggtcagacccttgctgctttcaagctcccaggccttgccacccatcgccggaaagctggtgcgctgcgtactcgtatgctgcgtgctggtggcggttgggctgagctggctaggggcctgttgtggcatcccggtctacggctaaaaccaccaaactacaacagcttgcctggaggtttccctctgggcgagccgtattatggtgtctactttgaactggaagaacctggcttgcgccggcgttggcactggttgtggggtttaatacccttcttgatcgtcgccatcttcggttga

SEQ ID NO: 12505 - DNA, 855 bp, unidentified
  source 1..855: mol_type = other DNA
  misc_feature 1..855: note = Synthetic
atgtcggtaatcaaggactgttttctcaatctgctcgaccgctggaggcctcctaagacgtcgcgaccgtggaaacccgggcaacgcgtggccctggtctggcccaaagaccgctgcctcgttatccggcgtcgctggcgcttggtgcgcgacgaaggacgggatgcacagcgtctggccagctacctctgctgccccgagccgctgcgtttcgtcggcagcatctgcacctacaactttcttaaacacaagggcgatcacaacgtgccgtctgaactgtacctgggcgcctcgggcgccatgtacctatggaccgaccacatctactctgactcgttgacctttgtggccgagagcatcactgaatttctcaacatcggtttgcgacgctgcaacttcatcaccgtcccagaggagctgccgcacaccgcctcgcttagagcgctggccggctgcatgcacatccacgcgttcgcgcagtggcgtgctacgtatcgcggccgactcatggtcatgggtgattacagcgtcattcgcgtctccacgattcggctgtacgactggagcgagattaacgactggagggtcatggtcggcagtaaccacgtggaacctttaggctggttggtgagcccctacgacgtgatcaacctcttcgtggacgactgtatgcgcgtctttgctgccaacaatcagcacgtttgcatcgtggccgacagtttgatggagtttgtgactcgcggcatgacacgctgccacgaaaacggcatttattacggaaccaggagcatgcggaagctaaataagcctacctgtccttacggagtggaccaccaactttttgacgacgcgtga

SEQ ID NO: 12506 - DNA, 462 bp, unidentified
  source 1..462: mol_type = other DNA
  misc_feature 1..462: note = Synthetic
atggcctcttcttgtgcccagttcagtccctgtcattgccatgctactaaggactccctgaataccgtggcagacgtcagacattgtctgactgaatacatcctgtgggtttctcatagatggacccatagagaaagcgcagggtctctttacaggcttctcatctctttcagaactgatgcaacggagctctttggtagcgagttgaaggagttctcggattcacttccgtgggacaatatagacaattgcgtggagatcattaaatgtttcatcagaaatgactccatgaaaaccgccaaagaactttgtgcaatcattggactttgtactcaattagctatcgtctctggaagagtcttcaacgataagtatatcgacatactacttatgctgcaaaagattctgaacgagaacgactatttcaccctcttggatcatatccgcactgctaaatactaa

SEQ ID NO: 12507 - DNA, 87 bp, unidentified
  source 1..87: mol_type = other DNA
  misc_feature 1..87: note = Synthetic
atggctgttctactattgcgcaagccgtccgccgttatagcgaggccgctagcaatggttttagggcatgccgatttgtttcattag

SEQ ID NO: 12508 - DNA, 87 bp, unidentified; identical to SEQ ID NO: 12507
  misc_feature 1..87: note = Synthetic
  source 1..87: mol_type = other DNA

SEQ ID NO: 12509 - DNA, 138 bp, unidentified
  misc_feature 1..138: note = Synthetic
  source 1..138: mol_type = other DNA
atcttcgcctggtacgcgcggcacatgctgttcatgtccacctccgacaaaatcaagctcgagctcgccaagaagcccgtggtgcactggaccacctacctggacaccttctttacggaatttccgccgtccgtctag

SEQ ID NO: 12510 - DNA, 123 bp, unidentified
  misc_feature 1..123: note = Synthetic
  source 1..123: mol_type = other DNA
ctggacagctaccaccgcttcgacatgctgcgcgcggacaccgaggagctgctgcgcacgctcaaggcggccttcgcgcggctgcgcgccgcggagctgcgcgagctccgcgccgacgaataa

SEQ ID NO: 12511 - DNA, 27 bp, unidentified
  source 1..27: mol_type = other DNA
  misc_feature 1..27: note = Synthetic
acgaagaatattaaagtttggaaataa

SEQ ID NO: 12512 - DNA, 27 bp, unidentified
  misc_feature 1..27: note = Synthetic
  source 1..27: mol_type = other DNA
acgaagaatattaaagtttggaaataa

SEQ ID NO: 12513 - DNA, 1272 bp, unidentified
  misc_feature 1..1272: note = Synthetic
  source 1..1272: mol_type = other DNA
acgccctttgcaaattatttaaaaggtgaatgctcaactgagaccatcgcaatcatgaagtcctccaagaatgacacgttcgtctatagaacgtgggtcaaaacgcttgttgtgtactttgtgatgtttgtcatgtcggcggtggtccccatcaccgccatgttccccaacctggggtacccctgctactttaacgcactggttgattacggggcacttaacctgaccaattacaacctggcccaccacctgacccccacgctctatctggagccgccggagatgtttgtctacatcacactggtctttatcgcggactgcgtggctttcatctactacgcctgcggcgaggtggcgctaatcaaggcccgaaaaaaggtctcgggtcttacagacctctcggcctgggtctcggcagtgggctccccaaccgtgctgtttttggccatcctcaagctctggtccatacaggtcttcatccaggtcctttcctacaagcacgtctttctctcggcctttgtgtactttttgcactttctggcctcagttctacacgcctgcgcatgtgtgacccgcttctccccggtctgggtggtcaaggcccaggacaactctattccccaggacaccttcttgtggtgggtggtcttctacctgaagcccgtagttacaaacctgtacctggggtgccttgccctggagacgctggtcttctcgctcagcgtgttcctggccctgggcaacagcttttactttatggtgggggacatggtgctgggagccgtgaacctcttcctcatcctgcccatcttctggtacattctgacggaggtgtggctggcctccttcctgcggcacaactttggcttctactgcggcatgttcatcgcctccatcatcctgatcctgcccttggtcaggtacgaggccgtctttgtctccgccaagctgcacaccactgtggccatcaatgtggccatcatacctatcctgtgctcggtggccatgctcatcaggatatgccggattttcaaaagcatgcgccagggcactgactatgtccctgtctcggagacggtggaactggagctagagtcagagccgaggcctaggccctcgcgcacgccatcacccgggcgcaaccgccgccgctcttctacgtcctcatcttcctccaggtcaaccaggagacagaggcccgtctctacccaagccctcgtctcctccgttttaccgatgacgacggacagcgaggaggagatcttcccctaa

SEQ ID NO: 12514 - DNA, 1272 bp, unidentified
  source 1..1272: mol_type = other DNA
  misc_feature 1..1272: note = Synthetic
acgccctttgcaaattatttaaaaggtgaatgctcaactgagaccatcgcaatcatgaagtcctccaagaatgacacgttcgtctatagaacgtgggtcaaaacgcttgttgtgtactttgtgatgtttgtcatgtcggcggtggtccccatcaccgccatgttccccaacctggggtacccctgctactttaacgcactggttgattacggggcacttaacctgaccaattacaacctggcccaccacctgacccccacgctctatctggagccgccggagatgtttgtctacatcacactggtctttatcgcggactgcgtggctttcatctactacgcctgcggcgaggtggcgctaatcaaggcccgaaaaaaggtctcgggtcttacagacctctcggcctgggtctcggcagtgggctccccaaccgtgctgtttttggccatcctcaagctctggtccatacaggtcttcatccaggtcctttcctacaagcacgtctttctctcggcctttgtgtactttttgcactttctggcctcagttctacatgcctgcgcatgtgtgacccgcttctccccggtctgggtggtcaaggcccaggacaactctattccccaggacaccttcttgtggtgggtggtcttctacctgaagcccgtagttacaaacctgtacctggggtgccttgccctggagacgctggtcttctcgctcagcgtgttcctggccctgggcaacagcttttactttatggtgggggacatggtgctgggagccgtgaacctcttcctcatcctgcccatcttctggtacattctgacggaggtgtggctggcctccttcatgcggcacaactttggcttctactgcggcatgttcatcgcctccatcatcctgatcctgcccttggtcaggtacgaggccgtctttgtctcagccaagctgcacaccactgtggccatcaatgtggccatcatacctatcctgtgctcggtggccatgctcatcaggatatgccggattttcaaaagcatgcgccagggcactgactatgtccctgtctcggagacggtggaactggagctagagtcagagccgaggcctaggccctcgcgcacgccatcacccgggcgcaaccgccgccgctcttctacgtcctcatcttcctccaggtcaaccaggagacagaggcccgtctctacccaagccctcgtctcctccgttttaccgatgacaacagacagcgaggaggagatcttcccctaa

SEQ ID NO: 12515 - DNA, 1218 bp, unidentified
  source 1..1218: mol_type = other DNA
  misc_feature 1..1218: note = Synthetic
atgaagtcctccaagaatgacacgttcgtctatagaacgtggttcaaaacgcttgttgtgtactttgtgatgtttgtcatgtcggcggtggtccccatcaccgccatgttccccaacctggggtacccctgctactttaacgcactggttgattacggggcacttaacctgaccaattacaacctggcccaccacctgacccccacgctctatctggagccgccggagatgtttgtctacatcacactggtctttatcgcggactgcgtggctttcatctactacgcctgcggcgaggtggcgctaatcaaggcccgaaaaaaggtctcgggtcttacagacctctcggcctgggtctcggcagtgggctccccgaccgtgctgtttttggccatcctcaagctctggtccatacaggtcttcatccaggtcctttcctacaagcacgtctttctctcggcctttgtgtactttttgcactttctggcctcagttctacacgcctgcgcatgtgtgactcgcttctccccggtctgggtggtcaaggcccaggacaactctattccccaggacaccttcttgtggtgggtggtcttctacctgaagcccatagttacaaacctgtacctggggtgccttgccctggagacgctggtcttctcgctcagcgtgttcctggccctgggcaacagcttttactttatggtgggggacatggtgctgggagccgtgaacctcttcctcgtcctgcccatattctggtacattctgacggaggtgtggctggcctccttcctgcggcacaactttggcttctactgcggcatgttcatcgcctccatcatcctgatcctgcccttggtcaggtacgaggccgtctttgtctccgccaagctgcacaccactgtggccatcaatgtggccatcatacctatcctgtgctcagtggccatgctcatcaggatatgccggattttcaaaagcatgcgccagggcactgactatgtccctgtctcggagacggtggaactggagctagagtcagagccgaggcctaggccctcgcgcacgccatcacccgggcgcaaccgccgccgctcttctacgtcctcatcttcctccaggtcaaccaggagacagaggcccgtctctacccaagccctcatctcctccgttttaccgatgacgacggacagcgaggaggagatcttcccctaa

SEQ ID NO: 12516 - DNA, 1143 bp, unidentified
  source 1..1143: mol_type = other DNA
  misc_feature 1..1143: note = Synthetic
atgcatccggtgttgcgacagatgcgtccgacggcgcctccaacacagccgccgctcccgccccccactagcgcccctgcagccgttgctctctccggagccggcggtggcaaccctgaggaggaggccatcctggacctggaagagggcgaggggctggcccgcttgggggcgccatcccccgagcgccatccccgcgtgcaacttaaaaaggactcacgccaggcgtacgtaccgcctcagaatttattcagggatcgcagcgggcaggagcccgaagagatgagggatcgcaggttttacgcggggcaggagctgcgggccggttttaaccgccaacgggtgctacgcgccgaagattttgaacccgacgaacatagcggaataagtccggcacgggcgcacgtgtcggcggccgatttggtaaccgcgtacgagcaaacggtgaacgaggagcgcaactttcagaaaagttttaacaatcacgtgcgcaccctggtggcgcgcgaggaggtggccattgggctgatgcatttgtgggactttatggaggcgtacgtgcaaaatccttcgagcaagccgctgacggcgcagctgtttttgattgtgcaacacagccgggacaacgaggctttccgcgaggccatgctgaatattgcggagcctgagggtcgctggcttttggacctggttaatatccttcagagcattgtggtacaggagcgcagtctaagcctggccgacaaggtggcggccattaattacagcatgcttagcctcggcaagttttacgcccgcaagatttacaaaaccccctatgtgcccatagacaaggaggttaaaatagatagcttttacatgcgcatggcgctaaaggtgttaacgctgagtgacgatctgggggtgtaccgcaacgaccgtattcacaaagctgtgagcgccagccgccgtcgcgagcttagcgaccgcgaactaatgcacagcctgcgtcgggctctaacgggcaccggcactgatgccgaaactgaatcttactttgacatgggggcggacctgcaatggcagcccagcgcccgggccctggaggcggctggttatgttggcgcggaagaagatgaggaggactatgaggacgagccctga

SEQ ID NO: 12517 - DNA, 1482 bp, unidentified
  source 1..1482: mol_type = other DNA
  misc_feature 1..1482: note = Synthetic
ataaaaatgggacaaataatcaccttctttcaggaggtgccacacatcatagaagaagtgatgaacatagtcctcatcactctgtcccttcttgcaatactcaaaggaatttacaacctggcaacatgtggactgttaggtttgatttcatttttatttctctgtgggaggtcatgcacaatggtatacaaggacaactatgctctgaacagtgtggagctcgacatgtccactttgaattatacaatgccgttgtcctgttctaagaacaacacccatcattacattcagacctacaatgattccggcttggagcttacattgacaaacaattccattttgagtcataagttctgcaatctctctgatgcacacaaaaggaacctgtatgatcacacccttatgtccatagtaacaactttccacctaagcattccaaacttcaatcagtatgagtctatggcctgtgactttaatggcgggaagataactgttcagtacaatttaagtcactcatcaccaactgatgcagcaaaccactgtggtacagttgcaaatggtgtcctagacacattcagaaggatgcattggggaccagcacattttcccaacccccccttcaccattggaggggtttcgtgcatccagacaagctatcagtacctcatcattcagaacacaacatgggaagatcattgccaaatgtcaaggcccacacccatgggctacttatcactgatagcacagagaacaagacaactatacatttcaagaagactaatggggacctttacctggaccttgtctgattctgccgggaatgatctgcctggaggttactgcctacagaggtggatgttgattgaggctgagatgaagtgttttggcaacactgctgtagctaaatgcaatcaacagcatgatgaggagttttgtgatatgctgagactgttcgatttcaacaaagaagcaattagaagactgaaagttgaggcagagagaagcatcaaccttatcaacaaagcagtgaattcccttattaatgatcagctgataataagaaaccacctgagggatctaatgggtataccttactgcaactactcaaagttctggtacctaaatgacacaaggaacggaaagacatctctgccaaaatgttggaaagtttcgaacaactcttaccttaatgaaacccacttttcaaatgaaattgaggaggaggccaacaatatgataacagaaatgctcagaaaggagtatgagaagagacagagtacaactccccttggtttggtggacctctttgtattctcaacctctttctacttaattagtgtgtttcttcacctaataaagatccctacacacagacacattgttggcaagggctgccccaaaccccacagattgaatcacatggcggtttgtagctgtggtgtttttggccaaccaggacttcctgtgagatggaagagatga

SEQ ID NO: 12518 - DNA, 51 bp, unidentified; identical to SEQ ID NO: 3915
  source 1..51: mol_type = other DNA
  misc_feature 1..51: note = Synthetic

SEQ ID NO: 12519 - DNA, 2196 bp, unidentified
  misc_feature 1..2196: note = Synthetic
  source 1..2196: mol_type = other DNA
aaggaaccagtggtgcgtaaaaagaaacagttttatccaaatccaaagtttaataatagatttaataagaaatttgtgaaaaaacagctagataaaaatttgaagaaacaagggtttgaaggaccaaaacctagatttgctgtcaccgtctctgccaccattggcaaggtcgggccaaataaaagtcagggacctgaactccaaatatccactttcatgcatcccagcttgatgaaagagccaaatgatggcacaaattttggtcccctacagtcagcagctgcacaatggggtttgtggcgcttgaaaaatttgagcgtcacgtttactccccttgttggtccatcagcagttaccgggtctgttttccgcatatccctaaacatggcacagtcacctggagccacgtcatgggggggtcttggtgctaggaagcacaaggatgttgctgtgggaaagcagttcacttggaagctacagaagggagacctcacaggccccagggaaacctggtggcttacagacacaaatgaagagggagcacaaagttgtgggcctcttcttgagatccatggccttggtgaaacaacttctacatacaaggatgcagcatgggctggagacctcttcattgttgaggtcaggggtcgctgggagtttgcaaattacaacagcaaacctgcattaggcatgttggagagggtgactgaaactaccaatgcttcaattgaagtagctaatggcaatatgattatgacagttccacagaattcccagcttgcaaggcatatgagtgaaaggttcgagaggaccacaaatgcaagtactgttggtgaaacaatatggcagattgtggatgagggtgctggtttggttgcaaatgtcgcaccacccccgttcacttggttgatcaaagggggatggtggtttgtcaagaaattactaggtagatcagcaaatactgatgtccaatatctagtttatgcatcattggcagacgcccaaaacaatagacctgtagaggcacaaaattacacaaaagtcacacgacagacaacactttcttccacgcaaatcaatgcacctaacacaggccctaacaccactacagggtcaattggaaataacaaccaacagtggccgatacctccgacaggggtgccggttggtgacttttatgtctgtggcaggatgacaacattgcatatgggtggtcagtctggcattcaagccacgactctagtgaatgggatgatatatcgtacagaccacccagaaccatcaacaagcccagtttccaattgggaattcacagttttggaaaacaacacaattgttggtgctggaatggggtgtgtgtggtttcagaaatccgaagcactagtgtggacgctagatggccagaagctgtcaggatggaacacactagatggtgttggtacaacccaattgacagtcgcctggagacagcataacagaacaatttatggatgggctaatgttgttgcttggaactctgaagaatggcatacaaatgcagaacaaccacaccagcctatattgaggctgacatattggctagtaaaaattaatgttttgtctgaaccagaagattttgatgttgtccaaaaatccccattagcttatttagaagattatactacagcacaatcaaaatctgccatccaaaagctcaacttccaaacgtttcagaaacctgaagggggaggcactttgcgggcacaatactcaactactcccaggcaaggggattttgccgtaatatggcagattggtagacataattttgacatgtctaccggtaagggtacaccagttgaaagtttgagtgattatgtcatgccccagcagaaagatgcccatattggtatgtggtatcgtgctttaaccagtgttggaccaagatcagatgttttgacccttcatttccacttgccaactgtggaaaaagatttggttgagcagatcattgatcaaattcagcatcgctacagattgaccccactggattcggattcagactcctctagttctgattccgatttcgagcctgaagatagatttgagaagttaaaaatctatgagggtctcaggtccagtggtctgtcacaccatgtatctgatggtgctgcgatagctgtcaagaaaaaattgcgccgaggccacgccgagtag

SEQ ID NO: 12520 - DNA, 33 bp, unidentified; identical to SEQ ID NO: 3917
  misc_feature 1..33: note = Synthetic
  source 1..33: mol_type = other DNA

SEQ ID NO: 12521 - DNA, 201 bp, unidentified
  misc_feature 1..201: note = Synthetic
  source 1..201: mol_type = other DNA
atgcggcacctgttcatgcacttctgcgagcaccgactgcggtccaacacgttcgccgccgtcgtgttcaaaaccgtgatcagcatgatcatgtacctgctgctaggcgtcgcgctcatctacatgttcagcgaccccgagtgttccggcggcgagcgcacgccgacgtctatggcgacgcgcggcacgcagacgggctag

SEQ ID NO: 12522 - DNA, 30 bp, unidentified; identical to SEQ ID NO: 3920
  source 1..30: mol_type = other DNA
  misc_feature 1..30: note = Synthetic

SEQ ID NO: 12523 - DNA, 30 bp, unidentified; identical to SEQ ID NO: 3921
  source 1..30: mol_type = other DNA
  misc_feature 1..30: note = Synthetic

SEQ ID NO: 12524 - DNA, 114 bp, unidentified
  source 1..114: mol_type = other DNA
  misc_feature 1..114: note = Synthetic
ctggtggctgcttctgggacgacacaagctcagtttggtatgcaactacgtcacagctcatcgccaacagttactgccgctgccgtggcccgaacaggaatttctccaacttga

SEQ ID NO: 12525 - DNA, 114 bp, unidentified; identical to SEQ ID NO: 12524
  misc_feature 1..114: note = Synthetic
  source 1..114: mol_type = other DNA

SEQ ID NO: 12526 - DNA, 33 bp, unidentified; identical to SEQ ID NO: 3926
  source 1..33: mol_type = other DNA
  misc_feature 1..33: note = Synthetic

SEQ ID NO: 12527 - DNA, 270 bp, unidentified
  misc_feature 1..270: note = Synthetic
  source 1..270: mol_type = other DNA
aagaggatggatccccctcggacgccgccgccgtcctattcagaggtgctgatgatggacgtcatgtgtggacaggtttctccgcacgttatcaatgatacatcgtttgttgaatgcataccgcctccgcagtctcgcccagcgtggaatttgtggaacaatagacgaaagacgttttcttttttagttttgacgggcttggctatcgcaatgattttgtttattgtgtttgttctttacgttttccatgtgaatcgtcaaaggcgatga

SEQ ID NO: 12528 - DNA, 234 bp, unidentified
  misc_feature 1..234: note = Synthetic
  source 1..234: mol_type = other DNA
atggccctcacatgccgcctccgcgttcccattacgggctaccgaggaagaaaaccgcgccgtagaaggctggcggggaacgggatgcgtcgccaccaccatcggcggcggcgcgccatcagcaagcggttggggggaggcttcctgcccgcgctgatccccatcatcgccgcggcgatcggggcgatccccggcattgcttccgtggcggtgcaggcctctcagcgccactga

SEQ ID NO: 12529 - DNA, 48 bp, unidentified; identical to SEQ ID NO: 3933
  source 1..48: mol_type = other DNA
  misc_feature 1..48: note = Synthetic

SEQ ID NO: 12530 - DNA, 906 bp, unidentified
  misc_feature 1..906: note = Synthetic
  source 1..906: mol_type = other DNA
atgacctctcgccgctccgtgaagtcgggtccgcgggaggttccgcgcgatgagtacgaggatctgtactacaccccgtcttcaggtatggcgagtcccgatagtccgcctgacacctcccgccgtggcgccctacagacacgctcgcgccagaggggcgaggtccgtttcgtccagtacgacgagtcggattatgccctctacgggggctcgtcatccgaagacgacgaacacccggaggtcccccggacgcggcgtcccgtttccggggcggttttgtccggcccggggcctgcgcgggcgcctccgccacccgctgggtccggaggggccggacgcacacccaccaccgccccccgggccccccgaacccagcgggtggcgactaaggcccccgcggccccggcggcggagaccacccgcggcaggaaatcggcccagccagaatccgccgcactcccagacgcccccgcgtcgacggcgccaacccgatccaagacacccgcgcaggggctggccagaaagctgcactttagcaccgcccccccaaaccccgacgcgccatggaccccccgggtggccggctttaacaagcgcgtcttctgcgccgcggtcgggcgcctggcggccatgcatgcccggatggcggcggtccagctctgggacatgtcgcgtccgcgcacagacgaagacctcaacgaactccttggcatcaccaccatccgcgtgacggtctgcgagggcaaaaacctgcttcagcgcgccaacgagttggtgaatccagacgtggtgcaggacgtcgacgcggccacggcgactcgagggcgttctgcggcgtcgcgccccaccgagcgacctcgagccccagcccgctccgcttctcgccccagacggcccgtcgagtga

SEQ ID NO: 12531 - DNA, 318 bp, unidentified
  source 1..318: mol_type = other DNA
  misc_feature 1..318: note = Synthetic
atacgcgcaacattgaaacattatatccacctctcaaacggcggtatggtccgacgcgtcctcctcgagcgcgtggacggcatcgttgagcactcgcgtgcagaccgacgctacttggaggccattcagcgacacctcgaggggtctacgcccgggctgcggcagatgtggcgcttcatctacgacctgctgctgacggtgttcgtcgtcatgtacatcgtcttccgcctaatcgtgcgcaaccccggcatctgcgccatcctcgcgctcgcggccgcagtgtactacctgtttttgtgtctctttagcatggactga

SEQ ID NO: 12532 - DNA, 2772 bp, unidentified
  misc_feature 1..2772: note = Synthetic
  source 1..2772: mol_type = other DNA
atggccaccccctcgatgatgccgcaatggtcttacatgcacatcgccgggcaggacgcctcggagtacctgagcccgggcctggtgcagttcgcccgtgccaccgatacctacttcagcctggggaacaagttcagaaaccccaccgtggctcccacccacgatgtaaccacagacaggtcgcagcgactgacgctgcgcttcgtgcccgtcgaccgcgaggaaaccgcctactcttacaaagtgcgctttacgctggccgtgggcgacaaccgggttttggacatggccagcacctactttgacatccgcggcgtgctggatcgtggtcccagctttaaaccctattcgggcactgcatacaactccctggcccccaaaggtgctcccaatcctagccagtggacaaaccaaaacaaaacaaactcctttggacaagctccctatataggacaaaaaatcaccaatcagggcgtgcaagtgggctcagactccaacaatcgcgatgtgtttgccgataaaacgtaccaaccggagcctcaagtggggcagacgcaatggaacattaatccaatgcaaaacgctgcgggaagaatactaaaacaaaccacgcccatgcagccatgttatgggtcatacgctagaccaacaaacgaaaaaggaggtcaagccaagctggtaaaaaatgacgacaatcagaccacaacaacaaacgtaggtttaaacttttttaccactgccactgaaaccgctaatttttcaccaaaggtggttctgtacagcgaagatgttaacttagaagcgcccgatacccaccttgtgtttaagccagatgtcaacggcacaagtgccgagcttttactgggacagcaggccgctcccaatcgacctaattacattggttttagggacaacttcattggtttgatgtactacaattccactggcaacatgggagtgctggccgggcaagcttctcagctcaacgcagtggtggacttacaagatagaaacacggagctgtcttaccagttaatgcttgacgctttaggggatcggagtcgatacttctccatgtggaaccaggcagtggacagctatgacccagacgtgagaattattgaaaatcatggcgtggaagacgagctccccaactattgctttcctcttaatgggcaaggaatatctaacagttaccaaggcgtaaagactgacaatggaactaactggtctcagaataatacagacgtctcaagcaacaacgaaatttccattggcaatgtgtttgccatggagattaatctggcggctaacttgtggagaagcttcttgtactcaaatgtagccctgtacttgcctgactcttacaaaataacccccgataacattactttacccgacaacaaaaatacatatgcctacatgaacggtcgggttgccgtccccagcgccctggatacatacgtgaacattggggcgcggtggtctccagaccccatggacaacgttaatccctttaaccaccaccgcaatgctggtctgcgctaccgttctatgctcctgggtaacggccgctacgtgccttttcacatccaagtgccccagaaatttttcgccattaaaaatctcctgctcctgcccgggtcctacacctatgagtggaacttccggaaggatgttaacatgattctccaaagcagtctcggtaacgacctcagggtcgatggagccagcgtcaggtttgacagcattaacctgtatgccaactttttccccatggctcacaacaccgcttccaccttggaagcaatgcttcgtaatgataccaacgatcagtctttcaacgactacctctgcgctgcaaacatgctttaccccatacccgccaacgctactagcgtgcccatttctattccttcgcgaaattgggctgcttttcgggggtggagttttactagactaaaaactaaagaaaccccctctttggggtccgggtttgatccatatttcacctactctggctccgtcccatacttggatggcaccttttacctgaaccacacttttaaaaaggtgtccgttatgttcgactcctctgtgagctggcctggtaacgaccgactacttactcccaacgagtttgaaatcaaacgaaccgtggatggggaaggatacaacgtggctcaatgtaacatgaccaaggactggttcctcatacaaatgctcagtcactacaatattggctaccagggtttccacgtaccagaaagctacaaggacaggatgtactcctttttccgaaacttccaacccatgagccgccaggtggtagacactaccacctacacggagtatcagaatgtaactctccctttccagcataataactctggctttgtaggatacatgggacctgccatacgggagggacaagcttaccccgccaactatccatacccccttattggtcagacggccgtaccaagcctgactcagaaaaaatttctttgcgatcgtaccatgtggcgcattcccttttccagcaactttatgtctatgggggccctgaccgacctggggcaaaacatgctgtacgccaactccgcccacgcgctcgacatgacttttgaggtggaccccatggatgagcccacacttctctatgttctgttcgaagttttcgacgttgtgcgcatccaccagccgcaccgcggcgtcatcgaggccgtctacctgcgtacgccgttctcggccggtaacgccaccacataa

SEQ ID NO: 12533 - DNA, 798 bp, unidentified
  source 1..798: mol_type = other DNA
  misc_feature 1..798: note = Synthetic
atgaacttctttgcggtagactatccacttgtttctttctcagtcaataaactgagaagaattcaagttgattatgttccttattgcaaggaagatcgtgatccaataagcttatatgattgcttagagtttcctgtgacctctttcactcaagtccctgggatcagatcaaagctcagggactattatgatttcaatcagctgccagttagctggggtcctgctaagcctggggtgtccaatgaatcatccactaagttctcctctttgattagcaaaattgctgatttagaagtaactgactgcttaaaacataatgaaccaaatataaaaagggctctttcatggccttattcatatcctagcctactattctttaagctatcagcaaagaaggatgattatgggatttgggagtacaaaggccttgcaatgacttccataatgagagcatctaaagtcacacagattgataggtgtgttgtatttttccacaagaaaatattgagagaggcaatggaattaggagagcctgaaggagagtaccctggcagagacctatttctagagtgtgcatctgtgatatgtgttaggctactcagagcatataagtatgacctgatttatgatgagccacattctaaactcctgaagttaatcagagaatttgatgaaacattcttgctttctaccactgagccccactttggaatagctaaagatgaatttgatacaagtatgaaaaggcaggaagctgaagagactttctggggttcagacttcactgacagtgattga

SEQ ID NO: 12534 - DNA, 108 bp, unidentified; identical to SEQ ID NO: 3943
  source 1..108: mol_type = other DNA
  misc_feature 1..108: note = Synthetic

SEQ ID NO: 12535 - DNA, 273 bp, unidentified
  source 1..273: mol_type = other DNA
  misc_feature 1..273: note = Synthetic
aagaggatggatcgccctcggacgccgccgccgtcctattcagaggtgctgatgatggacgtcatgtacggacaggtttctccgcacgctagcaatgatacatcgtttgttgaatgcttaccgcctccgcagtcatctcgctcagcgtggaatttgtggaacaagagacgaaagacgtttgcttttttagttttgacgggcttggctatcgcaatgattttgtttattgcttttgttatttacgttttcaatgtgaatcgtcgaaaaaaatga

SEQ ID NO: 12536 - DNA, 495 bp, unidentified
  source 1..495: mol_type = other DNA
  misc_feature 1..495: note = Synthetic
atgagttggattgcaggagcaatgcagggcgctggcctgctgggtgatcttgcaggcacaattggacaaatagtgttgcataacaagcagttgaatattatgaattcttttaatcaggctcagatacagttggctaaagatcaattgaaacaaaatcagcaattagccaaccagtattatgaatttaatgcaaatttacctgttaatcagtacaatagtgccgtgagtgctggttttgactcagtttccgcgcgtcaattggctgggtcacgtgaagtgcgctaccttggtgggcaacaaacacctttggtccaccaaggacagatacaccaaatgatgttttcaccaaaacacttaatgcaagcacaacacgtggtcggcactttttcccgtgggatgcctggtgtcacccccagtaagggattgcccagaccacagggcgttacagccaaagtgcctgtggctggagccaccaccactcacagcaaagtgtga

SEQ ID NO: 12537 - DNA, 111 bp, unidentified
  source 1..111: mol_type = other DNA
  misc_feature 1..111: note = Synthetic
ttgacagttcatcccatgacagactttccctacgaacaaatacaagagacagaaaacattagacataactctatgaacataacaccccgcttcaaacgtatgcaattgtaa

SEQ ID NO: 12538 - DNA, 837 bp, unidentified
  source 1..837: mol_type = other DNA
  misc_feature 1..837: note = Synthetic
atgtgggacgcacctccaaagaaatgctggaaaaaaaaaggacaatcagtattagtgaaatttgatggcagcagtgacagagacatgatatatacaagctggggattcatttatgtgcaggacactatcactgattcctggcataaggtgccagggcaggtggacgaactgggattatattatgtgcacgatggtgtacgtgttaactatgtggactttggaacagagtccttgacctatggggtcaccgggacgtgggaggtgcacgtggctgggactgttattcaccatacatccgcatctgtgtctagcacccaggccagcgcctcggacgacgaaccactatcccctattagaactgctgtatccccagtcccagccccagtcgcagcctcagcagaatcaacaggagcaggaagagcagctccgcccacccaagcgttgtgctccgcccaggcgccaacgagtccgccggccaagcgccagcgtgtcatcgtcggacagcagcatccccggcccgactctacgcgaacggtcggagagggggaagtggagtgttacaacaagcggagcatcagtgactctaaccgcacagaccccaggtggggccacggtgacactgactctgtgcctgtaatccacctgagaggtgatgcaaattgtttaaagtgcttcagatacagggtgcaaaaacataaagacgtactgtatgccagggtgtcctccacgtggcactgggcgggtgggaacggtgataagacagcctttgtaacactgtggtacaccagcgttgaacagcgtacagagttcctgacaagagtcagtatacctaaggga

SEQ ID NO: 12539 - DNA, 42 bp, unidentified; identical to SEQ ID NO: 3958
  source 1..42: mol_type = other DNA
  misc_feature 1..42: note = Synthetic

SEQ ID NO: 12540 - DNA, 87 bp, unidentified; identical to SEQ ID NO: 3959
  source 1..87: mol_type = other DNA
  misc_feature 1..87: note = Synthetic

SEQ ID NO: 12541 - DNA, 255 bp, unidentified
  misc_feature 1..255: note = Synthetic
  source 1..255: mol_type = other DNA
ctgcttgtctgtctgccaattatctacgcctccaccaccttcgccgcagtctcccaccttgatacggattgtcttcccgccttgctgacttatctcatcttcacctctgtttgctgcactgccatctgcagcattgccactttttttgtggccattttccaaactgcggactacctatacgttagagtggcatactatcgtcatcatccccaatataggaaccacgaggtggctacccttctgtgcctgtcatga

SEQ ID NO: 12542 - DNA, 1602 bp, unidentified
  misc_feature 1..1602: note = Synthetic
  source 1..1602: mol_type = other DNA
atggctacaggcagtggcgcaccaatggcagacaataacgagggcgccgacggagtgggtaattcctcgggaaattggcattgcgattccacatggatgggcgacagagtcatcaccaccagcacccgaacctgggccctgcccacctacaacaaccacctctacaaacaaatttccagccaatcaggagcctcgaacgacaatcactactttggctacagcaccccttgggggtattttgacttcaacagattccactgccacttttcaccacgtgactggcaaagactcatcaacaacaactggggattccgacccaagagactcaacttcaagctctttaacattcaagtcaaagaggtcacgcagaatgacggtacgacgacgattgccaataaccttaccagcacggttcaggtgtttactgactcggagtaccagctcccgtacgtcctcggctcggcgcatcaaggatgcctcccgccgttcccagcagacgtcttcatggtgccacagtatggatacctcaccctgaacaacgggagtcaggcagtaggacgctcttcattttactgcctggagtactttccttctcagatgctgcgtaccggaaacaactttaccttcagctacacttttgaggacgttcctttccacagcagctacgctcacagccagagtctggaccgtctcatgaatcctctcatcgaccagtacctgtattacttgagcagaacaaacactccaagtggaaccaccacgcagtcaaggcttcagttttctcaggccggagcgagtgacattcgggaccagtctaggaactggcttcctggaccctgttaccgccagcagcgagtatcaaagacatctgcggataacaacaacagtgaatactcgtggactggagctaccaagtaccacctcaatggcagagactctctggtgaatccgggcccggccatggcaagccacaaggacgatgaagaaaagttttttcctcagagcggggttctcatctttgggaagcaaggctcagagaaaacaaatgtggacattgaaaaggtcatgattacagacgaagaggaaatcaggacaaccaatcccgtggctacggagcagtatggttctgtatctaccaacctccagagaggcaacagacaagcagctaccgcagatgtcaacacacaaggcgttcttccaggcatggtctggcaggacagagatgtgtaccttcaggggcccatctgggcaaagattccacacacggacggacattttcacccctctcccctcatgggtggattcggacttaaacaccctcctccacagattctcatcaagaacaccccggtacctgcgaatccttcgaccaccttcagtgcggcaaagtttgcttccttcatcacacagtactccacgggacaggtcagcgtggagatcgagtgggagctgcagaaggaaaacagcaaacgctggaatcccgaaattcagtacacttccaactacaacaagtctgttaatgtggactttactgtggacactaatggcgtgtattcagagcctcgccccattggcaccagatacctgactcgtaatctgtaa

SEQ ID NO: 12543 - DNA, 156 bp, unidentified; identical to SEQ ID NO: 3966
  misc_feature 1..156: note = Synthetic
  source 1..156: mol_type = other DNA

SEQ ID NO: 12544 - DNA, 972 bp, unidentified
  misc_feature 1..972: note = Synthetic
  source 1..972: mol_type = other DNA
atagcgaggctcagtatgcgggcgctgcacctatcagacggcaaactttttttcgacaaggagctgacgcagccggtccccgacgacaaccccgcgtacgctgtcctcgcgaagatccggatcccaccgcacctctcggatgtggtcgtgtacgagcaggacctcgagtccgcgcagcagggcctcatcttcgtcggccgcgacgccaagggccgaaagcagtacttctacgggcgcggacacgtggagcggcgcacggccgtccgcaacgccgtgttcgtgcgcgtgcaccgcgtcatgcacaagataaacgccttcatcgacgaccacctcgcctccggcagcgaggccgaggcgcagatggccgccttcctgctcatggagacgagcttcttcatccgcgtcggcaagacgcgctacgagcgcgagagcggcaccgtgggcatgctcacgctgcgcaacaagcacctcgctgaggcagagggcggtgaggagatccgcgtcgccttcgtgggcaaggaccgagtcgcgcacgagtttgccgtgcgcgaggggcagcggctcttcgcggcgctgcgtcggctctgggacccaggcgcgccagacaggctgctgttcgaccggctgagcgagcgccgcgtgtacaccttcatgcggcgcttcggcatccgcgtcaaggacctgcgcacctacggcgtgaactacaccttcctgtacaacttctggtccaacgtgcgctcgttggagccgcgtccctccgtgaagtcgctcatctgcacctccgtgcggcagaccgccgagacagtggggcacacgccctcgatctcgcgcagtgcctacatggccaccgcggtgctcgagctcgtcagggacggcgcgttcctggacagagtcgccgccaccgacacgctcgacgactttgtggacatcgtcgtggactatgtaaataactctgagcaggtaaatggatga

SEQ ID NO: 12545 - DNA, 228 bp, unidentified
  source 1..228: mol_type = other DNA
  misc_feature 1..228: note = Synthetic
acgacaaccccgcgtacgctgtcctcgcgaagatccggatcccaccgcacctctcggatgtggtcgtgtacgagcaggacctcgagtccgcgcagcagggcctcatcttcgtcggccgcgacgccaagggccgaaagcagtacttctacgggcgcggacacgtggagcggcgcacggccgtccgcaacgccgtgttcgtgcgcgtgcaccgcgtcatgcacaagataa

SEQ ID NO: 12546 - DNA, 123 bp, unidentified; identical to SEQ ID NO: 3975
  misc_feature 1..123: note = Synthetic
  source 1..123: mol_type = other DNA

SEQ ID NO: 12547 - DNA, 234 bp, unidentified
  source 1..234: mol_type = other DNA
  misc_feature 1..234: note = Synthetic
ttgtccttactgtataaaagtccacgaaaacagctgtgcctcactctcgagatggtacacgtcctggagcgtgctttgctagagcagcagtcctctgcctgcggcctgcccggctcttctacggagaccaggcctagccacccctgccccgaggacccagacgtcagcagactaagactactcctggtggtactctgtgtcctgtttggacttttatgcctgctcctcatctaa

SEQ ID NO: 12548 - DNA, 234 bp, unidentified; identical to SEQ ID NO: 12547
  source 1..234: mol_type = other DNA
  misc_feature 1..234: note = Synthetic

SEQ ID NO: 12549 - DNA, 234 bp, unidentified; identical to SEQ ID NO: 12547
  misc_feature 1..234: note = Synthetic
  source 1..234: mol_type = other DNA

SEQ ID NO: 12550 - DNA, 21 bp, unidentified
  misc_feature 1..21: note = Synthetic
  source 1..21: mol_type = other DNA
atcttcctcacctgcccctga

SEQ ID NO: 12551 - DNA, 357 bp, unidentified
  source 1..357: mol_type = other DNA
  misc_feature 1..357: note = Synthetic
attcgatatataatgtctttgaaggactatctgagacagtcaatttctaaagatttggaggtgagacatcgagattctttaaagattagattaggggagagacatccgttgagtgtgcatcagcatatgatcgccgctaggcagatcattaaatcggacaatgcggaacaccagcatgtcatatcttctttgagtggttttttggataagcagaagagttttttaaaagtgcaacaaagagctttaaagcagctagagaaattggacgttgatgaaataattgatacggcggcggaagtgaaagcagtcagtaataatataaaagaaactcttatggcaagcactgaattagaataa

SEQ ID NO: 12552 - DNA, 39 bp, unidentified; identical to SEQ ID NO: 3981
  source 1..39: mol_type = other DNA
  misc_feature 1..39: note = Synthetic

SEQ ID NO: 12553 - DNA, 1221 bp, unidentified
  misc_feature 1..1221: note = Synthetic
  source 1..1221: mol_type = other DNA
atgcccactgggaacaccacacgcgcggcggagatgacgggcacgctcatactcctgctggcgtgcgtactcaacgcgatggcgcagctcctagcgcgcgtgtgcatggcggcggccacgctcgcgcgcatgctcgcgctctcggtcgccttcttgctggcgctcgcgcgcacgcgcacgggcctgcgcgctattctcgtggcgttgctgctgcgcgcgctactgcgcgcactgctcgcgcacgcgcacgcgcacacgctgagttacgtggccgcggtcgtgtacacgccgggaaacgcacagcccctgctgctcgcggagggcagcatcaacgaccttgtcttcatgcgctaccatcgccaaagtggcagtgtgctcccgagcccggaatgggcgccgagcgtgtacttccatgacgagctctggatgctcaacgcgcgagtggacgcactgcggagcttgagcgtgccgggcgcgaggctcggcaatgggactctcggggcacgtagcttgcagctggcggtgggctgcgagaaggtggccggagacgcgagcttctgggaccttgtctacgacggcaccgagcagatctgcatgcacgcagacgccacggagtgcgagccgggcttgcccgtgcacgcacgcctcgcgaaagagcgttggacccggctcggggcgcactcgcacgcactcgagcagcgctgcttgcagtggctagagcgacacttgggcgcccggacaaacaggcccgtggtctcggtgccgctcctgagcgtggtcgcgtacgcggacggctcgggaactcgcctccgttgcacggcctcgggcttttctccgagagacgtgcgtctgctttggacgcgcgacggtattccgggccccgactacgactttgtggagccccggccttccggcgacggctctttccagcagtgggcagaacttgtcgtggcggcgggcctggaaacgcactacgtgtgcgtggccagccatgactcgtggaagagttcttggcgcgcacgctgggaggaggggaaacggcgcgtcgcgacgagtgcccgcgttgctccgctcgcgaccatcgcagagatgctcgttgcgctggaactcatgctgatcctgcgcgagcggcgcctgacgctcggcgcactggcaacgatgctcgcttgctcgatgccgaacttgcttccgcaggcgctgcgggaacgcgccggcttctag

SEQ ID NO: 12554 - DNA, 498 bp, unidentified
  misc_feature 1..498: note = Synthetic
  source 1..498: mol_type = other DNA
atggagaattccgcggacataaacgattttctctccggggaggacttcagcagctatgaggagatgggctcggacgagctcacggagcccagcgaggagggctcggcctcgaagccgtcggagtacaaggtggactcgcgcgtagacagcagggacgacgtggagactcagtctccgccgcggcagattagcgagcgcatcgcggacatcaagcgccgctacacgcgcaggatcagccttttcgagatcacgggtatcctctgcgagagcttcaacctgctgcaacgcggccgcctgccgctggtgtcggacctatccgacgagactttccgcgaggaaatcctgcacgtggtcgtgcgcgagatcgaagaaggcacgtgtccagtggtgatccagaagaacggcgagctgctgtccgtgacggacttcgacgccaccggcctccgctaccacctggactacatcatctccatttggaaacagcaacaccgctactag

SEQ ID NO: 12555 - DNA, 735 bp, unidentified
  misc_feature 1..735: note = Synthetic
  source 1..735: mol_type = other DNA
atggctacaggcagtggcgcaccaatggcagacaataacgagggcgccgacggagtgggtaattcctcgggaaattggcattgcgattccacatggatgggcgacagagtcatcaccaccagcacccgaacctgggccctgcccacctacaacaaccacctctacaaacaaatttccagccaatcaggagcctcgaacgacaatcactactttggctacagcaccccttgggggtattttgacttcaacagattccactgccacttttcaccacgtgactggcaaagactcatcaacaacaactggggattccgacccaagagactcaacttcaagctctttaacattcaagtcaaagaggtcacgcagaatgacggtacgacgacgattgccaataaccttaccagcacggttcaggtgtttactgactcggagtaccagctcccgtacgtcctcggctcggcgcatcaaggatgcctcccgccgttcccagcagacgtcttcatggtgccacagtatggatacctcaccctgaacaacgggagtcaggcagtaggacgctcttcattttactgcctggagtactttccttctcagatgctgcgtaccggaaacaactttaccttcagctacacttttgaggacgttcctttccacagcagctacgctcacagccagagtctggaccgtctcatgaatcctctcatcgaccagtacctgtattacttgagcaga

SEQ ID NO: 12556 - DNA, 18 bp, unidentified
  misc_feature 1..18: note = Synthetic
  source 1..18: mol_type = other DNA
ctgggtcctgctcgataa

SEQ ID NO: 12557 - DNA, 201 bp, unidentified
  source 1..201: mol_type = other DNA
  misc_feature 1..201: note = Synthetic
atgcccaacagtacagtgtatccccgaaacaaaaccgccgacccaggcaacatgctcatccaaatctcgcctaacatcaccttcagtgtcgtctacaacgagataaacagtgggtatgcttttacgtttaaatggtcagccgaaccgggaaaaccttttcacccacccaccgctgtattttgctacataactgaacaataa

SEQ ID NO: 12558 - DNA, 63 bp, unidentified
  source 1..63: mol_type = other DNA
  misc_feature 1..63: note = Synthetic
atggtcagccgaaccgggaaaaccttttcacccacccaccgctgtattttgctacataactga

SEQ ID NO: 12559 - DNA, 63 bp, unidentified; identical to SEQ ID NO: 3990
  source 1..63: mol_type = other DNA
  misc_feature 1..63: note = Synthetic

SEQ ID NO: 12560 - DNA, 63 bp, unidentified; identical to SEQ ID NO: 3990
  source 1..63: mol_type = other DNA
  misc_feature 1..63: note = Synthetic

SEQ ID NO: 12561 - DNA, 213 bp, unidentified; identical to SEQ ID NO: 11097
  source 1..213: mol_type = other DNA
  misc_feature 1..213: note = Synthetic

SEQ ID NO: 12562 - DNA, 39 bp, unidentified; identical to SEQ ID NO: 3993
  misc_feature 1..39: note = Synthetic
  source 1..39: mol_type = other DNA

SEQ ID NO: 12563 - DNA, 39 bp, unidentified; identical to SEQ ID NO: 3993
  source 1..39: mol_type = other DNA
  misc_feature 1..39: note = Synthetic

SEQ ID NO: 12564 - DNA, 303 bp, unidentified
  misc_feature 1..303: note = Synthetic
  source 1..303: mol_type = other DNA
ttggaggtgagacatcgagattctttaaagattagattaggggagagacatccattgagtgtgcatcagcatatgatcgccgctaggcagatcatcaaatcggacaatgcagaacaacagcatgtaatatcttctttgagtggttttttggataagcagaagagttttttaagagtgcaacaaaaagctttaaagcagctagagaaattggacgtcgacgaaataattgatacggcagcggaagtgaaagcagtcagtaatgatataaaagaaactcttataacaagcactgaattagaataa

SEQ ID NO: 12565 - DNA, 180 bp, unidentified
  source 1..180: mol_type = other DNA
  misc_feature 1..180: note = Synthetic
gtgctcgacgagaagtttaacctgccctgcccctcgtgccagagcaagaacaccatgccgatgatgatccagacgcgctcggcggacgagccgcccttgatcaagtacgcctgcaaaaattgccaaaagagtttcaatcctcccaagttctgcgaaaagaaaggcaagcaaaaatcctaa

SEQ ID NO: 12566 - DNA, 417 bp, unidentified
  source 1..417: mol_type = other DNA
  misc_feature 1..417: note = Synthetic
ttggctactatatccataatagacatggagacacccttgaaggcgccagagagctcattaaaaccctacaacgagccctcttcgtgcacttcagagcgggatgtaaccgctcaagaattggctaaacaaggagaagaactccttgcccagctgcaccgacccctagagccatgcactaacaaatgctattgtaagcgatgcagtttccattgccagctgtgtttctcgaaaaaggggctcggaatatcatatgagcgaaagggcagacgaagaaggactccaaggaaaactaagactccttcgccttctgcaccagacaaatccatatccacaaggaccggggacagccagccaacgaaggaacagaagaagacgtcggaggcgacagtggttacgacttgtggccttggccaataa

SEQ ID NO: 12567 - DNA, 90 bp, unidentified; identical to SEQ ID NO: 3999
  source 1..90: mol_type = other DNA
  misc_feature 1..90: note = Synthetic

SEQ ID NO: 12568 - DNA, 21 bp, unidentified
  misc_feature 1..21: note = Synthetic
  source 1..21: mol_type = other DNA
atacgcgcggccgtggtgtag

SEQ ID NO: 12569 - DNA, 2526 bp, unidentified
  source 1..2526: mol_type = other DNA
  misc_feature 1..2526: note = Synthetic
atggacgcgccaagtctcgactgcatgctcgccgcactcgcggctaaggcggcctcggtggaccgaggcgctcccgaggacgaggtgcaccacgaagtggagctcgtgctcgtggacccgccgctgtccaccctggccgccacgctgcgcctggcctcggagacggagtccttcatcctcttcacagtgactgcgctcgctaaggaggagggcaagctgcgcgcgcgcgtgcccatgtcgcgcgtcgtcggcctggacgtgaagaacgtgcagctggtcaacgccatcgacagcatcgtctgggagcgcaaagcgctcgtggaggagaccgcgctgcaggagggctgtctgctgcgccactccaccgagcggcggcacctcttcgtggactacaagaagtacctctcggccatccgcgtggagctggtgaaccgcgtgcgcgtgcgctccaaagaagtcgtcgtggacttcaagttcaagtacttcctgggatccggcgcgcaggccaagagctcgctgctgcacgcgctcaaccaccccaaagtgcggccctcgcccacgctggagttcgaggtcgttcccgcgggcgaggccgtggacgaagccgccgtgctcacagagctgcgcgccgtggcgaaggcgctcttcatggcgcccaccgacgccgtcttcctgttgccgccggccgagatgccggtgcgcacgctcatgctgcagaagcaggagatccccgcgctagacctcgacggcctcttcgcggtctccaagacggacggcgtctccgcgagcgtgcgcgtggacgagaacggtgtcttctgtgcgttctcgcacctcgcgtacaccatccggtacccgctcgcgcgcgaagtgcagggccggtaccggctctggtgcgaggccgtgcggcccgtgggcgagcgcgtgtggtccatgttcgtgctggtcgtggaggagcctgcgggcgatgaccgcgtcgcggccgtggccggcgccgtggaggcgctgcgcggcgtgtgcgcgcgcgtcgagttcaaacccaagcgcgtggacgggcccttctcggcgacctccgagctggtggagcacataaagagcgcgctgcagacggagccagagggcgtggtgctcttctacgcgcgcggagagaagtccaagcgcgacctcaaagtcaagcgcgacaacacggtggaccagaccacgaacgtgatgttccggtacatgtccagcgagcccatcgtcttcggcgagggctccaccttcctggagttcaagcggtacagcaacgaccgcgggttccccaaggagtacggcgcggggcgcatcttcctgcgcgaggacgtggtctaccacaacaacatctactgcatcgagttcacgaagacgcacctggaggtgggcctccgcagcgtggtcgtgcccgtgaagttcatcggcgagttctcgcaggaggggtacctgctgcggccgcgcctggccaaaacggagtgctacttccgcaacccctcattctacgggaaccagcactcggtggtgctcgagcacacccgcgaccagctgctctcggtgggggacgtattcgacgagagccgcatggccgccgtcggacagacgctggccaacgacgccttccgcctgaacccggacacgccctacttcaccaaccgacgcacgcgcgggccgctgggcgtgctctccaactacgtgaagacgctcatgatatcgctgtactgctcgaagaccttcctgaacaacgccgagcgacgcaaggtgctggccgtggacttcggcaacggcgcagacctggagaagtacttctttggcgagatcgcgtccatggtggccacggacccggacgcgcgcgcgatagagcgcgccatggagcgctacaaccgcctcaacgcggggctgaagtcgcgctactacaagttcaactacatccaggagaccatccgatctgagacctacgtggagagcatccgccaggtcatgtacttcgggcgcttcaacatcgtggactggcagatggccatccactactccttccacccgcggcacttcgccacggtgatgcgcaacctgcgcgagctcaccgcgcccggctgcaaggtgctcatcaccaccatggacggggacttcctgtcgacgctttccgagaagaccagctttgtgatcaaccgcaacctgcaggagagcgaaaacttcatgtcgatcgagcgcgtggccgatgaccaagtcatggtctacgcgccctcgaccatggcgcagcccatgacggagtacatcgtgcgccgcgcggacatcgtcaagctcttcgcggacaacggcttcgacctcgtggaccacgcgaacttcgagactgtgatccggcgcagccgccgcttcgtcgagggcgtctcgcggctggagacgcggccctccaccaagaacttcttcgagctcaaccgcaacgcgctcacagagatggacagcaccgacgtggccgcgctgctaaagatctacgtgctgtacgtcttcagcaagcggtag

SEQ ID NO: 12570 - DNA, 54 bp, unidentified
  source 1..54: mol_type = other DNA
  misc_feature 1..54: note = Synthetic
atgtcgaatctcaagcacaaaaccaggaatcctattcataacagatggcactga

SEQ ID NO: 12571 - DNA, 15 bp, unidentified
  source 1..15: mol_type = other DNA
  misc_feature 1..15: note = Synthetic
atgaccaggatgtag

SEQ ID NO: 12572 - DNA, 15 bp, unidentified
  misc_feature 1..15: note = Synthetic
  source 1..15: mol_type = other DNA
atgaccaggatgtag

SEQ ID NO: 12573 - DNA, 315 bp, unidentified
  misc_feature 1..315: note = Synthetic
  source 1..315: mol_type = other DNA
atcatgattggtaaagaggtcaccgtgcaagatattattctggagctcagtgaggtgcagcccgaagtgctaccagttgacctgttttgtgaagaggaattaccaaacgagcaggaaacggaggaggagcctgacaacgaaaggatctcttacaaagttatagctccgtgcggttgcaggaactgtgaggtcaagcttcgcatttttgtccacgccacagaatttggtattagagctttccaacagctactgaccggagatctgcagctcctgtgccctgactgtcgcggaaactgcaaacatgacggatcctaa

SEQ ID NO: 12574 - DNA, 30 bp, unidentified; identical to SEQ ID NO: 4015
  source 1..30: mol_type = other DNA
  misc_feature 1..30: note = Synthetic

SEQ ID NO: 12575 - DNA, 699 bp, unidentified
  source 1..699: mol_type = other DNA
  misc_feature 1..699: note = Synthetic
ataacactccaatcgaccctcttgcgtaccataatgttttcggagttgcctccttccgtaccgacggcattgcttcaatggggttggggattgcatcgtggaccgtgttcgatcccaaattttaaacaggtagccagccaacacagtgttcagaacgattttacagaaaatagcgttgatgcaaatgaaaaatttccgattgggcacgcgggctgtattgagaaaaccaaagacgactatgtaccatttgatacgttgttcatggtatcatctattgacgaacttgggcggagacaattaaccgacaccatccgccgcagcttggttatgaacgcctgtgaaataacggtcgcgtgtacgaaaaccgcagccttttctggtcgaggcgtgtcacgacaaaaacacgtgaccctatctaaaaataaattcaatccatccagtcataagagcctgcaaatgtttgtgttgtgtcaaaaaacccatgcaccccgtgtcagaaacctactgtacgagagtattcgtgcaagaagacctcgccgatattacacccgctcaacggacggaaaatcgcgtccgttggtaccagtgtttgtgtatgagtttacggctttagatcgtgtccttttacataaggaaaatactttgaccgaccaaccaattaatactgaaaatagcggtcatggacgtacgagaacgtaa

SEQ ID NO: 12576 - DNA, 228 bp, unidentified
  source 1..228: mol_type = other DNA
  misc_feature 1..228: note = Synthetic
atagttgacatcttgcgacagtatttcgaaaaggagcggtttctgttcttgaactatcttattaatagcaataccacgctgagttactttggaagcgttcagcgtattggtcgttgcgcgacggaggacattaaatcgggttttctgcagtatcgtggaattaccctgtcagtgataaagctagagaacatattcgttgacctttctgagaaaaaagtgtttgtatag

SEQ ID NO: 12577 - DNA, 21 bp, unidentified
  source 1..21: mol_type = other DNA
  misc_feature 1..21: note = Synthetic
ttgcgcgacggaggacattaa

SEQ ID NO: 12578 - DNA, 87 bp, unidentified; identical to SEQ ID NO: 4022
  misc_feature 1..87: note = Synthetic
  source 1..87: mol_type = other DNA

SEQ ID NO: 12579 - DNA, 276 bp, unidentified
  source 1..276: mol_type = other DNA
  misc_feature 1..276: note = Synthetic
atccccaacaagaaaatcacggccagcctgcgcgtcgagcagaactggttctatgacttccactttttcgtgcacacactactcaaggtctaccccgagctcgagcgcgacgcagcctggagcaaggcgctgggcgagttcctggtctgctgcaaccgcaacacctgcgagaagttccgcctgcgcgtacgccgcctgcaccccattagcttcctcgtgcgcttcgtggcgcgggaccttttctccgactggataaatggcgagcgccgcccttag

SEQ ID NO: 12580 - DNA, 39 bp, unidentified; identical to SEQ ID NO: 4039
  misc_feature 1..39: note = Synthetic
  source 1..39: mol_type = other DNA

SEQ ID NO: 12581 - DNA, 99 bp, unidentified; identical to SEQ ID NO: 4040
  source 1..99: mol_type = other DNA
  misc_feature 1..99: note = Synthetic

SEQ ID NO: 12582 - DNA, 27 bp, unidentified
  misc_feature 1..27: note = Synthetic
  source 1..27: mol_type = other DNA
atgggaattctggacgggcccagatag

SEQ ID NO: 12583 - DNA, 483 bp, unidentified
  source 1..483: mol_type = other DNA
  misc_feature 1..483: note = Synthetic
ttgcaatctcttggtgggctcactgacgttgcgtccaccatttctggcatggtttatcaacatagacatcttgaccaactgaaaagacagaatgatctacaagaacagtggatggcccgcaatgaacaactgcagcgagatgcaatgcaattaactcaggatttggcagtcaatgccccagcgatgagagtgcaggccgctctcaatgctgggtttgatgtggttagtgcgcgccagcttgccggttcaactgagcgaaggatcaacggctatttggatcagccaattcgcactattgatcaggcaatggcagtgcagtctaggggcaatttgacttcgttgtcgaacgcccttgccacttaccaaaaaggcactcaatttggactcaaacaacccaaaggatttaagagcccaattgctgctgaacaatctcgtggtccaaccattacacttggccctcccccaccatctactaatctataa

SEQ ID NO: 12584 - DNA, 192 bp, unidentified
  source 1..192: mol_type = other DNA
  misc_feature 1..192: note = Synthetic
gtgttttatttcaacgatactgtgagtttgagactcttgctaccgttgctgtataaagccggatttaaagtcgctatgtataaggttttgtgtaattctgagatgtataaacaccttgatttatcaaatccgttaccgttgatcgggaaatgttcggatggtgtggttatgcacgtaaagaacattttgtag

SEQ ID NO: 12585 - DNA, 684 bp, unidentified
  source 1..684: mol_type = other DNA
  misc_feature 1..684: note = Synthetic
atgagcaaggaaattcccacgccctacatgtggagttaccagccacaaatgggacttgcggctggagctgcccaagactactcaacccgaataaactacatgagcgcgggaccccacatgatatcccgggtcaacggaatccgcgcccaccgaaaccgaattctcctcgaacaggcggctattaccaccacacctcgtaataaccttaatccccgtagttggcccgctgccctggtgtaccaggaaagtcccgctcccaccactgtggtacttcccagagacgcccaggccgaagttcagatgactaactcaggggcgcagcttgcgggcggctttcgtcacagggtgcggtcgcccgggcagggtataactcacctgaaaatcagagggcgaggtattcagctcaacgacgagtcggtgagctcctctcttggtctccgtccggacgggacatttcagatcggcggcgctggccgctcttcatttacgccccgtcaggcgatcctaactctgcagacctcgtcctcggagccgcgctccggaggcattggaactctacaatttattgaggagttcgtgccttcggtttacttcaaccccttttctggacctcccggccactacccggaccagtttattcccaactttgacgcggtgaaagactcggcggacggctacgactga

SEQ ID NO: 12586 - DNA, 117 bp, unidentified; identical to SEQ ID NO: 4054
  misc_feature 1..117: note = Synthetic
  source 1..117: mol_type = other DNA

SEQ ID NO: 12587 - DNA, 117 bp, unidentified; identical to SEQ ID NO: 4054
  source 1..117: mol_type = other DNA
  misc_feature 1..117: note = Synthetic

SEQ ID NO: 12588 - DNA, 3933 bp, unidentified
  source 1..3933: mol_type = other DNA
  misc_feature 1..3933: note = Synthetic
atggatacgccgccgatgcagcgctctacaccccaacgcgcggggtcgcctgatactttggagttaatggacctgttggacgcggccgcggcggccgccgaacacagggcccgggtggtcacctcgagtcagcctgacgatctactatttggagagaacggggtcatggtgggacgggaacacgagatcgtttcaattccctccgtatcgggacttcaaccagaacccagaacggaagatgttggcgaagagctaacacaagacgactacgtatgcgaggacggtcaggatctaatgggctcgcctgtaatcccgctggccgaggtcttccacacccgattctcggaggccggcgcgcgagaaccaacaggagccgatcgctcccttgagacagtctctctcggaacgaagcttgctaggtctccaaaaccaccgatgaacgatggggaaacgggcagaggtacgacccctccgttcccgcaggccttctcccctgtatcccccgcgtctcctgttggagacgccgccgggaacgatcaacgggaagaccagcggtctataccccgacaaacgacgagaggaaattcaccaggtttgccgtcggtggtccatcgagacagacaaactcagtccatctcgggtaaaaagccgggcgatgagcaagcgggtcatgcgcatgcatcgggggacggagtagttctccagaaaactcaacggcccgctcagggaaagagcccgaagaaaaagactttgaaggttaaggtcccactcccggcgcggaaacccggtggacctgtacccggcccggttgagcaattgtaccacgtcctttcggacagcgttcccgctaagggggcaaaggcggacctgccgtttgagaccgatgatacccgcccaaggaaacatgatgcccggggtataacacctcgcgtccctggacgttcgtcggggggcaaacctagagcgtttttggccctgccgggaagatcccacgcaccagacccgattgaggatgacagcccagtggagaaaaagccaaagagtcgtgagtttgtttcgtcttcatcctcttcctcgtcgtggggatcgtcatcggaggatgaagacgatgaaccccggcgcgtttcggtgggaagtgaaactacaggcagcaggtccggacgcgaacacgccccttccccgtcaaattcggatgattcggactcaaatgatggtgggtcgacgaaacaaaatatccaaccgggatatcgatccatcagcggtcccgatccgaggattcgtaagaccaaacgtcttgcgggggaaccggggcgccagagacagaaatcattttccctgccgcgatccagaaccccgataattcccccggtgtcggggccgctcatgatgcccgacggaagcccttggcccggatcggcacccctcccatccaacagggtgcggtttggaccgtccggggagaccagagagggtcactgggaggatgaggctgtgagagcggcgcgggctcgttacgaggcctcaacggaacccgtgccgctttacgtgccggagttgggagatccggctagacagtaccgcgcgctgattaacctgatctactgtccagacagagaccctatagcatggctccagaaccccaagctgaccggtgtcaactcggccctgaaccagttctaccaaaagctgttgccaccgggacgggcgggtaccgccgttacggggagcgtagcgtctcccgttccgcatgtaggcgaagccatggccacgggggaggccctctgggctctcccccacgcggccgcggccgtggctatgagccgtcgatacgaccgggcccaaaaacactttatcctacagagtctccgcagagcctttgccagcatggcataccccgaggcaacgggctccagtccggcggcgcggatctcccgcggtcacccttctccaacaaccccggccacacaggctcccgaccctcagccgtcggccgccgcacgctctctttctgtgtgtccaccggatgatcgtttacgaactccgcgcaagcgcaagtcccagccagtcgagagcagaagcctcctcgacaagattagggagacacccgtcgcggacgcccgggttgcagacgatcatgtggtttccaaggccaagaggcgggtatccgagcccgtgaccatcacctcgggccctgtggtggatccccccgccgtaataacgatgccacttgacggaccggccccaaacgggggatttcggcgtattccccggggggccctgcataccccggtcccgtcggaccaggctcgcaaggcgtactgtacccccgaaaccatcgcccgtctggtcgacgacccattgtttcccacggcctggcgccctgcgctaagctttgatcccggcgccttggcggaaatcgccgctcggcgtccgggcggaggagaccgacggtttggtccacccagcggagtggaggcgctgcgacggaggtgcgcctggatgcggcagatcccagacccggaggatgtgaggcttctgatcatctacgatccgttgcccggagaggacatcaacggccccctcgagagcaccctcgcgacagatccgggaccgtcatggagtccatcccgagggggactgtctgtggtcctggcagccctgagtaaccggttgtgcctgccgagcactcatgcctgggccgggaactggaccggcccgccggacgtgtccgctttgaacgcccggggcgttttattactgtcgacccgagacctggcctttgccggggccgtcgagtatctaggctcgcggttggcctctgcccggcgccggttgctggtgttggacgcggtggccctcgagaggtggcccagggatggacccgctttgtctcagtatcacgtgtacgtccgggccccggcgcgaccggacgcccaggccgtcgtccgatggccagactcggcggtcacagaaggactcgcccgggccgtgtttgcatcgtcgcgcacctttgggccagcgagttttgctcgtatcgagactgcgtttgccaacctgtacccgggcgaacaacccctgtgtttgtgccgcggtgggaacgtcgcatacaccgtgtgtacccgcgcgggccccaagacccgcgtccccctgtcgccccgtgaataccggcagtacgtgctgccgggttttgacggttgcaaggacctcgcgcgacagtctcggggtctggggctcggggcagccgactttgtggacgaggcggcacatagccaccgcgcagcaaaccgatggggcctgggtgccgcgcttcgacccgtcttccttcccgagggacggagaccgggggccgccgggccggaggccggcgacgtacccacctgggcgagggtgttttgccgccacgccctgctggaacccgaccctgccgcagaaccactcgtgcttccacccgtggccggtcggtcggtggcgctgtatgcgtcggcggacgaggctcggaatgccctccccccgattcccagagtaatgtggccgcccggttttggggccgcggagacggtgttggaggggagcgacggaacacggttcgtgttcggacaccacgggggctcggaacggccgtcagaaacccaggcggggcgacagcggcgcaccgcagacgacagagaacacgctttggagctggacgattgggaggtggggtgtgaagacgcgtgggacagcgaggaggggggcggggacgacggggacgcaccggggtcatcctttggggtgagcatcgtgtcggtggccccgggtgtgctgcgagaccgccgggtgggtttgcgcccggcggtcaaggtggagctgttgtcctcgtcctcgtcctccgaggacgaggacgatgtgtggggagggcgcggggggaggagccccccgcagagtcgggggtga

SEQ ID NO: 12589 - DNA, 3933 bp, unidentified; identical to SEQ ID NO: 12588
  source 1..3933: mol_type = other DNA
  misc_feature 1..3933: note = Synthetic

SEQ ID NO: 12590 - DNA, 522 bp, unidentified
  source 1..522: mol_type = other DNA
  misc_feature 1..522: note = Synthetic
atggcaaacagagacgacattgacgcctccgccgttatggctgcctacctcgcgagagagtacgcggaggctgtagaggaacagctgacgctgcgcgagcgcgatgcgctcgaagcccttcgcgtttccggcgaggaggtccggtcgccgctgctgcaagaactctcgaacgcgggcgagcaccgcaccaaccctgaaaactcgcacatccccgccgccctcgtctccgcgcttctcgaaacccccacatcccccggccgcatggtcactgcggttgagctctgcgcgcagatgggccggctatggacgcgcggccgccagctcgtcgacttcatgcggctcgtgtacgtgctcctagaccgtctgccgcccacagccgacgaggacctcggcgcctggctgcaggccgtcgcgcgcgtgcacggcacgcggcgccgcctgcaccgcgctctcggcgttggggccgtcgtggcaggcgtcggtatgctgctgctcggcgtgcgcgtgttgcggcgcacataa

SEQ ID NO: 12591 - DNA, 30 bp, unidentified; identical to SEQ ID NO: 4044
  source 1..30: mol_type = other DNA
  misc_feature 1..30: note = Synthetic

SEQ ID NO: 12592 - DNA, 330 bp, unidentified; identical to SEQ ID NO: 12179
  source 1..330: mol_type = other DNA
  misc_feature 1..330: note = Synthetic

SEQ ID NO: 12593 - DNA, 84 bp, unidentified
  misc_feature 1..84: note = Synthetic
  source 1..84: mol_type = other DNA
acgcagatcagcgaaacccattattgtaactacgccataggagaaaccatacctctccaacttattatcgaatcttccatataa

SEQ ID NO: 12594 - DNA, 249 bp, unidentified
  misc_feature 1..249: note = Synthetic
  source 1..249: mol_type = other DNA
atgaaatcgaactcgtgtttaaacagcgatagcgaaatacaatactcgtgctctgagggcacggatagcttcgtaagcagaccatgccagttcttacaaaacgctctgcctcttcactgttcatccaaccaagctctattagagagtcggtctaaaaccggcaatacgcagatcagcgaaacccattattgtaattacgccataggagaaaccatacctttccaactcattatcgaatcatccatataa

SEQ ID NO: 12595 - DNA, 201 bp, unidentified
  misc_feature 1..201: note = Synthetic
  source 1..201: mol_type = other DNA
atgcgcatacccattccaggatacagaggacgaccccgccggaggaaagggctgaccgggaacggtcgatttcggcggcgtagtatgcgcagacgcatgaagggtggggtgctgcccttcctaattccacttattgctgcggccattggagccgttcccggaattgcctcagtagccttgcaggcttctcgaaaaaattaa

SEQ ID NO: 12596 - DNA, 21 bp, unidentified
  misc_feature 1..21: note = Synthetic
  source 1..21: mol_type = other DNA
atgggaaatagtggtgtctag

SEQ ID NO: 12597 - DNA, 105 bp, unidentified
  misc_feature 1..105: note = Synthetic
  source 1..105: mol_type = other DNA
acgggaccaagcaccgcaaagcaacatacaaacggctaccaacattaccattataaaaaacgtagggtccaagctgtatttcaccatggactccctctctgttaa

SEQ ID NO: 12598 - DNA, 42 bp, unidentified; identical to SEQ ID NO: 4076
  source 1..42: mol_type = other DNA
  misc_feature 1..42: note = Synthetic

SEQ ID NO: 12599 - DNA, 87 bp, unidentified; identical to SEQ ID NO: 4077
  misc_feature 1..87: note = Synthetic
  source 1..87: mol_type = other DNA

SEQ ID NO: 12600 - DNA, 87 bp, unidentified; identical to SEQ ID NO: 4078
  source 1..87: mol_type = other DNA
  misc_feature 1..87: note = Synthetic

SEQ ID NO: 12601 - DNA, 78 bp, unidentified; identical to SEQ ID NO: 4079
  source 1..78: mol_type = other DNA
  misc_feature 1..78: note = Synthetic

SEQ ID NO: 12602 - DNA, 27 bp, unidentified
  source 1..27: mol_type = other DNA
  misc_feature 1..27: note = Synthetic
atcttggcagccgggcaaggctcttaa

SEQ ID NO: 12603 - DNA, 27 bp, unidentified
  source 1..27: mol_type = other DNA
  misc_feature 1..27: note = Synthetic
atcttggcagccgggcaaggctcttaa

SEQ ID NO: 12604 - DNA, 573 bp, unidentified
  misc_feature 1..573: note = Synthetic
  source 1..573: mol_type = other DNA
acggcgtggagcaaaacgcctccccctgagccgctttcctaccaacacaacggcatgcctctgcgggcatcggaacacgcctaccggcccctgggccccgggacaccccccatgcgggctcggctccccgccgcggcctgggttggcgtcgggaccatcatcgggggagttgtgatcattgccgcgttggtcctcgtgccctcgcgggcctcgtgggcactttccccatgcgacagcggatggcacgagttcaacctcgggtgcatatcctgggatccgacccccatggagcacgagcaggcggtcggcggctgtagcgccccggcgaccctgatcccccgcgcggctgccaaacagctggccgccgtcgcacgcgtccagtcggcaagatcctcgggctactggtgggtgagcggagacggcattcgggcctgcctgcggctcgtcgacggcgtcggcggtattgaccagttttgcgaggagcccgcccttcgcatatgctactatccccgcagtcccgggggctttgttcagtttgtaacttcgacccgcaacgcgctggggctgccgtga

SEQ ID NO: 12605 - DNA, 123 bp, unidentified; identical to SEQ ID NO: 4082
  misc_feature 1..123: note = Synthetic
  source 1..123: mol_type = other DNA

SEQ ID NO: 12606 - DNA, 90 bp, unidentified; identical to SEQ ID NO: 4085
  misc_feature 1..90: note = Synthetic
  source 1..90: mol_type = other DNA

SEQ ID NO: 12607 - DNA, 24 bp, unidentified
  source 1..24: mol_type = other DNA
  misc_feature 1..24: note = Synthetic
acggccaccgattcttccatttag

SEQ ID NO: 12608 - DNA, 987 bp, unidentified
  source 1..987: mol_type = other DNA
  misc_feature 1..987: note = Synthetic
atggatcttagaagaaggtttgcctccgacttggccaagaccaaactggtgctatcggagaccagctccagtctgttcaccaagtgtcctcaagcagtcattcccacaccggagcagccatgtcctcccgatgaggaggtagactccgtcgacaagtacacggtgaaggaagcgggcaggtattaccagtcccgtctaaaatctacgactgcctgcatgcagcgtccaaccggacagtcgcccctagcgccatcgccactgccccgcggtgccaggatccagtcggtgcctctgaacgtgatgcccgccgcgtgctccacgccggtcgccgcgtgctccgcgacagcggtggtctgtcctcccgctgcgccggcgtgtccggctccggctcctgcgtgccccgcgccggttcccgcgtgtcctgcgccggctcccgcgtgtccggctccggctcctgcgtgtccggctcctgccgtgacgtgccccgcgccggcgcccgcgtgtccgcctgcaactgcgccgacatgcccgccaccagcagtgtgccccgcaccggcgcgccccgcaccggcgtgcccgccgtctacacgacagtgcccgccggcgcctcccttgccgacaaaaccggcgcctgccgccaagcccatcttcttgcagcaatcgttgccaccgccccagtacccggcgtccagctgcccgacgatcaaggcgcccgccgcgtcaccggttctagagcccagagtgccggacaagatcatcgacgccgataatgatgataaggatttaatcaaaaaggagctagccgacatcgcggacagcgtgcgcgacctcaacgccgagtcgctcagccttacgcgcgacatcgagacggcaaagtccgtcacgcagtcggccatcgacgacttgcgtcgtctgctcgggtccgtggctacgcgagagactcccagcacactgcgagatcgcgtggacaataccggcacctcataa

SEQ ID NO: 12609 - DNA, 726 bp, unidentified
  misc_feature 1..726: note = Synthetic
  source 1..726: mol_type = other DNA
atattacacataaccacaaaactgcttagaaacgagaatctgactagctttaaacaagaggaattacttttaattcaacacgtatgtacatcaatgctgtcacacggaatcaagatcttactactacgcgaaagtttgtacaattctggaatcggagacatagtgattttgaatcgtaaaatcagcaacaactactggtttcgaatattttctattctgaaacagcattctgacgcggaactactccgacatatgtttaacgaaagtcactcagcatatatctcaaaaaagctgcactacagcggaaatgttagtcacatgattaattttcttttcatggacgagtttggtgtaaatctcaaaattccggaagaattaatctgcgaaggcaatatagttttctccgttggagctatctataatcaccgacttttaaaaatctgcagattctttaaccgattttggggggatcaagaacgagaaccaacagtgcggctcatctgcaaacacctatggtttgcctatcttataatgtttggaaaatttgagatatccacactggcgtacagtcagcaaagagccgagcacaaagccggactgttttcatttctccaaaacgactttaaagtcttctgcggtatgtctgaaaatccacaattactcgacagctctgccatatttgaccttacaggaatcagcgccgaagatctattctcttatgaataa

SEQ ID NO: 12610 - DNA, 777 bp, unidentified
  source 1..777: mol_type = other DNA
  misc_feature 1..777: note = Synthetic
atgacccagataggacagtacataaaactgaacgacgccgtccctaatttaatattacacataaccacaaaactgcttagaaacgagaatctgactagctttaaacaagaagaactacttttaattcaacatgtctgtacatcaatgctgtcacacggaatcaagatcttactactacgcgagagtttatacaattctggaatcggagacatagtgattttgaatcgcaaaatcagcaacaactactggtttcgactattttctattctgaaacagcattctgacgcggaactactccgacatatgtttaacgaaagtcactcagcatatatttcaaaaaagctgcactacagcggaaatgtcagtcacataattaattttctcttcatggacgagtttggtctaagtctcaaaattccggaagaaataatctgcgaaggcaatatagttttctccgttggagctatctataatcaccgacttttaaaaatctgcagattctttaaccgattttggggggatcaagaacgagaaccagcagtacggcttatctgcaaacacctatggttcgcctaccttataatgtttggaaaatttgagatatccacgctggcgtacaatcagcaaagagccgagcacaaagccggactgttttcatttctccaaaacgactttaaagtcttctgcggcatgtctgaaaacccacagttactcgacagctctgccatatttgaccttacaggaatcagcgccgaagatctattctcttatgaataa

SEQ ID NO: 12611 - DNA, 45 bp, unidentified; identical to SEQ ID NO: 4096
  source 1..45: mol_type = other DNA
  misc_feature 1..45: note = Synthetic

SEQ ID NO: 12612 - DNA, 27 bp, unidentified
  misc_feature 1..27: note = Synthetic
  source 1..27: mol_type = other DNA
atgaaattcttgtttagacgtttgtag

SEQ ID NO: 12613 - DNA, 27 bp, unidentified
  source 1..27: mol_type = other DNA
  misc_feature 1..27: note = Synthetic
atgaaattcttgtttagacgtttgtag

SEQ ID NO: 12614 - DNA, 24 bp, unidentified
  source 1..24: mol_type = other DNA
  misc_feature 1..24: note = Synthetic
atgttaaaaatgagaacgaaatag

SEQ ID NO: 12615 - DNA, 1311 bp, unidentified
  misc_feature 1..1311: note = Synthetic
  source 1..1311: mol_type = other DNA
atcagcaaaaacagcgagatcatgacctccgagagcgatttatataccttgaaagagctaatacgacttcgggactcgctgcacctcgccaccggcgccgccgtcgagcgctacaacgcgctcgttgagtgggccgcgcgcacgtactggacggtcgcggtgctgccctccgcgccgtgcgcctccatcgagaagtactactgcgtgtgcaagcccgactgcgcgctcgagcccggcgagtactccgtgagccggctgcacttcggactcacgcacgcctgggtgcgcggcgccgccttcaactctgccagcggcgccgaggtcgagccgcccgaggaggtgcgtagggcctgcgaggcgctcgacgccgccttcgcggacctcactttcgtgcgcttctcggtcttcggccgcgagtggacggtcgacgacgccgtcacagaccactcttcgcgcgacgaagtgctcgctgcgtgcgccgcctccggcgtgcgcgtcgcgcgcacgctgcgtgtgcgcgtgcgggcgggagagtccttcgcgcgcgaggacttcgacgcggtgcacgcggcgctgcgtgcggagggcgacgtcgctcgcggcactgcggtatgtctcgcgctgcgcgggtcggcgcgccgctggatagcggaccgcgcgcctcgatgcttcgtgcgcgtgcgccgcgtggagctcgagcccgtggacgcgcggcaccactgcccggtgctgatctccgcgcgcggcgaccgggtgctatgccgcggcgtggggcacctcgcggacgcgcgcgcgcgcgagggcgtcttcgtagccgtgcgcaggtacccggagtgtctggtgctctgcgacgaggcggccgccggcgcggcggattgctcgcgcgaggaggcgctgcggctgctggtgcgccgcttcgggcgcgacttcgccgtcagcgaggagggctacgtcttccgcgtacaggacatggacctgcgcggcgtgtccgcgcgactggggctcgcgccctgcgcgagcctggaggagctgcgccgagcggtggagcgcgaccgcgcgctgatgcggcggctgcgtgcggagggcgccgtgcgcctcgcgtgcgagtgcatgggatacccgcgccagaacgcggtggagctcataaataatatgcgctttcaaataacggaagaaggcgcggtggcgaactttgagctggcgaacgcgagctgtctcggcaacccgaccgcggagtccatcttcgcgagcttcgcgcagtttgtgccgatattcaacgtgctctcggcgatcgcgcgcgcgcagccatga

SEQ ID NO: 12616 - DNA, 33 bp, unidentified; identical to SEQ ID NO: 4106
  misc_feature 1..33: note = Synthetic
  source 1..33: mol_type = other DNA

SEQ ID NO: 12617 - DNA, 126 bp, unidentified
  source 1..126: mol_type = other DNA
  misc_feature 1..126: note = Synthetic
aggacgaggatggttcggaggatggggaattttcagacctggatctgtctgacagcgaccatgaaggggatgagggtgggggggctgttggagggggcaggagtctgcactccctgtattcactga

SEQ ID NO: 12618 - DNA, 39 bp, unidentified; identical to SEQ ID NO: 4108
  misc_feature 1..39: note = Synthetic
  source 1..39: mol_type = other DNA

SEQ ID NO: 12619 - DNA, 126 bp, unidentified; identical to SEQ ID NO: 12617
  misc_feature 1..126: note = Synthetic
  source 1..126: mol_type = other DNA

SEQ ID NO: 12620 - DNA, 1908 bp, unidentified
  misc_feature 1..1908: note = Synthetic
  source 1..1908: mol_type = other DNA
atgaacctgggcatcgtctcgctcttccgcgagcacgtggacagcatccccaacatcctgccacaccagctggctacgctggacttcctgctgcgcagcatcctcgatgagaacaacagcgtgttgctgttccacatcatgggctcgggcaagaccatcatcgcgctgctcttcgcgctgatcgtgtccaagttcaagaaggtgtacatcctggtacccaacatcaacatcctgaagatcttcacgtacaacatgggcattgccgtgaacctgatcaactctgactacgtgctggagaacatccacatctactccaccaccagcttctactcgctgaactacaacgacaacgtgatcaactacaacgggctggcgaagtacaacaacgcaatctttatcatcgacgaggcgcacaacatcttcggcaacaacacgggcgagctgatgacggtgatcaagaacaagaacaaggtgccgttcctgctgctgtcgggctcgcccatcaccaacacgcccatcacgctctccaacatcattagcatcatgtcggacgagggcattaattttagcgacatcatcatccagggcaagaaggtgttccagatcctgctcaacgagaacggagtgtcagtgctgaagcgcatcctgcgcgacaagatctcgtactacgagctgcaggacaccgagctgcccagcatcgtctttcacgggcgccgcttcctggacacgcgcatcgtgtactgccacatgtccaagctgcaggaacgcgactacattaacgtgcgcaagctgtgcaacaacgagatgttcgagaagaacatgaacaacgtctctctggccgtgctgggcccgctcaacctcatcaacaacctggacattctcttccaggaccaggacaaggagctctaccccaatctcaagatcagcaacggcgtgctctacggcgacgagctggtctcgctaaacatcagctcgaagttcaagtactttatcgcgcgcatccagagcctcacgggcaagcacttcatctacttctccaactccacctacggcgggctcatcatcaagtacatcatgctgagcaacggctactccgagcataatggctcgcagggtaccaaccccaagacgatcggcggccggctcaagaccttcgccatcgtcaccagcaagatgaagtcgtctctggaggagctgctggccgtgtacaactcgcccgctaacaacgacggcagccgcatcatgttcctcttctcctccaacattatgtccgagtcgtacacactcaaggaggtcatgcacatctggttcatgacaatccccgacaccttctcgcagtacaaccagatcctcgggcgctccatacgcaagttctcctacaccaacatcgccgagcctgtgaacgtgtacctgctcgccgccatctacgcggacttcgacgacgacattacctctctcgataactattccatcgacgagatcaacgtgctgcccttcgacatcaagaagctgctctacctcaagttcaagaccaaggagaccaagcgcatctactccattctcaaggacatctccgtgaactacacgctaccgccgcacccgcaaattgtggacgtggtgctgggcgagctcacacgccagttcttttaccaccactcgcgcgtgcgcgcggacgaccccgagctcttcgccgccatcgaccgcgtgctgtgctcgccagactccacgcgccgctacctggacgagatcacgcgcgggcacttctttgtttgtaaccgcgtcttcgagaaggcgttactgtaccggcacggcgaagacatcatcgtggtgcccttcaagctctcgcacgaccagttcctttgggccatcaacttccgcaaggagtacaacgtgggcgcgccgctatga

SEQ ID NO: 12621 - DNA, 69 bp, unidentified
  source 1..69: mol_type = other DNA
  misc_feature 1..69: note = Synthetic
atgtttttaaagtttgttaatttgccaaaaggctgtaccttttctttgggtagtttagactctatataa

SEQ ID NO: 12622 - DNA, 1218 bp, unidentified
  misc_feature 1..1218: note = Synthetic
  source 1..1218: mol_type = other DNA
atggatttcgccaatgatgaagaaattgcagaacttttgaatctcagcaccaatgtaatcaaggagattcagaaatccgaactcaagcctccccaaaccaccggacgaccacctgtcagtcaagggaacacaagaaatctaactgatctatgggaaaaagagactgcaagtcagaccaagacaccggcccaatctccacaaaccacacaagttcagtctgatgaaaatgaggagggagaaatcaagtccgagtcaattgatggccacatcagaggaactgttaatcaatcagagcaagtcccagaacaaaaccagagcagatcttcaccaggtgatgatctcgacagagctctcaacaagcttgaagggagaatcaattcaatcagctcaatggacaaagaaattaaaaagggccctcgcatccagaatctccctgggtcccaggcggcaactcaacaggcgacccacccattggcaggggacaccccgaacatgcaagcacagacaaaagccctggcgaagccacatcaagaggcaatcaatcctggcaaccaggacacaggagagagtattcatttaccaccttccatggcaccaccagagtcattagttggtgcaatccgcaatgcaccccaattcgtgccagaccaatctatgacgaatgtagatgcggggagtgtccaactacatgcatcatgtgcagagatgataagtagaatgtttgtagaagttatatccaagcttgataaactcgagtcgagactgaatgatatagcaaaagttgtgaacaccaccccccttattaggaatgatattaaccaacttaaggccacaaccgcactgatgtccaaccaaattgcttccatacaaattcttgacccagggaatgcaggggtgaggtccctctctgaaatgaaatctgtgacgaagaaagctgctgttgtaattgcagggtttggagacgacccaactcaaattattgaagaaggcattatggccaaagatgctcttggaaaacctgtgcctccaacatctgttatctcagctaaagctcagacttcttccggtgtgagtaagggtgaaatagaaggattgattgcattggtggaaacattagttgacaatgacaagaaggcagcaaaactgattaaaatgattgatcaagttaaatcccacgccgattacgcccgagtcaagcaggcaatatataatgcgtaa

SEQ ID NO: 12623 - DNA, 33 bp, unidentified; identical to SEQ ID NO: 4086
  source 1..33: mol_type = other DNA
  misc_feature 1..33: note = Synthetic

SEQ ID NO: 12624 - DNA, 372 bp, unidentified; identical to SEQ ID NO: 11990
  source 1..372: mol_type = other DNA
  misc_feature 1..372: note = Synthetic

SEQ ID NO: 12625 - DNA, 183 bp, unidentified
  misc_feature 1..183: note = Synthetic
  source 1..183: mol_type = other DNA
atgcactttcaactctctacctctcgcatgcgcctgcacttcggacacctcacctttctctttctcaagatcgttttgcacttgtcaggccggccgtggcgtgcttgtagcgcaaggcgacggggtaccacagtcggtgccagattgccggcgcgcgctattcaaagctgtgcgtacacctaa

SEQ ID NO: 12626 - DNA, 210 bp, unidentified
  source 1..210: mol_type = other DNA
  misc_feature 1..210: note = Synthetic
atgcacataaatcgatggaccggttccgtgcgctctacggcgagttctgccggctcagcgtggagcacctggaacgcgagacgggcacgcgcgcagacgcggtggacgtggacgtggacgtggataccatgctctcgctgctgcccatactcgaacgcaaggtgtgcgcgctgcacgccgccagcgacgagcagctgcttctcttcatga

SEQ ID NO: 12627 - DNA, 1341 bp, unidentified
  source 1..1341: mol_type = other DNA
  misc_feature 1..1341: note = Synthetic
gtggagcacctggaacgcgagacgggcacgcgcgcagacgcggtggacgtggacgtggacgtggataccatgctctcgctgctgcccatactcgaacgcaaggtgtgcgcgctgcacgccgccagcgacgagcagctgcttctcttcatgaaatacttcaactacaaggtgctgtccttctggttcctgcgctccgacgcggtggtgaaatcgctgtacaaccgcctgcaggacgagcccgcgcgcgcgcatttccgcgagctcttccgcgcgctcctggcgagcacgcagacgctggtttcgctgaacgccatgtaccgcaacatcaagcaggacacggcggacatcattgccgactccaagaagatcctggagatcgtggcgcaggtgcgtgcgaccacgtgcgagcagcaagcctaccggctgctcagtagcaactacaacttcctggtgaagacggccaacaaggtcctgtcggacgagaactacctgctgaaactgatcgcgctcttcaacaccgagctggtgcaggaccgcgagcgcatggaagagtaccgcgagctcttctcgctgtcggccgagaacgccgtgcacggcatccgctgcatgtgcgacgtcagtgtggaggccgtagacttcgccggcagccgctacagcgcgtttttccggcgcgtgctcagcaacgtgctgctcttccagacgcacggtctgaacgcgcagcgcttcgtacagatcgtgagcaagctgtacacgctgatccacagcgagctcacgcagaacgccgcgctcgccgagatgctcagtgccgtgctcgactccatcaaggacaggctctctgtggacgagctgcgccagcacggcgtgcgcaacctgcagtcgctggtacgctacattgccagccggcgcgagttctaccgcgagctgctgcttggagaatggcgcgcgcgcgaggacacgctagtgcacttgctgcaggagattgtcacgcgcaacggcgtccagttccgcgagagcccggttgacgtcgccgcggtgctgcgcgcgctgaaagaacaggtcttctcgaggttgagcgggaacgccgcgggcacagccgccgaagcaagcactgccggtggcgccgctgcggacgccgagagccagagcaaggacggggaagcgcccccgggcactgcgaacgccaagagcacgagcgaggacggggcagaagcgcgaacaaggccggcggcaacacttcccgacgcgtgtgcgccacaggcacgcgcgcaagtgaacggggctctgtccgggcacccgagtgcgcgcgaaagtgaaaaaggaagcttccagggcacaggctag

SEQ ID NO: 12628 - DNA, 93 bp, unidentified; identical to SEQ ID NO: 4120
  source 1..93: mol_type = other DNA
  misc_feature 1..93: note = Synthetic

SEQ ID NO: 12629 - DNA, 21 bp, unidentified
  misc_feature 1..21: note = Synthetic
  source 1..21: mol_type = other DNA
aggatgaaagcgcgcgaatga

SEQ ID NO: 12630 - DNA, 63 bp, unidentified; identical to SEQ ID NO: 4123
  misc_feature 1..63: note = Synthetic
  source 1..63: mol_type = other DNA

SEQ ID NO: 12631 - DNA, 99 bp, unidentified; identical to SEQ ID NO: 4126
  misc_feature 1..99: note = Synthetic
  source 1..99: mol_type = other DNA

SEQ ID NO: 12632 - DNA, 1713 bp, unidentified
  misc_feature 1..1713: note = Synthetic
  source 1..1713: mol_type = other DNA
atggccaatcgtcgtctccgacacgctccgcacaccgcgactgatgagttccaccaggctctgcgccgtctcttcgcgcccctctgcgttcacgaggaccatttccatgtgcagctggtgatcggccgcggtgcgctgcagccggaggaagcggcggtagaaacgtcgcagccaccggcgcagtttgcggcgcagacgtcggcggtcctccagcagcagctggtgcatcacgtgccacgttcttgcgtccttcatctcttcgtgacggataagcgctttctgaatcgcgagctgggcgaccgtctctaccaacgcttcctgcgcgaatggctggtgtgtcggcaggccgagcgggaggcggtgacggcgctctttcagcgtatggttatgaccaagccctactttgtgtttctcgcttacgtctacagcatggactgtctgcacaccgtggccgtccgcacgatggcctttctgcgtttcgaacgctacgacaccgactacctgctgcgccgtctgcggctctacccgcccgagcggctgcacgcgttgttggacggtgtcaccgtctcgctgctaggtgaccttcaccgtttccttttcggggtggaccttcggctgcccgtgcttcaccccaccagctcgccgtgcctagcactactacgcgccaagcgcttcgacgcccgcgctgatttggccgtataccaccgtaaccagtggtgtcaccaacggcagccgcggtcgccgcagctgcggggcctcatcgcagccttgcgtcggcacgccgggaaggtaccctgcggaaacccgctctacgtactggcccgacaagcggtgcagacgttttgcgacacgtgtccgcgatacctggtgccgttgcgggcactgggtctgcacgacgagacgcgcggaggaggctcgacggcggcagctgcggcggtaggacacgcgggcgccggacagcaggcgcatcacgtagagcccaccaagatcgtcctctttgcactcagcgccgcgctgcgcggcggcctcatcggcagcgtcatcgacctgccgctctggtgtctgtgtcgactcaagtgcgagcgccatctggatgcgcgctcgctggtggccgtggtctgtcggcagtgcggacactgcctcaacctgggtaaggaaaagctacactgccagcaaaattttccgctcaactcgatgttctattatcgggaccgtcaagaaaagagcgtcatcttcaacacgcacgccgagctcgtacactgctcgctctgcggcagtcagcgggtagtgcggcagcgcgtctacgagctcgtctccgagacgctctttggacagcgctgcgtacgcgtgggctggaaagccgtgctgggcctcaacgcggcttgtgccgtgtacgatcaccggctggctttcgacgtcattctgccctgcgcggcacgcacctgcgactccactgtggtggtacgcggcgtgacggtcccgcgtctcctgcgtctcacttcgcacgggcacggcctgctgtgcgcgcgctgtcagacgggcgagtaccgcgacagctgtttggaaagcgaagacggcgccccgctgtgtcgaggctgcgcgctggttaaacagaccgcctgccacgtcggcggccacattgtgcagcaggcgcgcggcggtttagcagcgacgtcctcctcgtcctccccccacggcctgccccatgtctaa

SEQ ID NO: 12633 - DNA, 114 bp, unidentified; identical to SEQ ID NO: 4128
  source 1..114: mol_type = other DNA
  misc_feature 1..114: note = Synthetic

SEQ ID NO: 12634 - DNA, 945 bp, unidentified
  misc_feature 1..945: note = Synthetic
  source 1..945: mol_type = other DNA
ctgctgctcgtccatcgtcattgtcgtcaccgtcgctacccgctcaccgagcgaacgatgatggcccgcgacgaagagaaccccgccgtcccgcgggtccgcacgggcaaattctcctttacttgcgccaatcatctaatattacagattagcgagaagatgtcgcgcggacagccgctgagctcgctgcgtttggaagaactcaagatcgtacgcctcatctgcgtcctcctctttcaccgcggtctcgaaacgctgctactgcgcgaaaccatgaacaacctgggtgtctcggaccacgccgtgcttagtcgcaagacgccgcaaccctactggcctcatctgtaccgcgaactgcgccaggccttcccggggctggactttgaggcggccgtgttcgatgaaacgcgcgccgcccgtctcagccagcgcctatgtcacccgcgcttgagcggcggactgctgacgcgctttgtgcagcgccacaccggcctgccggtcgttttccccgaagacctggcgcgcaacggcaacatcctcttctccctaggcacgctctacggacaccgcttgtttcgtctggcggccttcttcacgcgccactggggtgccgaagcgtacgaacccttgattcgcatcatctgtcaaaaaatgtggtacttttatctcatcggcaccggcaagatgcgcattacccccgacgccttcgacatccagcggagtcgacacgagacgggcatttttacttttattatggaagattacagaacgttcgccggcacgctgtcccggcacccgcaccgtccgcacccacaacagcagcagcaccaccaccccggtcccccccatcctcctctttctcaccctgcctcgtcctgtctcagcccagaggccgtactggccgcccgcgcccttcatatgccgacgctggctaacgacgtgtga

SEQ ID NO: 12635 - DNA, 18 bp, unidentified
  misc_feature 1..18: note = Synthetic
  source 1..18: mol_type = other DNA
atagcaataccacgctga

SEQ ID NO: 12636 - DNA, 108 bp, unidentified
  misc_feature 1..108: note = Synthetic
  source 1..108: mol_type = other DNA
acggaggacattaaatcgggttttctgcagtatcgtggaattaccctgccggtgataaagctagagaacatattcgttgacctttctgagaaaaaagtgttcgtatag

SEQ ID NO: 12637 - DNA, 39 bp, unidentified; identical to SEQ ID NO: 4133
  source 1..39: mol_type = other DNA
  misc_feature 1..39: note = Synthetic

SEQ ID NO: 12638 - DNA, 1755 bp, unidentified
  source 1..1755: mol_type = other DNA
  misc_feature 1..1755: note = Synthetic
atgcaagacgcaacggacccggcggtgcgggcggcgctgcagagccagccgtccggccttaactccacggacgactggcgccaggtcatggaccgcatcatgtcgctgactgcgcgtaaccctgacgcgttccggcagcagccgcaggccaaccggctctccgcaattctggaagcggtggtcccggcgcgcgcaaaccccacgcacgagaaggtgctggcgatcgtaaacgcgctggccgaaaacagggccatccggcccgatgaggccggcctggtctacgacgcgctgcttcagcgcgtggctcgttacaacagcggcaacgtgcagaccaacctggaccggctggtgggggatgtgcgcgaggccgtggcgcagcgtgagcgcgcgcagcagcagggcaacctgggctccatggttgcactaaacgccttcctgagtacacagcccgccaacgtgccgcggggacaggaggactacaccaactttgtgagcgcactgcggctaatggtgactgagacaccgcaaagtgaggtgtaccagtccgggccagactattttttccagaccagtagacaaggcctgcagaccgtaaacctgagccaggctttcaagaacttgcaggggctgtggggggtgcgggctcccacaggcgaccgcgcgaccgtgtctagcttgctgacgcccaactcgcgcctgttgctgctgctaatagcgcccttcacggacagtggcagcgtgtcccgggacacatacctaggtcacttgctgacactgtaccgcgaggccataggtcaggcgcatgtggacgagcatactttccaggagattacaagtgtcagccgcgcgctggggcaggaggacacgggcagcctggaggcaaccctgaactacctgctgaccaaccggcggcagaagatcccctcgttgcacagtttaaacagcgaggaggagcgcatcttgcgctatgtgcagcagagcgtgagccttaacctgatgcgcgacggggtaacgcccagcgtggcgctggacatgaccgcgcgcaacatggaaccgggcatgtatgcctcaaaccggccgtttatcaatcgcctaatggactacttgcatcgcgcggccgccgtgaaccccgagtatttcaccaatgccatcttgaacccgcactggctaccgccccctggtttctacaccgggggatttgaggtgcccgagggtaacgatggattcctctgggacgacatagacgacagcgtgttttccccgcaaccgcagaccctgctagagttgcaacagcgcgagcaggcagaggcggcgctgcgaaaggaaagcttccgcaggccaagcagcttgtccgatctaggcgctgcggccccgcggtcagatgcgagtagcccatttccaagcttgatagggtcttttaccagcactcgcaccacccgcccgcgcctgctgggcgaggaggagtacctaaacaactcgctgctgcagccgcagcgcgaaaagaacctgcctccggcatttcccaacaacgggatagagagcctagtggacaagatgagtagatggaagacgtatgcgcaggagcacagggatgtgcccggcccgcgcccgcccacccgtcgtcaaaggcacgaccgtcagcggggtctggtgtgggaggacgatgactcggcagacgacagcagcgtcctggatttgggagggagtggcaacccgtttgcgcaccttcgccccaggctggggagaatgttttaa

SEQ ID NO: 12639 - DNA, 702 bp, unidentified
  misc_feature 1..702: note = Synthetic
  source 1..702: mol_type = other DNA
atggttaaatctcgggtctcataccggtccgtgatgtcgggcgtgggggaagagagggtcccctctgcgtttactatccttgcctcgtggggctggacgtttgcaccccagaaccatgatcctggcgcgtcgccgaatacgacgcccatagagtcgattgcggggaccgcaccggacgcgcacgtggggcctctcgacggagagccggaccgggatgcgatctccccgcttacgtcgagcgtggccggcgacccgccgggggcggacggcccctacgtcacctttgatactctgtttatggtatcttcgatcgacgaactggggcgccgccagctcacggatacgatccgtaaggacctgcggctgtcgctggccaagttcagcatcgcgtgtaccaagacctcgtcgttttcggggacggccgcgcgccagcgcaagcgcggagcaccgccgcaacgcacatgcgtaccacgcagcaacaagagcctccagatgttcgttttgtgcaagcgcgccaacgccgcgcaggtgcgcgagcagctgcgggcggttattcggtcgcgcaagccgcgcaagtattacacgcggtcctcggatgggcggctctgcccggccgtccccgtgtttgtacacgagtttgtttcgtccgaacccatgcgcctccatcgagataacgtcatgctgtctacggaaccagactaa

SEQ ID NO: 12640 - DNA, 135 bp, unidentified; identical to SEQ ID NO: 4138
  misc_feature 1..135: note = Synthetic
  source 1..135: mol_type = other DNA

SEQ ID NO: 12641 - DNA, 519 bp, unidentified
  source 1..519: mol_type = other DNA
  misc_feature 1..519: note = Synthetic
atcgcctgctgcatcacgctctcgtacgagggaggaggaccctccgggtacgcacgcctcatcatactagatacaacaacagagaagaaacgaacgcacgctggtcgccatggccttggttcaaactcacgggtcccgtggccttcacccagaggcgtcagatccaggacgtcaaccgtcgcgtcgtcgctcacgccagtcttctccgggcgcagtaccagaacctacccgcgcgcggcgccgacgtgcccctgccgcccctgcctccgggccccgagccgcctctgccgcccggcgcgcgtcctcgccgccgcttctaaccatggaagaggcaccgcccccgtcgccccagccgcccaagaagaaacgggggacggtggtcacaccccaggggcacgggaccctgcaagccatcgacgtcgccaccaacggcgcggtggagatcaagtaccatctggacctcccgcgcgccctggaaaaactcctgcaagtcaaccgcgcgccgccgctgcccactga

SEQ ID NO: 12642 - DNA, 540 bp, unidentified
  source 1..540: mol_type = other DNA
  misc_feature 1..540: note = Synthetic
atcgcctgctgcatcacgctctcgtacgagggaggaggaccctccgggtacgcacgcctcatcatactagatacaacaacagagaagaaacgaacgcacgctggtcgccatggccttgagcatccacgactgcgcgcgcctcacgggccagaccgtgcccaccatgaactacttcctgccgctgcgcaacatctggaaccgcgtccgcgagttcccgcgcgcctccaccaccgccgccggcatcacctggatgtccaggtacatctacggctaccaccgcaccatgctcgaggacctcgcgcccggcgcccccgccaccgagcgatggccgctctaccgccagccgccgccgcacttcctcatcggctaccagtacctggtgcgcacctgcaacgactacatcttcgacacgcgcgcctactcgcgcctcaagtaccacgagctcgtgcgtccgggccaccagaccgtcaactggtccgtcatggccaactgctcctacaccatcaacaccggagcctaccaccgcttcgtcgactttga

SEQ ID NO: 12643 - DNA, 192 bp, unidentified
  misc_feature 1..192: note = Synthetic
  source 1..192: mol_type = other DNA
atgctgctgatagtggtaacaaacggggccaccatcgcgcgccgcggcgcgccctcgctgggcatccgctcgcgcggggcgctgcgcgtgctcacagtgctggacttcgtgtcgctgctgaccacgatcccgtgcaccatcatcctgtacttcctctacatgcaggcgctgaactctcggcgacaaaactga

SEQ ID NO: 12644 - DNA, 216 bp, unidentified; identical to SEQ ID NO: 10990
  source 1..216: mol_type = other DNA
  misc_feature 1..216: note = Synthetic

SEQ ID NO: 12645 - DNA, 219 bp, unidentified
  misc_feature 1..219: note = Synthetic
  source 1..219: mol_type = other DNA
ctgcgcgaggagcccaaggtcacgctgttgccgctggtctttttccagcatcccgagaaggtgctcgagctcatccgctcgctgcgctcgcgcgagggcatctacggaacctgcttcttcgacgagcgcgcgggggcggtcacgctcacgctgcgcagcctgcatgagcaggacgagaccgccggcggcgtattcaatgatgcgcgcgactctaaatag

SEQ ID NO: 12646 - DNA, 2004 bp, unidentified
  source 1..2004: mol_type = other DNA
  misc_feature 1..2004: note = Synthetic
ataataaagaagaacgaacgtacgctcgtcgccatggccttgagcatcaatgactgcgcgcgcctcactggtcaaaccgtgcctacaatgaactacttcatgccgctacgcaacatttggaaccgcgtacgcgagtttcctcgggcttctactaccgccgcaggaatcacctggatgtccaggtacatctacggctatcaccgccttatgttggaagacctcgcccctggcgctccagctacagaacgatggcctctctaccgccaaccaccgccgcattttcttatagggtaccagtatctggtgcgcacctgcaacgattacatctttgacacccgcgcctattcgcgccttaaatacaccgagctcgtgcgccctggtcaccagacagttaactggtcagtcatggccaactgtgcttacaccattaatacaggagcttaccaccgctttgtggattttgatgactttcaagccacccttacccaagtacagcaagccatcctcgccgaaagagtcgtagctgacttggcactggtacaaccaatgcgcggatttggactcacacgtatgcatggcagaacgggtgaggaagaagtgcccgtagaacggctcatgcaagactactacaaagatcttgctagatgtcaggataatgcttggggaatggccaatcgcctgcgtatccagcaagccggacccaaagacctggtgctcctcgccaccatccgccgtcttagaactgcctactttaatttcatcaccagcagcatcgtctcaccttcccgagatgaagaagaaacagaagacccagaccgaacacataaccacccccgcccacaagaagccgtactcagcctaccttgtgactgtgactggttagacgctttcgtcgaaaggttttcagatcccgtggatcttgacacgatcagatctctgcgtgcagtccctacgggccaattaataaaatgtataatcagcgccctctccctcccaaacggagaacctcccagtcaccactttaaggagatgcgcggcggtgtttttactctgcgaccgcgcgagaacggccgcgccgtcactgaaaccatgcgccgccgccgcggagaggtcattgaacgattcatcgaccgtttgcccgtgcgccgtcgacgtcgccgcgtgccccctccgcccccgcctgaagacgaagaagagatgttagtggaagaagagatagaagaggaagaagagatcccgggagccttcgaacgcgaagtacgggccaccatagccgaactcatccgtcttctcgaggaggaattgaccgtgtccgcgcgaaactcccagttttttaattttgccgtggacttctacgaggccatggagcgcttggaagctctgggcgatgttagcgaaatgccgctgagacgatggatcatgtatttcttcgtcgccgaacacattgccaccacactcaactacctttttcagcgcctatgcaactatgcggtcttcaccagacacgtggagcttaacctcgctcaggtggtgatgcgcgcaagagactccgagggggccgtggtttacagccgcgtctggaacgaggcgggcatgaatgcattctcccaactcatgggccgtatctccaatgacctcgcggccaccgtcgaaagagcgggtcgcggagatcttcaggaggaagaaatcgagcagttcatggcggagatcgcctaccaggacaactctggtgacgtacaagaaatactgagacaagctgccgttaacgataccgaaattgattctgttgaactctctttcaggttcaagctcacggggccggtagctttcacccagagacgtcagatacaagacgtcaatcgacgcgtggtggcgcacgcaagtcttctcagagcgcagtaccagaacctgcccgtgcgcggcgccgacgtgccactaccagccatgccctcgggtccggaacaaccgctgccgcccggcgcgcgtccccgtcaccgcttctga

SEQ ID NO: 12647 - DNA, 42 bp, unidentified; identical to SEQ ID NO: 4125
  source 1..42: mol_type = other DNA
  misc_feature 1..42: note = Synthetic

SEQ ID NO: 12648 - DNA, 156 bp, unidentified; identical to SEQ ID NO: 4148
  misc_feature 1..156: note = Synthetic
  source 1..156: mol_type = other DNA

SEQ ID NO: 12649 - DNA, 45 bp, unidentified; identical to SEQ ID NO: 4149
  misc_feature 1..45: note = Synthetic
  source 1..45: mol_type = other DNA

SEQ ID NO: 12650 - DNA, 432 bp, unidentified
  misc_feature 1..432: note = Synthetic
  source 1..432: mol_type = other DNA
atggaatcgtctaacattaacgcgctacaacaaccgtcgtctatcgcacatcatccgtccaaacagtgcgcttcaagtctcaatgaaacagtaaaagattctccccccgcgatttatgaagataggttagaacacacgccggtacaattaccccgcgacggtacaccccgagacgtatgttctgtgggacagctaacctgtcgagcatgtgcaacgaaaccttttcgccttaaccgcgacagccaatacgactacttaaacacatgtccagggggccgtcatatttcactggcactggagattataacgggtcgatgggtttgcatcccgcgtgtgtttccggataccccagaggaaaaatggatggcgccatatattattccagaccgagaacaaccatcatcaggggatgaagattctgacaccgattaa

SEQ ID NO: 12651 - DNA, 576 bp, unidentified
  source 1..576: mol_type = other DNA
  misc_feature 1..576: note = Synthetic
attcatccgaccacccgttctatccctaaatggcagaggaacaggcctaccatgtcagcaaagggctggaatgcctcaaagccctcagagagaatcctcctgacattgaggagattcaagaggtcagcagcctcagagaccaaacctgcaacccaggccaagagaatggaaccacaggcatgcaggaagaggaggactctcagaatctcgatgaatcacacgagccaacaaaaggatcaaactatgtcggccatgtacctcaaaataatccgggatgtggagaacgcaatactgcgcttgtggaggcggagcggccccctagagaggacatccaaccaggacctggaatacgatgtgatcatgtttatgatcacagcggtgaagaggttaagggaatcgaagatgctgacagtctcgtggtacctgcaggcactgtcggtaatcgaggattcgagagaggagaaggaagccttgatgatagcactgaggattctggcgaagattattccgaaggaaatgcttcatctaactggggatattctttcggccttaaaccggacagagcagctgatgtga

SEQ ID NO: 12652 - DNA, 747 bp, unidentified
  misc_feature 1..747: note = Synthetic
  source 1..747: mol_type = other DNA
atggcagaggaacaggcctaccatgtcagcaaagggctggaatgcctcaaagccctcagagagaatcctcctgacattgaggagattcaagaggtcagcagcctcagagaccaaacctgcaacccaggccaagagaatggaaccacaggcatgcaggaagaggaggactctcagaatctcgatgaatcacacgagccaacaaaaggatcaaactatgtcggccatgtacctcaaaataatccgggatgtggagaacgcaatactgcgcttgtggaggcggagcggccccctagagaggacatccaaccaggacctggaatacgatgtgatcatgtttatgatcacagcggtgaagaggttaagggaatcgaagatgctgacagtctcgtggtacctgcaggcactgtcggtaatcgaggattcgagagaggagaaggaagccttgatgatagcactgaggattctggcgaagattattccgaaggaaatgcttcatctaactggggatattctttcggccttaaaccggacagagcagctgatgtgagcatgctgatggaagaggaattaagtgctctactcaggacaagcagaaatgtagggattcagaaaagggatgggaagactctgcagttcccacataatcccgaaggtaagacaagggatccggagtgtggatccattaaaaagggcacagaagagaggtcagtctcacatggaatggggatagttgctggatcgacaagt

SEQ ID NO: 12653 - DNA, 36 bp, unidentified; identical to SEQ ID NO: 4157
  source 1..36: mol_type = other DNA
  misc_feature 1..36: note = Synthetic

SEQ ID NO: 12654 - DNA, 126 bp, unidentified; identical to SEQ ID NO: 12617
  misc_feature 1..126: note = Synthetic
  source 1..126: mol_type = other DNA

SEQ ID NO: 12655 - DNA, 33 bp, unidentified; identical to SEQ ID NO: 121
  source 1..33: mol_type = other DNA
  misc_feature 1..33: note = Synthetic

SEQ ID NO: 12656 - DNA, 45 bp, unidentified; identical to SEQ ID NO: 122
  source 1..45: mol_type = other DNA
  misc_feature 1..45: note = Synthetic

SEQ ID NO: 12657 - DNA, 447 bp, unidentified
  misc_feature 1..447: note = Synthetic
  source 1..447: mol_type = other DNA
atgttgacagcaatggctgagtttccatgtctgttgtttctctgcctaggagaacacaatggccagccgcgaaggaaatcagttaagcgaccgccacagggagcacacccccgaacgcggaaggggttctgccagtcatccgccttccaggtcggaccgcagcccttcgcaatcgcctccacctctgcccccgaagagaaacacctgtcgccgtgtggggtcaggttcttctaccgacagtcagttggtaatggtgagcgaaacgtcacaatcctccctgtctccggaacggagcgacagtcctcctcctccgataccccccaaaaagaagccaaggaagaccaaacatatccccatgcaagacatcagtcaagacagcgaagaagaaagagaagaggcgcaacttgtagcagtgggtttcagctacccgcccgtgcgcatcgttga

SEQ ID NO: 12658 - DNA, 6657 bp, unidentified
  misc_feature 1..6657: note = Synthetic
  source 1..6657: mol_type = other DNA
gtggatcctacgctttccttgaacatggaggaacacgttaacgaattgcacgaccttgtcaggaaatgggtgtctgatgatgaaaactttgcggagcagaaagcaatttttctgtcccagacaaaattgagggctataacaattgaaggactaaaattgttgtccacaattgtagaggttgactcatgtcaaaagaactcatgcattcataatagagagaaaacattgaactcaatactcagagacaacaaaatagtttgtccgacattaccagaaattgttccagatggttataggttgattggagatgtacttatactactagaggtgtttgtgcgctctaaccaggagtcttttgaaaagaagtatgaacaagactacacaaaacttatgcaagtaaagaaagacttacagtcacatggcatcacacttgttcctatgattgatggtaggtcatcctattatgttgagttcatgccagactgggtggtagaaaaaattagatggcatctaataaaattaatggatttgctaaaagaagatggtgaatcggttgaagagctagaatatgagaggcttgtatctagtctttctgccttggaaaatcaaagtctcggacttgaatccctattatcaattaaggaaaggggaattgagtatatagacagactcaccaaaataatgtatgggaatttgaataataatatgtcagttgatgagtgcaaaggggaaatattgaggatctatcagaattttagacaactttttgatcagggtcaattcaaaccaaaatataggaaaacggatagagagttcatactaaagacattaagagaacatggtttgatcaaatgtgcaatcatgagtgaagaagactcttgcaaaaactgcatgattcacatgttcaaagttttgacaataatcaagcaatcttttgtgagcaacaagaacatagaaagcagcttcatattaaaagaatacaaccaattgttgtcagtttgcaataaggttaagagtttgaaggtactgaacacaagaagggggactttgatggttttagatttaataatgttaaataaactcttaagtttgattaagatttatggaatcaaagctgcactgactatcctgagaatgcaatgtatccccgctgtcaatgatagactgttgtcaattgactttctgattagcatatatgagaggaaaatgattaaaagtcccaaatggctggaaaaggttcatgggaaactgaagagagtagttcaggactgtatgtttaaagcattggaagattatttggttgagattgattttgacacatggtttagtataaaggatgaacttttaatgacccagcaattcaaaccaagcatctgttatagaagtagtaagggttgtgtgtgtaatgcagaaactcttaagaacttaagcatgatgactgaagaagacttcttgtcatacttgaagattttatcaagtcttagcttatcattagtgaactctatgaagacctcaagtgcacctaaatcaaaaataaatcaagccaatgatttttatggaattgtccactgtgaagaagtttactttcagggatttggcgataacaatgcttgcacacttttatatcagaaaactggagaaaaatcaagatgttacagtgtagcattttctgacaatgagcaacagattgattatggcagcaagatttcattttatgctgacccaaagaggttctttttaccaatcatgtcccaagatgttctaaataggatgtgcaatgagatgttgtcatggcttgactttttgagtgatgacaatatcaaggttgttgcagacctcctcagaaaattgattttgtgtgtcttatgcactccatcaaaaagggtccaagtatacctccaaggctttagatatcttataatggcttatgtaaatgagattcattgtaatgacctctttgcaaagttggaagtggatgcattgacggcttcagagaggcaagtgatgatttggatggacgacttaaccaggattgtcttagagatgtctaaggaagctgatatggcaaagtcattcaaattcattttgaatttgtcttacctatgtcatctaattacaaaagaaacccctgataggctcacagaccaaatcaagtgttttgagaagtttctggagcccaagcttaaatttggcagcttgatggttaaccctgactctacaccagagttgacaagtgagcaagaggaccaagtttgtgagggtttacatagactacttaataaaaagattttctcaaaatgtgagaacataccgggtgtttcaaaagaactagtatcattgtgctcctctctctttaatagttcaaatcttgaggtgaagcccctactgaaccatgatccattaaccccatctttcactagcactgcattagatttgtccagcaacaaaagtgtagttgtgccaaagttgaatgagattggtgaaacccttactgaatatgactttgggaaaattgtctcaagtgttgtggtggacttgacagagcattttaagactaaaggaaaatataaattagatcctagagaccttagatttagaatttttaagaagttgagctcactggtagaggtgaacccaacaaagaaaagcaatagaaagagcgagtctggtgaggttgtggcccctgatgaatcttttatggacgagctcacagaagaacagcagttgatgttgagtgagattgaggtaaaagtctcaaagacatttgaggggatgtccaaggatgagctgaatagaaagcaaagtaaagaaaagggagctgaagcacatttgaagaggctttggagcaaggaagtgagagacaagatttcatcagaaacttcacttcatgaggtgaaggattttgatgttcagttgttcccttttgatacttatgaggaactagttacaattgtcttcaatgataagtctgcccatgacttctactttctagagaagtacttaaacccttgtccgctagacatgttaatgaaaaaccttacacttaaggcttttaatgaaggtgacttttttgaatgttttaagtacattctaattgcaagtgaatttgacaacaaaatcgggagatatgatcataaaataagaaccagattagggctcaaagatcctgctttgaagattagagaagaagcccgcattagtacaagggaaagtaactcagaatccatagccaaaaggttggataaaagtttctttacaaattcatccctaaggaatctttgcttctactctgatgaatcacctacaacgaggactggggtggcaactgatgttggaaaacttaaatttgggttgtcttataaagagcaagtggggggaaacagggagttgtatgtgggtgacttaaacaccaagttgatcaccagattagtagaggattatgcagaatcaatatgctcgaacatgaaatacacatgtctgaatagtgaatctgagtttgagagggcgctccttgatatgaaatctgttgtcaggcagggtggattcgcggtgagcatggatcattcaaaatgggggcctcacatgagtcctgccatttttgcacaacttttgaggtgtttgaaatttcgattgaaagatggctcagagatagataagaaagcagtactaaacatattatattggcatcttcataaaattgtggaagttcctttcaatgttgtacaggcttttatgagtggatttgttaagagaggattgggactcatggatagaggtggagcaacactatcagaggaatttatgtttgggttttttgaaaagggagttgtaccttcacacctttcatctgtggttgatatgggacaaggaatactacacaatatgtctgacttatacggtcttatcacagagcaattcataaactatgtactagatttctgctataatgtctcaatgacatcatatacctctagtgatgatgagatcatgttatcaacctcgtcagccttgaatcatgaagatggttctttgaatgttgatgtggcattggaaatcttggaattccataattttctttcagataagttgaataaattcgtcagtcctaaaacagtagctggtacttttgccagtgaattcaagtcaaggttctttatttggtcacaggaagttcccttactaacaaaatttgttgccgctgctcttcataacataaaagccaaagcaccaaaccagctggctgagacagtggatacaattttggatcaatgtgtggcgaatggggtgtcaatagaaattgttggtgcaatatccaagcgcacaaattctctagtctgttattctgggcacccattgaatccattcttgtgtctagaggagagtgatgtgagagactgggttgatggttcaagaggttatagattacaaaggtcaatcgaaaatatcttccctgatgacttgtgtcctaatcttattagggatgcctgtagaaaggtgtttcatagaattcagtctgggaagattgaagaagaattccttgttgcatccatacaaggttcccctgatgaatgtttaaattcaatgttaacaatagcagatgttgatgaggacattaaaaaagaccttgctggttaccggtggctcaacctcagggcatatggtgatcttagactggtcttgaggacaaaattgatgtcatcgaccagaaccctgcaaagggaggagataccaagcctcgtgagatcagttcaatcaaaattatcaaagaactttgtaagaggagccaaaagaatactgacagatgccatcaataagtcggcatttcaaagttgcatatcgtctgggtttattggcgtttgcaaaagtatggggtcaaagtgtgtgagagataatactggaggatttgtatatattaaagaaattacaaagcatgtaatgccgcacacaacctcttattgcccatactgcaaaccctcaaaaaacatttactgtgaggatgcactgcgaagtgtttcagagtattcaagacctatcttctgggattatttttcattagtcttgtccaatgcttgtgagttagggaattgggtattcggtgcaccaattttaccaaagacagtcttccatctggacaatccaaaccacttctggccgataaaaccctccagtcagacagagttggaagataaagtcggaatgaatcatgtcctatattcgatcagaagaaactatcctagtatctttgatgagcacatcagtccttatatgtctgatttaaacatgttaagattgagttgggttcaaaagataaagtttttggatttgtgtgtggcattagatatgtcttcagaatgtttgggtattatatctcatatcatgaggaggaagagagaggagctttatattgtcaagcagcaagagctatccatgtcccatacaagggaaagtacaaacttagagagtggtttaagtcttgaacctcaagaagtgtgtaagaacttcctcttacaagtgttgtttgattccatggtaaatccagttcttcttaccactagtcagtttagaaagtacttctggtatggagaagttttacagctcccgaatgatgcttctcatcatcttgctcagtttacacaatttattcttgactgtaagcagttgaattcaagcagggctatgacattagatgacttggatgtaggttacgtgaccagtagagttaagaggacaactacttttgtcgcattgtctactttcatcacatcattagattgggaaaacaggcatgagtataaatcattccaagagctaattctatcgtcaccatgcgatgtttttaagtttgagttcagcatgacttttagtcatattagatccagtcacaagttcagatatgagaggtgcactagttacattctcaaggtacatgtagtgttcgataaacgagtactgaactcaaatatgcttgaggaccagtcacttctgattacaccacactctgttgaatactttgtttcacaatcaggtggcaaccacattagcctggatggtgtgggtctcttacctctagatccacttatcagtggaaaagaggttttaaatatagatgatgttctcagacatgaagatgtaaatttctctgctgaaagtccactgttctcgaagatgaggtttgatttcaaacctttcttgaaggaattaaagaacaaattctcttacaaattaattggaccagatatcatcatggaacctctagttctagataaaggtcaaatcaaagaagggtcacgaattgtttctcaattgaaattgagattggactttaaagcagttttcgtggccttgggatgtctggaggaagagtcaaggtcaacatttatatcaaatctgtttatgtatataggatcacttagaggagaagagcatcgtatatccatgactgaatccaacctagttcaattaatagacaactatcctcaagtgtttgactcgatgttggatgccacaaatgactggttgaattgtggatcattttcattgtgcaaaagcaaatcacttggttgtgtcatgattgcagatgagaggggcccctttaaactaaaaggagtgaactgcagaagattgctcccggactcccaagctgtcgagattgactag

SEQ ID NO: 12659 - DNA, 1713 bp, unidentified
  misc_feature 1..1713: note = Synthetic
  source 1..1713: mol_type = other DNA
atggctcaatccaaggaagtgccaagcttcagatggacccagtctcttagaaagggattgagtcaattcacccaaacagtcaagtcagatattttaaaggacgctaagctgattgccgacagcattgacttcaaccaggttgctcaagttcaacgagtgcttagaaagaccaaaagaaccgatgatgacttgaacaaattgagggatctcaatatagaggtcgacaggctgatgtctatgaaaagtgttcagaagaacacaatcttcaaagttggtgacctggcaagggatgaactaatggaactggcctccgatcttgaaaagctaaaagacaaaataaaaagaactgagagcaatggtaccaatgcttacatgggaaatctgccacaatctcaactcaacaggaggagtgagattttgagaacactcggatttgctcagcagggaggtcgtcccaatggaattgttagagtttgggatgtgaaagattccagcaaactgaacaatcaatttggatccatgcctgcattaacaattgcatgtatgactgtccaaggaggggagactatgaacaatgtagttcaagcattgacctctttaggccttctttatacagtgaaatacccaaatctttctgatcttgacaagctcatcccaaaccatgagtgtctgcaaattataaccaaagaagagagttcaattaacatttcaggttacaacctcagtctgttggcagcagtaaaagcaggagcctccatccttgatggtggtaacatgttggagacaatcagagtgagtcccgacaacttctctagcctgatcaaaaacaccttacaagtcaagagaagggagggtatgtttattgacgacagacctggaagtaggaacccctacgaaaatttactctacaaactgtgtttgtcaggtgatggctggccctatataggctctcgatcgcaaattatggggcgatcctgggacaacacgagcgtagatctgaccaagaagccggatgcagtgccagaaccaggagcagcaccaaggccagcagaaagaaaggggcaaaatttaagactggcaagcctcacagaggggcaagaactaatagtcagagctgctattagtgaacttgacccctccaacactatttggttggacatcgaggacctccaacttgacccagtagagcttgcattatatcaacctgcaaagaaacaatacatccactgcttcagaaagccacatgatgagaagggatttaaaaatgggagcagacattctcacggcattctaatgaaggacattgaggatgctgtgccaggtgtgctcagttatgtcatagggttactacctcccaacatggtgattacaacacaaggatctgatgacatcagaaagcttctagatattcacggaaggaaagatctcaaattaattgatgttaagttcacttcagatcaagcaagactattcgagcaccaagtgtgggataaattcggccacctctgcaaacaacataatggggtgattattagcaagaagaataagagcaaagattctccaccaagccccagtcctgatgaacctcactgtgcactgctggactgcataatgttccactcagccgtgagtggagaactacccaaggaggaaccaataccactactacccaaagagttccttttctttcccaaaacagcttttgcactgtga

SEQ ID NO: 12660 - DNA, 756 bp, unidentified
  misc_feature 1..756: note = Synthetic
  source 1..756: mol_type = other DNA
ctgcgacagatcgtgacctacttctcggaattcagcgaggaagtctctgtcaacgtggacgcgcgcagcgagctcatgtacatcttttccacgctgggcggcgcggtgaacatctgggccatcgtgccgctgaacgcgaacgttttctacgacggcggcgagaactgcgtctttaacatccctgtgctcaagatcaagagctgcctctgcagtttccacaacgatgcggtcgtgaccatcgagcccgatctgcagaacgatgccgtgcgcctttccagcgaccacatggtgagcgtggactgcaaccacgaaccgatcccgcatcgcacgggcaccgtcatctcgctgggcatcgaccagaagaagtcctacatttttaacttccagcgctacgaggagaagtgctgcgggcgcaccgtcatccatctcgagctgctgctgggctttatcaagtgcatcagccagtaccagtacctgagcatcggcttcgcggacaagaacctggtactcaagacgccgggcacgcgcgataccttcgtgcgccgctactccatgaccgagtggtcgcccgcactgcaggcctactccttcaagatcgcgatcttctctctgaacaagctgcgcggcttcaagaagaaggtggtcatgttcgagaccaagatcgtcatggacgcggacgacaacatcctggggctgctcttccgcgaccgcatcgggacctaccgcgtcaacgtcttcatggccttccaggactag

SEQ ID NO: 12661 - DNA, 225 bp, unidentified
  misc_feature 1..225: note = Synthetic
  source 1..225: mol_type = other DNA
atgcgccgcgcggtaagcgccagcaggcggcgcgagctgagcgatcaggagctgatgcacagcctgcagcgggccctgaccggggccgggaccgagggggagagctactttgacatgggcgcggacctgcactggcagcccagccgccgggtcttggaagccgcggcggtcccttacgtagaagaggtggacgatgaggatgagggcgagtacctggaagactga

SEQ ID NO: 12662 - DNA, 1755 bp, unidentified
  source 1..1755: mol_type = other DNA
  misc_feature 1..1755: note = Synthetic
aagaacccaatagacaaatccaaattcgagatggaatactggaagcataccaatcacggaaaggatgctggtaatgagctggagacgtccatggctactcataacaacaagctcactaataagataatatatatattatggacaataatcctggtgttattatcaatagttttcatcatagtgctaattaattccatcaatagtgaaaaggtccataattcattgctacaagaaataaataatgagtttatggagattacagaaaagatccaaatggcatcggataataccaatgatctaatacagtcaggagtgaacacaaggcttcttacaattcagagtcatgtccagaattatataccaatatcattgacacaacagatgtcggatcttaggaaattcattagtgaaattacaattagaaatgataatcaagaagtgccgcaacaaagaataacacatgatgtaggtataaaacctttaaatccagatgatttttggaggtgcacgtctggtcttccatttttaatgagaaacccaaaaataaggttaatgccagggccgggattattagccatgccaacgactgttgatggctgtgtcagaactccgtccttaattataaatgatctgatttatgcttatacctcaaatctaattactcgaggttgtcaggatataggaaaatcataccaagtcttacaggtagggataataactgtaaactcagacttggtacctgacttaaatcccaggttctctcatactttcaacataaatgacaataggaagtcatgttctctagcactcctaaatacagatgtatatcaactgtgttcaactcccaaagttgatgaaagatcagattatgcatcatcaggcatagaagatattgtacttgatattgtcaattatgatggctcaatctcaacaacaagatttaagaataataacataagctttgatcaaccctatgctgcactatacccatctgttggaccagggatatattacaaaggcaaaataatatttctcgggtatggaggtcttgaacatccaataaatgagaatgtaatctgcaacacaactgagtgtcccgggaaaacacagagagactgcaatcaggcatcttatagtccatggttttcagataggaggatggtcaactccatcattgttgttgacaaaggcttaaactcaattccaaaattaaaggtatggacaatatctatgagacaaaattactgggggtcagaaggaaggttgattctactaggtaacaagatctatatatatacaagatctacaagttggcatagcaaattacaattaggaataattgatattactgattacagtgatataaggataaaatggacatggcataatgtgctatcaagaccaggaaacgatgaatgtccatggggacattcatgtccaaatggatgtataacaggagtatatactgatgcgtatccactaaatcccacagggagcattgtgtcatctgtcatactagactcacagaaatcgagagtgaacccagtcataacttactcaacagcaactgaaagagtaaacgagctggccatcagaaacagaacactctcagctggatatacaacaacaagctgcattacacactatgacaaaggatattgttttcatatagtagaaataaatcagaaaagttcaaacacatttcaacctatgttgttcaaaacagagattccaaaaagctgcagtcaatcataa

SEQ ID NO: 12663 - DNA, 84 bp, unidentified; identical to SEQ ID NO: 4169
  source 1..84: mol_type = other DNA
  misc_feature 1..84: note = Synthetic

SEQ ID NO: 12664 - DNA, 1719 bp, unidentified
  misc_feature 1..1719: note = Synthetic
  source 1..1719: mol_type = other DNA
atggaatactggaagcacaccaatcacggaaaggatgctggtaatgagctggagaaatccatggctactcatggcaacaagcccactaacaagataatatatatattatggacaataatcctggtgttattatcaatagtcttcatcatagtgctaattaattccatcaaaagtgaaaaagcccacgaatcattgctacaagacataaataatgagtttatggaagttacagaaaagatccaaatggcatcggataataccaatgatctaatacagtcaggagtgaatacaaggcttcttacaattcagagtcatgtccagaattatataccaatatcactgacacaacaaatgtcggatcttaggaaattcattagtgaaattacaattagaaatgataatcaagaagtgccaccacaaagaataacacatgatgtgggcataaaacctttaaatccagatgatttttggagatgcacgtctggtcttccatctttaatgaaaactccaaaaataaggttaatgccggggccgggattattagctatgccaacgactgttgatggctgtgtcagaactccgtccttagttataaatgatctgatttatgcttatacctcaaatctaattactagaggttgccaggatataggaaaatcatatcaagtattacagatagggataataactgtaaactcagacttggtacctgacttaaaccccaggatctctcatactttcaacataaatgacaatagaaagtcatgttctctagcactcctaaatacagatgtatatcaactgtgttcaactcctaaagttgatgaaagatcagattatgcatcatcaggcatagaagatattgtacttgatattgtcaatcatgatggctcaatctcaacaacaagatttaagaataataatataagttttgatcaaccatatgcggcattatacccatctgttggaccagggatatactacaaaggcaaaataatatttctcgggtatggaggtcttgaacatccaataaatgagaatgcaatctgcaacataactgggtgtcccgggaaaacacagagagactgtaatcaggcatctcatagtccatggttttcagatagaaggatggtcaactccatcattgttgttgacaagggcttaaactcaattccaaaattgaaggtatggacgatatctatgagacaaaattactgggggtcagaaggaaggttacttctactaggtaacaagatctatatatatacaagatctacaagttggcatagcaagttacaattaggaataattgatattactgattacagtgatataaggataaaatggacatggcataatgtgctatcaagaccaggaaacaatgaatgtccatggggacattcatgtccagatggatgtataacaggagtatatactgatgcatatccgctcaatcccacagggagcattgtgtcatctgtcatattagactcacaaaaatcgagagtgaacccagtcataacttactcaacagcaaccgaaagggtaaacgagctggccatccaaaacagaacactctcagctggatatacaacaacaagctgcattacacactataacaaaggatattgttttcatatagtagaaataaatcaaaaaagcttaaacacattccaacccatgttgttcaaaacagagattccaaaaagctgcagttaa

SEQ ID NO: 12665 - DNA, 27 bp, unidentified
  misc_feature 1..27: note = Synthetic
  source 1..27: mol_type = other DNA
atggcaacaagcccactaacaagataa

SEQ ID NO: 12666 - DNA, 504 bp, unidentified
  source 1..504: mol_type = other DNA
  misc_feature 1..504: note = Synthetic
atgccgcacaatcatgccagccacagacacaaacagcacccacaccacgccgcttcacccagaggaccaacacacgttacccttacaccacagcaccacacaacctcatgtccaaacttcggacaaacacgccgacaaacaacaccgcacgcagatggagctcgacgccgcggactacgctgcttgcgcacaggcccgccaacacctctacggtcaaacacaaccccaactacacgcataccccaacgccaacccacaggaaagcgctcattttcgcacagagaatcaacatcaactcacaaatctacttcacaacataggcgagggcgcagcgctcggctaccccgtcccccgcgcggaaatccgccgcggcggtggcgactgggccgacagcgcaagcgacttcgacgccgactgctggtgcatgtggggacgcttcggaaccatgggccgccaacctgtcgtcaccttactgttggcgcgccaacgcgacggcctcgctga

SEQ ID NO: 12667 - DNA, 933 bp, unidentified
  source 1..933: mol_type = other DNA
  misc_feature 1..933: note = Synthetic
atgccagccacagacacaaacagcacccacaccacgccgcttcacccagaggaccaacacacgttacccttacaccacagcaccacacaacctcatgtccaaacttcggacaaacacgccgacaaacaacaccgcacgcagatggagctcgacgccgcggactacgctgcttgcgcacaggcccgccaacacctctacggtcaaacacaaccccaactacacgcataccccaacgccaacccacaggaaagcgctcattttcgcacagagaatcaacatcaactcacaaatctacttcacaacataggcgagggcgcagcgctcggctaccccgtcccccgcgcggaaatccgccgcggcggtggcgactgggccgacagcgcaagcgacttcgacgccgactgctggtgcatgtggggacgcttcggaaccatgggccgccaacctgtcgtcaccttactgttggcgcgccaacgcgacggcctcgctgactggaacgtcgtacgctgccgcggaacaggctttcgcgcacacgattccgaggacggcgtctctgtctggcgtcagcacctggtttttttactcggaggccacggccgccgtgtacagttagaacgaccatccgcgggagaagcccaagctcgaggcctattgccacgcatccggatcacccccatctccacatctccacgcccaaaaccaccccagcccaccacatccaccgcatcgcacccacatgctacggctcggccagatcacacgctctttcctgtcccttctacaccctcagccacggttcacaatccccgaaactacgccgtccaacttcacgccgaaacgacccgcacatggcgctgggcacgacgcggtgaacgtggcgcgtggatgccggccgagacatttacgtgtcccaaggataaacgtccctggtag

SEQ ID NO: 12668 - DNA, 1683 bp, unidentified
  misc_feature 1..1683: note = Synthetic
  source 1..1683: mol_type = other DNA
atggcaaactccaaagagattcccagcttccgctggactcaggccctgagacgggaactgggcagcttcacagagcccaccaagggaagtgtcctgaaggacgccaagttaatagcagacagcttagacttcactcaagtctcccaagtccagaggcttcttcgcaaaacgaagagaaccgatgccgatctcgacaaactgagagatttgaacaaagaagttgataagctaatgagcatgaaaagtgctcaaagaaatacagtactgaaagttggcgatctggggaaagacgaactcatggatttggccagtgatttggaaaagcttaaaagaaaaattggagagagacccaatggtggtccaagattatatatgggaaatttgtcccaatctcaactggacaaaaggtctgacattctaaggtcactaggatttcaacagcaaagaggacctaatcaaggaattgtgagactctgggatgtttctgatccgtctaaattaaacaatcagtttgggtcaatgcctgcattgaccattgcatgtatgactgttcaaggaggggagactatgaacaatgtggtgcaagccttgacatctttaggtcttctttacacagtgaagtaccctaatctggatgatttagagaaacttacagttgagcatgactgccttcagattattacaagagatgagagtgctttaaacatctctggttacaacttcagtctttcagcagcaacaaaagctggtgcttcccttatagatgggggtaacatgttagaaaccatcaaagtgacaccggacaacttttcatccattatcatggccacactgaaagtgaaaaagagagaaggcatgttcgtggatgagaaacctgggaataggaacccctatgagaaccttctctacaagttgtgtctctctggagaaggttggccgtacatcggttcaaggtctcaaattgtggggagatcatgggacaacacaagtgttgacttaaacaccaaaccaacagtaggaccaaggggtcctgaaaggaatggtcaaaacatgagactttccaatctttctgagctgcaggaagcaattgtgagagaggcaatgcaaaagttagatccatccaacaccatatggatggatatagaggggccccccacggaccccgtggaacttgctgttcttcaaccttcaactggatactatatacattgttacagaaaaccacatgatgaaaaaggtttcaaaaatggcagtagacactcccacggaatacttttaaaagatcttgaggatgcccaacctggacttctaagttacatcatcgggcttctacctcaaaacactgtcattacagttcaaggtgccgatgatataaaaagactttttgacatacatgggcgaaaagatctaaaattggtggatgtaagactcactggagaacaatcacgaatttttgaacaggaagtttgggagagatatggcgagctctgcaaggcacacaatggtgtgatagttcctaaaaagaagcacaaggacaatggtcctcaaaaagagccccactgtgccctgctcgactgcatcatgtttcagtctgtacttgatggtcacttacctgaactcagcctgaagcccttactaccaggtagtctggtgtatcaggcaaggaatgcatttgtgatgtag

SEQ ID NO: 12669 - DNA, 345 bp, unidentified; identical to SEQ ID NO: 10383
  misc_feature 1..345: note = Synthetic
  source 1..345: mol_type = other DNA

SEQ ID NO: 12670 - DNA, 6648 bp, unidentified
  misc_feature 1..6648: note = Synthetic
  source 1..6648: mol_type = other DNA
ctggcagtcatgcaagaccccctcttaggaaccctgtctgaattaaaggatttggttagaaaaaccataccagatgtaattgagcttgcatatcaaaaggacgcattactttcacaagtgcatccaagatcagtgttaattgaggggtttaaacttttatctttgttggtggagttggagtcctgtaaggtaaatgcatgccatcataattacgaacaaaaatttatagatgtgattctttccgatggtggcattctctgtccaactctgcctaaggtggtgccagatggttacaacctgatgggaaagactctcatcttgttggagacttttgttagagtaaatccagacgactttgaaaagaaatggaaggctgatatgagcaaattaatctctctaaaaacagacctaggcaagataggtgttacattagtccccgttgtagatggccgcagcaattacaataccagcttcgtgtctgattggaccacagaaaggttgaggtggttgttaatagaggtgttgaaaggtatgaagactacttcagaactagaaattgaagaacaagaatatcatagattaatccatagtttggccaagaccaacaatcaaagccttggttttgaaaatcttgaatgtctcaagaggaatatgttatcctatgatcagttgctggattcctcattgttagttggagttaagaatgatgtgaaagaatcaaaagtgatggaggagcttataagattgaaaatttggtacaaaagtgaagtttatgagaaaggtttgggaaagtttgtgaaaacagacaaaaaggtcctgctgtctcagttaatcacattaggctcccatgaggagaatgatagcctagactgtgccttttgttcctctagaattttggagttgtgtttcaaattatcagtcaagatgcatgaggatgtgctcacaagggggctgaaccttgatgggactaaaactttacactcatcagtgcaatcttacctgaatgtgttgtccatgtgcaataagattaaaggttcaaagatctttaataccaggaggaacacactattgtttttagacttaatcatgttgaacttcgttgttgatgagatggtaaaagatagcacagttatcaggaacctaaagaatgcaggattaatagttggacaaatgatattacttgtcaatgatcgggtgttggacatcctcactgctaataagttgatcaggcaaaaactgaccaccaatgaaaagtggctttcaatttgtagcagtgttcttaaaaggtatgatttagagctctgggaaaagctgtgttatttaataagagttcctgactttaatgaacttttccaactcgcaaaggagttagtctcagacaggcctatgatgaggtattctgttcacaaagcagaggaacgacaatgttgccataaagcaatggagaacttcactgacgatgacttcaagataatgttaaaggccttgtctcatctttcattaggcttgatcaattcaatgaagacatcattttcctctcggttacttattaatgagagagattattcacgatattttggtaatgtgagacttagggaatgttatatccaacgattccctatcacaaacaacataataggtttactgttttaccaaaagacaggagaaagatctagatgttactcactttatattgcagaaaatggtgagttgactgagatcggatctttttactgtgatcctaaaagatactttgtgcctattttttctgaagctgtgatcacatcaatgtgtgaagaaatgatcaactggttgaactttgattcagagttggtgagaatagtatccactcaattaaaaacactcatgttactactgctctgttctccttcgaagagaaatcagacattccttcaaggtttgaggtattttataatggcatatgtcaaccaagcacaccacattgaccttatgtctaagttggcagttgagtgtaagtctagctcagaaatccaattgcaaagattatgtgtcagattgtttgtttcgattttatctggtgacaatgagatagaatatgggttcacaagaagattcaagtttctactgaacattagttacctttgccactttattacaaaagaaactccagataggctaacagatcaaattaaatgttttgagaaattcttggaacccaaattgaaatttaatagtgtcattgtgaatccgtcattgaacggaaccttgacagaatctcaggagcaccaaatgatttctagtattgatagattcttttccaaagagttgcttgatcaatctgatgtgaaggagcctggtgtctctagagaactacttggatactgtgtttcattgttcaatagaggcaaattgagagtgtcaggggatttgaaagtagatccctttcgtcctactttcacaagtactgctttagacatctcgagcaataaaagtgttgttgtcccaaaattagatgaacttggaaatattgtagataaatataataaacagttaatggtatcatcatgtgtcacatcacttgtagaaatgtttaagaccaaaggtaggtacaatttagatcctgattctattgatttccttgtgttaaaaaacctcacaaacttggtaagtgcaaatgtacctcaagaaaagtctcaagaagaattgtcaacattgtatgaagcactgactgaggaccaaatttctgcattcgaacaggtgagggatgaagtacagttagcattacacaaaatgaaaagttcagatgctagagaagaaaggttgcaggatccaaaaagaaatgagaagaatgcatcaaaagggaagatactggaatctctttggtcacctcatcaggtaaacagagccataaaaaatgagacctcaatccatgaaattaaagattttgatcctgacattttagatagtcatcttgttgaaaaactttgtcatgaggtgtataattcatcacaaaagtcactgtttttccttgatgaaccgttaaaatctgttccattggaaatgttgttgatcaatttaactaccatagcctatgaagaggaagagttctttgagtgttttaagtacctattaatacaaggagactttgatcaaaagctaggtacatatgaacacaagagtagatcaagattagggctgagttcagaggcacttaaggtacaagagaatgcaagagttagcacaagagaaagcaatgctgaggcaatagcaaaaaaacttgatagaactttctttacaagtgcagctttacgaaatctttgcttttactcagaagattccccaactgaattcactagtgtaagcaccaacactggcaatctgaaatttgggttaagttataaagaacaggttgggtctaacagggagctttatgtgggagatcttaacactaagcttatgactagattggtagaggatttctcagaagtggtcacaggatcaatgaggttctcttgtttgaattctgagaaggaatttgaaagggcaatttgtgatatgaaaatggcagtaaacaatggtgactttagtctttccatggaccactcaaagtggggaccccacatgagccctgctctgttttttacatttttagccaatttgaatcttactgagcccaagagtagaacaaggctgaaccttgatcctttacttaatatactgaagtggcacttacacaaaacagtagaggttccttttaatgttgcacaggcttactgtatagggaagcttaaaagaagtcttgggttgatggaatgtcagtgttcaagtctcacagaggaattttatcatagctaccttcagattcaagatgaaatcccaagtcatataatgtctgtacttgacatgggccaaggcatcctacacaatttgtcagacttgtatgcattaataactgaacaattccttaattatgtaatacacaaactgtttgatattgatgtcacttcttacacatctagtgatgaccaaatttcaatcatgaaattgccactgagtacaaaagaaaatgatgaagattttgactggttggaaatcatctgtttccatgagtacctatcttcaaaattgaacaaatttgtaagtccaaagagtgtggtggggaattttgttgctgagttcaaatcgagattttttgtaatgggtgaggaaactcccttgttgaccaagtttgtggccgcagcattacataatgtgaagtgtaaaacaccaactcaattagcagagactattgataccatttgtgatcagtgtgtggccaatggtgtaggagtggatattgtctcaagaatatcagagagggtgaatcgattgattagctattctggctataaagagacgcctttcctgaccattgtcaaccaagatgtcaaagattggacagatggatcgaggggttatcgtctccagagaaatatagagaattcttttggcaatcaggaactgcttcgtttgataaggaggggggcaagaaaagtatttttggaaataaagaagggtcatgtgtttgaagaaaatttgattggtttgattggcagggggggtgatgaagctttaagagggtttttattgtatgcaggatttgctgaaaatgacattgttgaggctttaaggcataaatggttgaatccgtccacttttggagatttgagactggttttaaggacaaaaattatgtctagtaaaagaatcttggaaagagaaagtgtaccaagtctgataaagacactacaatccagaatgtcaaagaactttataaagggggcaaaaaagattttagcagaatcaataaataagtcagcatttcagtcatctgtggcctcaggtttcatagggttctgtaaaagtatgggtagtaaatgtgtgagagacggcaaaggaggttttatgtatctgaaagaattgtacaataatgtgaataagtgtggatgctgtatatgtttggaatggccaggtgttgtttactgtcaggattctctagcaaaaatttcacaatttgcaagatctattttatgggattacttcacattagttctcactaacgcatgtgaaatcggagaatgggttttctctgatgtgaaatctccttctgcacctcctattttaagtaatccaaatctcttttgggctgtcaagcccaagattcaaaaacatattgaagatagactaagtctaaatcatattttacactctattaaaaggaactatccctatttatttgaagaacatctagcaccgtttatgagtgatttgcaattcaatcagatgatgaacccatcacatgtcaaattcctggatgtatgtatagcattggatatgatgaatgagaatctaggcataataggtcatcttttgcgtggtagaaatcatttcatatacatagttaaacagagtgagtgtgcttctgcacacataaggcaatctgactatgtggaccatgagcttggtttaagtcctcagcaagtttgctacaattttaaagttcaatttttgttttcttcgatgattgatcccctcatagtttctacgtcaacattaaagacatttttctggtttaatgaggttttaagtatagaggaagaagatcagatagatttgggagaattgactgacttcacattgtttataaaaacagggcatctgaatagggccatgacagctgatgacataacaatgggttatgtgtgttccaacctcgcagaagaaataatcacactgaattcctatggatcattccaagaattcagatcaaatcatccatccaagaatgatttatcagacatcttaaagactctcactagtgaatcaataaaactcacattagacatacaaattgtccatatgagaaattctactaagtacaacattagtaggaagattgtttatactcttaaggcactctgtgctctaccacttgaggactgcttcactaaagacccagtggctttggtggaatccttggagttgtttgcttctggtgtaaatggaggacacctgcagttggatggtgtaaccatggtttcagttttgcctttgctgagagggaagaaggcagtgaatttagctcagattctaatggataacgatttagctgcgaccaatgatcacaatgtgatggaatctgtaacacttgatttcaccaaatttcatgatgaactaggtgacaaattctgctactcattagttggtcctgaggaccagggcaatccaattgtcctccacaacggcatgtttatgattgataatcagaagttgtcttacttaaaggtggagatttttggtgacaccataattaaggcacttggggcactggacagccccagggagattgggagtcttctacatgggctctggccttatctgaaggctaccaagcaaatcattaattttgatcaaacagactttgaaatgatttatgatcttcacagagttgttttgttggaatcaattgctcagtttggagattgggttgaatttgccagttttaaggttgcattcagcaaacattacaaagacattgttgttgctgataatctaggaaacttaaggctcaagggtgttacctgcagactatttagacagcagcagtccgttgaagacattgagtaa

SEQ ID NO: 12671 - DNA, 6684 bp, unidentified
  misc_feature 1..6684: note = Synthetic
  source 1..6684: mol_type = other DNA
gtggatcctaggcatttcttgatcatgattgattgctctgatcgtataaatgagctcaaggatctcgttagaaggtgggttcccgacgaagaagcctacacagaacaaaaaacaatagtcctctctcaggtcaatccctcttcagttataaccgagggtctgaagctcctatcaatgctgatcgagattgattcatgccttaagcatgggtgcgttttcaacaagaataagacagtgaatcaaatcttgaaagaccacaagattgtaggtccaacactcccagatgtggtccctgatggattcaaagtgtcaggatctacaataattctcttggaaacttttgttcgtgtgaatcaagaatcttttgaacaaaagtacaaatatgattttgaaaaattaatgcaattatctaaagacttgaataaatgtggtctcattcttgtgcctgtgattgatgggaggtcaaactattatgtggatcgtttcccagactgggttatagagaggattagatggctgttgcttaaactaatggattctgtgaaggatagcggagaaagtattgaagagttggaatataatcgtttaatttccagtctctctaacatggagaatcagaacctagggcttgaatcacttaaggctctgagagaagaaggtttggattacaaagcgaaattgatgggggtgataaaggatgggacaatgtccaaaatgacagcttctgagtgtagaataggtatcgctaagatttatgatcaattttgtttgctaagggatagtgggcaatatcaggatgtgtactgtgaaacatctagggcagacatgatcaaatggttaaaaactcacaagttaatttcacctataagcaatggtgaaggaggcccactcaatagtgaacgttgtggtttttgtcaaaaccatatgctgagggttattgccgagctggtacaaagcaagagagcatcatgcacccaactgccagctgagagcaaagagacattgagacacaaaaaactgctctctgactgtaataaagtgaaggggctgaaagtccttaatacaaggagacatgcaatactttgtcttgatgtgattgtccttaatagtctgattgaagtaatcaaatcaggagttgatagtagtcacttccttattaacaatcactataaaagtgtgaatgacagactactgtcagtagacttaataatcaataaattagaaaggaaattgttgaaacaacctgattggctcaaaattgtgggaagaaaattgaataaaagtgtcaaggaacaaagtttagattatgtcactgtatggttgaaggaattggattatgagttctggtatgagtttaaatttgagagagagcactcaggtaaatgtgagaaaccaacattaaggtataaaaaacagaatcaagatacatgttatcaggttaaattcgggacagataaggtccttaatgaaggtatgtttgtggattatcttgatgcattatcaagtctaagtttaagcatgatgaactctatgaagacaagttcagcaccaaaattaataattaatgatgagaagaatttttatggaacaatccaatgtgaggagtgttactatcaggatctggataatttatacaacagtatactcttatatcagaagaccggtgagaaatcaaggtgttacggtttgatgctaaaagatgaagaaatgactaatgcatataaaacaggcccaagcttttatgcagaccccaagaggttcttcttaccaataatgagttcaactgtgattcttaaaacatgtctggagatgttatcatggttagattggctatcaaccgctgaaataaatgatgtgaaaaccaaactcttcacactggttgtgaatatcctcattacacctagtaaaagggtccagatttatttacagggattcagatattttatcatggcttttgtcaatgaattccatttcaagaagttagatcaaaagttaagcgttcaggcattgacttctgcagaacaacatgtttttgtattgatggatgagctggttgtgtatctgttggaggaggctttagaagagaacatggctaagatttttaaatttgttctaaatctgtcttacttgtgtcactttatcactaaggagacccctgatagattgacagatcagattaagtgctttgagaaatttttggagcccaagatacaatttggatcttcatttgttaatctggactcatcccccaacttgtgtaaagaagatgaagagaagtttattatgaatttgaacaaactcttttcaaaagaccttggtgttgatgatatggagaatccaggcatatgcaaaactattctatcattatgtgtttcttgctttaattgtggaatactaccaattaacaaagttttggatcgtgaccctcaatcaccatcattcagcagcacagctcttgatatatccagcaataagagtgttgttgtccctaaattggatgaagcaggtgaggttatcacacattatgattatcagagccttttgtcatctgtagtagttgaaatggcacaatcctttaaagataagttaagatttaaactggatagaaaatctattcaatttgcaatttacaaaagactaactaatatggtgctcaaaagaaggtcccacccaaaggaccatgacgatgagtgtgctgaagaattcgaggaactgcttgatgagggcacatataaactaatcaatgatatagaatctaatgttcttgagtgcttaaacggaatggtcacctctccaatgaagaaggatgttaaagaacagggagcagtacgaaggtatgagggttctgatttgctaagcacattgtggccgagagagttaatgggccccattttagctgagacctcactacatgaagtcaaggattttgatccttcaatcttttcagacggcacctaccaagatttgtgtcattcagtttttaacagtaaatttaaaaagcatttcttcttggatgatgtgttaagattttgtcccttagaatcactggtgaagaacttagccactaagaactatattgaaaaggattattttgaatgtttcaaatatatactgatctcagcagggtttgataacagagttggaagatacgatcacaggagtaggtctaggcttggattcaaagatgctgcatatcatgtgaaggaggcttctagaataagtctcagagaaagcaattctgaagcaatttcaaaaaggcttgataaaagtttctttacaaactcatcccttagaaatttatgcttttattctgaagaatcaccaacctttcaatcaacggtttcttccagtacaggaaaacttaagtttggattgtcatataaagaacaagttggaagtaatagagagctatatgttggtgatttaaatacaaaactcactagtagattgattgaggactactttgaatcaatcacatcagagagtaaattttcctgcttaaacaatgagcttgagtttgaaaaggcaatattggatatgaagtctgtggtgcgactctcagggctagcggtgagcatggaccattcaaaatggggcccttatatgtcccctgctattttcaatgccctgttctcaaaccttgatttgcaactaaaagatgggacctcaattgacaagggtcctattgaaaacctcctcaattggcatttgcacaagttagttgaggttccttacaatgttattgaggcatacctcaagggttacacaaagagaggtttgggactcatggataggatgtcaaacacaatctgtgaaaactttattttcaactggtttgccagaggtgtggtcccctcccacatttcttctgtattagatatgggtcagggaattttacacaacacatcagattattatgggttggttactgagcaatttatcatgttgtgtttagaacagtgctttgatgtaaagatgtctgcctacacgtcaagtgatgatgaaataatcttaagtaattcattttcattaaggaattctgataatgaatcattaaataatcttaagtgtaaagaacttcttgagttccattattatctatcttcaaaattgaataagtttgttagccccaaaactgttgctggatccttcgcaagtgaattcaaatcaagattttttatttggtcacaagaagtgcccttattgactaaatttgttgcagctgcactacataatgtgaaagcaaaatcacctcatcaactagcggaaactatagacacaattcttgatcaatgtgtggctaatggtgtctcaattgagattgtaaaagagatctccaaaaggactaatagactgatcaaatatagtggtcatccaattgacccttttttatgtgttgttgacacagatcttaaggactgggtggacggatcaagaggttaccgtcttcaaaggtccatagagtcagccattggtgatgacacacaactctcgattataagaaattcttgtaagaaactcttttttaaaataagatcaggaaatatacaagaagagtatcttataagtgcccttcaatcttctcctgatgaatgcctcagacagatgttgagcattactgaagtgaatgaacaagagattgaggacctagttgaaacaagatggttgaatctaagaacctttggtgatttaagactagtcttaagaactaaaattatgtcaggcacaaggatcttggatagagaagagataccatcactgatcaaatctgtgcaatcaaaactctcaaagaattttgtgaggggggctaaaaagattgtcacagacgcaatcaataaatctgcttttcaaagcagtatatgctctgggttcatagggttgtgtaaaagtatgggttccaaatgtgttagagacggtactggtggttttgtttatatcaaaatgctgttgagagaaatcaaggaccatcaagcttgtggaatttgtaaacccaaactcagtgtgttttgcaaaagtgctttggatagactcccaaagtattcaaggtcacttttgtgggactattattcactggtgtttacaaatgcttgtgagttagggaactgggttttttcagaagcaatgttacctaagagagtcccaactatggtaaaccccaactttttttggtgtgtcaaacctggaagccacactgagctggaggacaaggtcaacatgaatcatgttctctattctatcaagaggaatttccctgatctctttgatgagcacattgcaccttttttgtcagaccttgcttctttaaaaatatcctgggttcagagaattaagtttttagacctttgtgtcgctatggacatgtctagtgagtgtttaggggttatttcccacattatgaggcgtaaaagagaggagtcgtacatagtgaaacaaaatgagttgtcacatgctcatgtcagagattcaaatcccttggaagggggatttcaattaaattcacttgagatttgtagaaatttcttatatcagataatatttgaatcaatgttgcacccagttttattaacaacttctcaatttaaaaagtatttttggtatggtgaagtggagctcctccctaatgatgcagaccatgatttgggccaactcactcaattcattatggactgcaaaactctgaatatctccagatgcatgagtttagatgatttggacgttggttatgtacatagtaaaataacactgagtgacatattcataaatttgagcagtttcatgcatttacttgactggggaagtttaaatgactatgagtcatttgatgacatcatcctcaaaacaggacaaaagcagacacctattgaaataggcatagtactctcgcacattaggagaagtttcaagttcaagtatgataggaaaactaattatcacattgaatgcagactaataatagacaaggatgaaatgatgatgaacagatgggatgaggataacattttggagattgaggtttcagaggttcaatgctttgtaagtggctcagaaggacatcatataagtttggatggcgtcggactcattccattgcatcctttgttttctgggaaggaactcatagattttaacaaacttttagtagatcagtcagttgagtttagacagacatcaacagtttttcagagagtcaggcttgattttagacagcacacaaaggatttaagaaataagttctcttacaagtttcaaggaccagaacaagggcttagtccactacacttatataaaggtcaaattatggaaagaaacacaattgtttcaaggctagatgtcccaatctcatcaaaatcagtgttcttggcattggaggctttggatccagcagaacacaccacttttctcacctcactccacacttatatgaaaaccagaatgagcaaaagcaatccttgcttcatccgcatgactcaggaggacctgtgtctactgattgagtcctatgaggcagccttcattggcgttctcaagcttgaatcagactggattgagtttggtgattttgctttatgcttcagcaatagcctcaactgcatcatgattgccgatgatggaggccaatttaagctaaaaggcagaaagtgcaggagtgcctccacatgtccaagaccactagaaatagagtga

SEQ ID NO: 12672 - DNA, 60 bp, unidentified; identical to SEQ ID NO: 4180
  misc_feature 1..60: note = Synthetic
  source 1..60: mol_type = other DNA

SEQ ID NO: 12673 - DNA, 66 bp, unidentified; identical to SEQ ID NO: 4182
  source 1..66: mol_type = other DNA
  misc_feature 1..66: note = Synthetic

SEQ ID NO: 12674 - DNA, 1665 bp, unidentified
  misc_feature 1..1665: note = Synthetic
  source 1..1665: mol_type = other DNA
attcctgcgtttcgttggactcaagctctcagaagaggcctatccaactggacacagactgtcaaagccgatgtcatcaaagatgcaaaggctattatgagtgcccttgacttcaatcaggtggcacaagttcagagaatgatgaggaaggacaaacgatctgaagctgatctcactagattgagagacatgaacaaggaggttgatgctctcatgacaatgagatcagttcagagagatgtggtgttgaagataggagggctatctaaggatgagttgctggagttatcatcagaccttgagaagttgagaaagaaagtgatgagagcagagggatcaagtacaccaggtgtctatcaaggcaacttaacaacatcacagctccagcagagagcggatctgcttaagctggttggcatgaagcctctgcaacaatcaagaggtggggtagttaaagtatgggatgtcaaagattcttctcttatgatcaatcagtttggctccatgccagcattaaccattgcctgtatgacagagcagggcggagaacaaatgaatgatgttgtgcaaggtttgacagcattagggcttgtgtacactgtgaagttcccaaacttggatgacttggaaaagctgaccgaacaacatccctgcttgaagctcatcacccaagaacaatcacagatcaacatttcaggctataatctgagtctttctgcagctgtcaaagcaggtgcttgtatgattgacggagggaacatgttagagaccattaaggtttccccaagcatgtttagtacacttataaagacagttcttcaagtgaaaaacagagagggaatgttcattggcaatgctggacctcaaagaaatccttatgagaatctgctttacaagatctgcctgagtggtgaagggtggccatacattggctccagatcacaagtttctgggagagcatgggacaacacatctatcgacatcgaggggaaaccctcacccaaccaccctccagtgagaaatggtggaactccacaaattaacccactaagcagagaccaggaagatcaagtgaaaggagctgtgaggctgttggaccctaaagtaacaacctgggttgacattgaggggccccctggggacttagtggagtttgcaatctttcagccaaacagtggcaaatacctccactgttacaggcgccctcacaatgagcaatcattcaaggaccaaagtaaattctcacacggccttctgcttaaggaccttgagtctgcacaaccagggttggtgtctgcaatcatcagggccctacctgaaggaatggtgttgacagcacaaggctcagacgacattgaaaagttgttcctgatgcatggcaggagagacctgaaggtagtggacgttgctctcactagtgaacaagccagagtgtatgaggacactgtctgggagagattcaaccccttgtgcaagaaacacaaaggccttgtcatcaagaagaaaaagaagggtgctgccccaacatcgaccaatgcacactgtgccctgctggactgcatcatgtttgacgccacaattactggctacatagctgatgcaaaacctcagcagttgctcccaattgatttactataccgaactgaaaacctgatacacctgtga

SEQ ID NO: 12675 - DNA, 1524 bp, unidentified
  source 1..1524: mol_type = other DNA
  misc_feature 1..1524: note = Synthetic
atgggtcaggtggtgactttctttcaatcaattcctgagatcatacaagaggccatcaacattgctctaattgctgttagcgtcatctgcatcatcaaaggctgtgtaaacctctggaaatgtggtctaattcaactgatggtctttctcttgcttgcggggaaaaggtgtgatgctcttaacattgatagaagacatgtgctgtcatctgtggaactcaacctaacgaggatgtttgacaattttcctcagtcctgttccaagaataacacacaccactattataaaggccctgaaggaacaaactggggaattgagctcactttgaccaatacgtcggttgccaactacacatcgatgaataggatcagaagtcttgcttttggcaatatcaccaattgtgacaagactggtgaggcaggtcacactctcaaatggcttttaaatgagctacacttcaatgttttacatgtgacgagacatgtgggtgcaagatgcatgacaacagagggtgcaggacttctgattcaatacaacctgacaattggagatcatgggggtgaggtagggagacatctgatagcatcacttgctcagatcatcggtgacaataaagcagcttgggtggggaaatgtgactccagatgttccaacgatggtaagtgcaactacactaactgtgaaggctacacacactataattatctcattatccagaacaccacatgggctcaacattgcacatacagtcctctaccctccatcaggatggcattgaacaaagtggcctatagttctgtcagtagatcactccttggattcttcacctgggatatttcagactcatcaggaaaccatgtccctggtgggtactgtttggagcagtgggccgttgtttgggctgggatcaagtgttttgacaacgcggtgatggccaagtgcaacaaagagcatgatgttgagttttgtgacacaatgagactttttgattacaaccaaaatgctataaagactctccaacttaatacagagaatgcagttaacttactcaagagatcaataaatggattgatttcagactcattagtcattagaaacagtctgaagcaactagccaggattccctactgcaactacaccaaattttggtacattaatgacacagtcagtgggaaacattctctcccacagtgttggaaggttcacaatggaagctacttaaatgagtcacagttcaagaatgagtggctcttagagagtgaccacctgtatagtgagatgttgctgaaagagtacgaagagagacaggggaggacccctctagcactaactgacatctgcttttggtcactagtgtttttcactagtacagttttcctccacctggtgggcatcccctcacacaggcacattgttggcgatgcgtgccctaaaccacacagaataactaagaatgctctatgctcttgtggttattacaacctaccaggcaaacaagtcaggtgggtcaggaaagggaagtaa

SEQ ID NO: 12676 - DNA, 1710 bp, unidentified
  misc_feature 1..1710: note = Synthetic
  source 1..1710: mol_type = other DNA
atgagtgcctcaaaggaaataaaatcctttttgtggacacaatctttgaggagggaattatctggttactgctccaacatcaaactacaggtggtgaaagatgcccaggctcttttacatggacttgacttctccgaagtcagtaatgttcaacggttgatgcgcaaggagagaagggatgacaatgatttgaaacggttgagggacctaaatcaagcggtcaacaatcttgttgaattaaaatcaactcaacaaaagagtatactgagagttgggactctaacctcagatgacttattaatcttagccgctgatctagagaagttaaagtcaaaggtgatcagaacagaaaggccattaagtgcaggtgtctatatgggcaacctaagctcacagcaacttgaccaaagaagagctctcctgaatatgataggaatgagtggtggtaatcaaggggctcgggctgggagagatggagtggtgagagtttgggatgtgaaaaatgcagagttgctcagtaatcagttcgggaccatgccaagtctgacactggcatgtctgacaaaacaggggcaggttgacttgaatgatgcagtacaagcattgacagatttgggtttgatctacacagcaaagtatcccaacacttcagacttagacaggctgactcaaagtcatcccatcctaaatatgattgacaccaagaaaagctctttgaatatctcaggttataattttagcttgggtgcagctgtgaaggcaggagcttgcatgctggatggtggcaatatgttggagacaatcaaggtgtcacctcagacaatggatggtatcctcaaatccattttaaaggtcaagaaggctcttggaatgttcatttcagacacccctggtgaaaggaatccttatgaaaacatactctacaagatttgtttgtcaggagatggatggccatatattgcatcaagaacctcaataacaggaagggcctgggaaaacactgtcgttgatctggaatcagatgggaagccacagaaagctgacagcaacaattccagtaaatccctgcagtcggcagggtttaccgctgggcttacctattctcagctgatgaccctcaaggatgcaatgctgcaacttgacccaaatgctaagacctggatggacattgaaggaagacctgaagatccagtggaaattgccctctatcaaccaagttcaggctgctacatacacttcttccgtgaacctactgatttaaagcagttcaagcaggatgctaagtactcacatgggattgatgtcacagacctcttcgctacacaaccgggcttgaccagtgctgtcattgatgcactcccccggaatatggtcattacctgtcaggggtccgatgacataaggaaactccttgaatcacaaggaagaaaagacattaaactaattgatattgacctcagtaaaactgattccaggaagtatgaaaatgcagtctgggaccagtataaagacttatgccacatgcacacaggtgtcgttgttgaaaagaagaaaagaggcggtaaagaggaaataacccctcactgtgcactaatggactgcatcatgtttgatgcagcagtgtcaggaggactgaacacatcggttttgagagcagtgctgcccagagatatggtgttcagaacatcgacacctagagtcgttctgtaa

SEQ ID NO: 12677 - DNA, 1719 bp, unidentified
  source 1..1719: mol_type = other DNA
  misc_feature 1..1719: note = Synthetic
ctgaatcaggggaaaaccgaagacctggaacttaccataatgtctgaaaaacaggttcccagcttccggtggactcaagccctcaggaggggcctgtctaactggacagagcctgttaaggtagatgtgataaaggatgcaagggcaataatatctgctcttgatttcaatcaggttgcacaagtccaaaggattatgagaaaagagaagagaacagattcagatctcacaagacttagagacatgaacaaagaggtggacgccttgatgtcaatgagatctactcagcacaatgttgtcctgagagctggtggcctctcaaaggatgaacttttggaactttcagcagatttggagaagctcagaaagaaggtgataagagctgaagggggtaaccctggtgtttaccagggtaacttaacagcaacacaactaaaccagagagctgaactaatgaaacttgtaggaatgggccctggacttagatctggaaatggtgttgtgagggtgtgggatgtcaaagacagctcattaatgataaatcagtttggatcgatgcctgcactcacaatagcatgtatgacggaacaagggggggagactatgaatgatgttgttcagggtctttctgcattgggactggtttacacagtgaaatttccaaatcttgatgacttggagaagctgagtgaacaacacccgtgtcttaaatcaattacccaggaacaatcacagataaacatctctggttacaatctgagtctctctgcagctgtgaaagcgggagcttgtatgattgatgggggaaacatgttggagaccataaagatgagtccacctatgtttagctccataataaaagctgttctacaagtaaagaacagggagcagatgtttgtgggatctgtgggtgttcaaaggaatccatatgaaaatctactttacaaactttgtctgagtggagagggttggccttacattgggtcgagatctcaaattgttgggagagcctgggacaacacattgatcgacttagaagggaagcctgcagtgagtcctccgcctgtgaaaaatggaggtccaatcaacttgagtcctctgagtaagggacaagaagacctgattaatcaagcagttcaaaagttgtcacctaaagaaacaacatggattgacatagaggggccagcaggagatcctgtggaacttgccatttaccaacctgaaagcgggaactacttacactgttatagagcacctcataatgaaagtgcattcaaagaccaaagtaggtattcacatggcttgcttctaaaggatctaaaggctgccagacctggtttaataagtgcaattataaaggcactaccaaaggggatggtgctcactgcccaaggcagtgatgatatagaacagctgattttaatgcatgggaggagagatattaaggttgttgatgtcaaattgacctctgaacatgcgagggtctttgaggatccagtttgggataggttcaatccactctgtgagaaacacacagggttggtgatcaagaaaaagaagaagggtgctcccccatcctccaccaatccacactgtgcattgatggattgcattatgttcgatgccactgttaccggctacatacgggatgtgaaacctcgacagctcatccccattgaccttctattcaaagatgatctgaatctgattaacctatga

SEQ ID NO: 12678 - DNA, 1548 bp, unidentified
  source 1..1548: mol_type = other DNA
  misc_feature 1..1548: note = Synthetic
atgggtcaagtgattggattcttccaatcattgcccgagattattaatgaagcgttgaacattgctctgatctgtgtggctctgcttgccacaatcaagggaatggtcaacatctggaaatctggtttgatacagctcctcttcttcctcacattggcaggaagaagttgttctcattcttttacaattggaagatttcatgaatttcagagtgtgacagttaactttacacagttcatgtcctatgctccaagctcttgctcagtaaacaacacccaccattatttcaaaggtccccaaaacaccacctggggtcttgagttgactttgactaatgaatcaatgataaacatcaccaattccatgagggtcttcactaacattcatcacaatgtaaccaattgcgtgcagaacatttccgaacatgagggtgtgctcaaatggctgcttgagacaatgcacctaagcatcagcaagccaggaaaacacatcgcacctgtcatgtgtgagagacaaaaggggttgctcatcgagtacaatctcactatgaccaaagaccaccacccaaattattggaatcaagtcttgtatggactggctaaattattgggctcaagtaagcgtttgtggtttggcgcatgtaacaaggctgactgtcagatgcaatcagaccaccagcacataaaatgcaattactcgaattgcaaaggttacaccagctttaaatacttaattattcaaaataccacttgggaaaaccattgtgagtataaccatctgaacaccatccaccttctcatgagctctattggccaatcctttatcacaagaaggcttcaagcctttttaacctggacactttctgatgcactagggaatgaccttcctgggggatactgtcttgaacagtgggctgtggtgtggtttggcataaagtgttttgataacacagcaatggccaagtgcaatcagaatcatgattcagagttttgtgatatgctaaggctttttgattacaatagaaatgctattcagagcttaaatgatcaatctcaagccagattaaaccttttaactaacaccattaattcacttgtctctgacaatttactaatgaaaaataagctaagagaactaatgaacgtgccatactgtaattacactagattctggtttattaatgatacaaagaatggtagacacactcttccacaatgttggttggtatcagatggttcgtacttgaatgaaaccagattcagaactcaatggctaagtgaaagtaactctttatacacagaaatgctgactgaagaatatgaaaaaagacagggtagaacacctctttctttagtggacctatgcttttggtcaactctcttttacatatcaacattatttgcgcatttagtgggtttcccaactcacagacaccttataggtgagggctgcccaaaaccacacagattaacagggtcagggatctgctcatgtggacattatggtattccaggtaaaccagtcagatggacaaagatgtcaaggtga

SEQ ID NO: 12679 - DNA, 1533 bp, unidentified
  source 1..1533: mol_type = other DNA
  misc_feature 1..1533: note = Synthetic
atggggcaattcataactttgatgcaatcgataccagaagcattgaacatggctttcaatgttgctctagtgattgtgtcactgttatgtgttaccaagggactgatcaacctctggaaatgcgggatcattcaactcctaatgtttcttgcattagcaggaagatcctgtgatggtgaatacaagatcgataggagacatgtcctgtcacatgtagagtttaacctaactaggatgtttgacaatctgccacaatcctgctctatcaacaatacacaccattactataagggaccagaaaacaccacttggggtgttgagctcacactcaccaatacttcagtgatgaatagatctgatgagaatgtcacatcaatcagaagtcttgggtttgggaacataaccaactgtgacaagacaggtgaggcaggccacactctgaaatggctcctgaacgagcttcacttcacagtgctccacgtcacgaggcatataggggctctttgcagaacaacagcaggtgctggcctgttgattcaatacaatctgacaacctctgacaaaggtggtgaagttggaagacatctaatagcatctcttgcccaaatcatcggagataataaagcagcatgggttgggaaatgctacaacaactgcaccagctctggcaagtgctctctaacaaactgtgagggtgggacacattacaagtttcttgtgattcaaaacaccacatggccaaatcattgctcctattcaccaatgtctactgtaaggatgataattcaaaaaacagcatacagctcagtttccaggaaactcttgggattcttcacatgggacatttcagactcatcaggccaacatgtgcctggaggatactgtttggaacagtgggcaattgtctgggcaggaatcaaatgttttgataactctgtaatggccaaatgcaacaaagatcacaatgaggaattctgtgacaccatgaggctgtttgacttcaatcaaaatgcgattaaaacattgcagttaaatgttgaaaacagtctaaatctgatgaaaaaaagcataaatggtttgatttctgattcacttgtcatcagaaacagtctcaaacaactggccaaaattccgtactgtaactacaccaagttttggtatgtgaatgacaccataactgggaaacatagtctgcctcaatgttggcttgtctcaaatggtagctacctaaatgaaacgcattttaaaaatgaatggttgtgggaaagccaaaaactttataatgacatgctcttgaaagaatatgaagaaagacaagggaatacccctttagctctagctgacctttgcttctggtccttggtgttcttcacaacaacagtattctttcagttgattggcatccctactcacagacacctgattggtgaaggttgcccaaaacctcacagattgacttcaaattcattgtgttcatgtggtttttataagatacccaagaagccatttagatgggttaggaaaggtaaatag

SEQ ID NO: 12680 - DNA, 6690 bp, unidentified
  source 1..6690: mol_type = other DNA
  misc_feature 1..6690: note = Synthetic
gtggatcctaggcattccttgatcatgtctgagtgcttgacctactttaatgaactgaaggaccttgtaaggaagtgggtaccagatgaggacacctatgtggagcaaaagacggttttactctcacaggtcaatttttcctccattgtgaccgaagggttgaagctcctctcaactctgatagaggttgactcttgtgtgaaacatggctgcatccacaacagaagcaagactgttaaccagatactttatgaccatagaatagtgggtccaacacttcctgacgttgttcccgatggctacagagtgtcaggttcgacactgatcttacttgagacattcgttagagtaaatcaagagtcctttgaatgcaagtatagacatgattttgaaaaactgatgcaattgtccaaagatctagccaagtgtggcttgacccttgtacctgtgattgatggcagatcaagctactacattgaacgcttacctgactgggttatcgaaaggatgaggtggttgttattgaggataatgagcaatttgagagacagtggtgagaaaatagaagagatggagtatgaacggttagtacacagcttgtcaaacatggagaatcagaacttaggtcttgaatcacttgcaagtttaagggaggaagggctggattacaagacaagattaacaaaaacactaaaagaggggatctattcgaacatgaccacttcagaatgcagagtaggtattgcaaagctttatgatcacttctgtcttttacgagacagcggacaatatgaagatgtatacaccacaacatcaagatctgagatgatcacatggttaaagacccatgaattggtgcaaatgtcaagcagtgaaagggagactttaatagaagctgaaacttgtaaattttgtcaaattcatatgtatgccgttctgaaagatcttgtgctacttagaaaggggtggaagggctccaggtgcagagatgccaatgagattttggcacacaagagtcttttgtcagattgcaacaaaataaagggattgaaggttcttaacacaagacggaacacactcctttgccttgatataattgtcctcaacagtttgataaatttaattaaactccagtatacagacctccaatacctcatcaacaaccatttcaaaagtgtcaatgacaggcttgtttctgttgacttgataattaataaacttgataaaaaactgacatcagacccaaactggctgtgtaaactgagaaccaagatagggcataaacttaaaatatatgatcttgatcacgttatatcatggctgaggcctattgaggtgtcccattggtatgaattcaagttggaaagggataattccggtgaatgtgtgaaacccacaatcaagtacaagaagagtggtgtaggggattgtcagggtgaggattgtaacaaagatgtgataacagatgactccaccttcagtgattatttagatgcattatcaactttgagtatgggtcttatgaactcaatgaagacaagttcagcaaccaagttggtggtaaatgatgagagaaattactttggcacagttcaatgtgatgaatgttattttcaggacttggacatcaattatggaaccactcttatatatcaaaagaccggcgaaaggacgaggtgttatggtctgatgtcaaaggagggaggtggccctgatgtttataaggtaggcaagagcttctatgcagaccctaagaggtattttttaccaattatgagttctgaggtcatcctcaagatgtgccgagaaatgttgtcttggcttgactggctttcagaaaaagaaatgatggatgtgaggactaaactatataccctggtcataagtatattgacagttcccagcaaaagagttcagatttatttgcaaggttttcgatattttatcatggcttatgtcaatgaatttcatgttaaagaattagtttgcaagttaaaagtgaagccattaaccagggctgagctgagtgtcttcacacagatggatgatttagtcgccttgctgctaactgggacttcagaggaacatatgacaaagtcatttaaatttattctaaatctgtcttatttatgtcaccttattacaaaggaaacgccagaccggcttacagatcaaatcaagtgttttgaaaagtttctggagcctaagttaaccttcaattcagtcatcctaaacctagactcatcccctcagttaacagagggaactgaggaaaaaataataggcgatctaaagaaattgttttctaaggaccttggtgttcttgatctgaaggaaccaggggtctcaaaggaagtgttgtcactctgttcttcttgttttaataatggtatgctttctctgccgaaagtgttaagccgtgacccacaatcaccttctttcacaagtacagctttagacatatctagcaataagagcgttgttgtcccgaaattgaatgaggttggggagacaataacacagtatgactatcaaagccttctatcgtcagttgttgttgagatggcccagtcttttaaggacaagctgaggtttaagttggataggagaagtttacaatatgccatttacaaacgtctaaccaacatggtgtcgaaaaatgaatttagatcaaaagatgatccaaatgatagtgggatacttgaagacatcgaagatttagttgacgagggaacacataagctgataaatgaaattgaggctaatgtttctgattgtttaagcaaaatgagctcagggtgcaataaatccaaccaaagttctaagggtctcaagaaatttgagaaagttgatctgcttcaaaagttatggtccagggaatatatgtctctcatacttagtgaaacctctttccatgaagtgaaggactttgacccttcattgcttcctagtgaaagttatcaggagatgtgtgatgctgtttatgatagtgtttatagaaatgagttcttcactgaaaagtttttaaaactctgcccattggaactgttgatcaagaacttagcaacaaaacactatgaggaaggagattactttgagtgcttcaaatatttgctaataggagcaggttgtgataacagagttggtaggtttgatcatagaagcagagctagactcggttttaaggacacagccacacttgttaaagaagaatcaagaataagttcgagagaaagtaattcagaagctatttccaaaaggttagacaagagtttttttaccaactcctcccttagaaatttgtgtttttattccgaagagtccccaacttatagatcctcagtttcatccagcgtagggaaacttaaattcggcttgtcgtataaagaacaggtaggtagcaatagggagctttatattggtgatttaaacacaaagctcactagtaggctaatagaggattactttgagtccttaacatcagaatgcagattctcatgtctgaataatgactcagagtttgagagagcactcctagacatgaaatccgtggtccgtctttctggtctggcagtgagccttgaccattcaaaatgggggccgtacatgtcaccagcaatatttaatgcactcttttctaacctggatctccagctaaaagatggaggccttattgataagagcccaattgaaaatttacttaattggcatttacacaagattgttgaggttccttataatgttgtggaggcttacctgaaaggttatacaaaaagaagtctaggcctgatggataggtcatcaagttcaatgactgaagattatttcttcagacaatttgcaaaaggtgtggttccttctcacattacatcagtcttagatatggggcaaggaatcctacacaatgcttcagattattatgggttgttgactgagcaatttatcaccctgtgtttagagctctgctttgatgtgaagatgactgcatacacatcaagtgatgatgagatcatgttaagcaactcctactctctaaaaagggagtccgatgatgatctattagatatggaaaagtgtaaagaaattcttgaatttcattattatttatcttcaaagcttaataaatttatcagccccaaaacagttgctggttcgtttgcaagtgagtttaagtccagattttttatttggtctcaagaagttcccttactgacaaaatttgttgccgcagcattgcacaatgtgaaagctaaatcacctcaccagcttgctgaaactattgacacaatcttggatcagtgtgcagccaatggtgtatcaatagagatcattaatgaattatcaaagaggacaaacagattgatctcttatagtgggcacccagttgacccatttttgtgtgtgtttacgacagatttgaaagattgggttgatggttcaaggggttaccgattgcagaggtcgatagaatccatcatcaacagtgaagagatactctccacaattagggattcctgcagacaactgttttacatgataagatcaggccgaatacaggaagaatacttaataagtgcactccaatcatcaccagatgattgcttgagacagatgctaaagataacaggaacgaatgactctctgattgaagaggcacttacaacgaggtggttgaatttaagggcttttggtgatttaagactggtgttaagaacaaaaatcatgacaggaactagaattttagataaagaagaggtgccttcattgattaagtcagtccaatcaaaactttcaaaaaactttgtcagaggggctaaaaagataataacagatgcaataaacaagtctgccttccaaagtagcatctgttctgggttcattgggctgtgcaaaagcatgggttcaaaatgcgtgagggatggatctggaggatttatatatattaaagatttattgaagaagattgataggcatacaaactgtgaagtgtgctgcccattattaagtgtcttctgtgaacatagtttaagacaggtggcgccgtattcaaggccactcctttgggactatttctcactaacattttctaatgcatgtgagttgggaaattgggtcttctcaaaggttgagcttcctagaccccctttggggtcaatgaatccgaactttttttggcctgtgaagcctggaagccactctgagttagaagacaaagtcaatatgaaccatgtcctatactcaatcaagaggaactttcctgatctcttcgatgagcatattgctccatttttatctgacctgaactcattaaaggtaagttgggttcagagaataaaatttttagacctgtgtgttgccatggatatgtctagtgaatgtttgggtattatctctcatattatgaggaagagaagagaagaattgtatattgtaaaacaagaggagttgtctgtatgtcatatacgagagtcttgctcgttggaaaagggtcttcagttgaactctgtggagatatgtcagaattttctgacacaattgttatttgaatccatgttgaacccagtgctgctgagtacaagccagttcaaaaagtatttctggtatggtgaagtcgaatttctcccaaatgatgctgatcatgatttagggcaactaacccaattcatcatggattgcaaattgttgaacatatcaaggtgtatgtgtcttgatgatctcgatgtaggatacgttcatagtaaaattgaattatcacaagttttcataaatttatcaacttttatcaacttggttgattgggaaaatagagaaagttatcaaagctttgatgaagttttgattcattcgaatgctgatcacataccccttgagattggaataattctttcacacacaaggaaaagctttaaatttaggtatgaaaggaagacgaactattatgtgaaatgtggaatcacaattcaaaagagtgaaatatcatcatttagcacaaccttgtctgatggctttgaacttcatgttgaggagattgattgctatgtgagtggctctgagggggaccatataagtctggacggagttggtttggtcccactgcaccctctgttctcagggaaggaggcactggacctcaataaacttttaagtgatcaagacattgagttcaagcaaatttcgcttgtattctcaaaggtgaaacttgatttcaaggaccatgttaaagacctaaagaataaattctcttacaagttacagggtccagagcaaggcctggaacccttacatctggacaagggccagataatggaaaggaatactgttgtttcaagacttgaggtaccagtgacatcaagatcactcttccttgccttagaagctctggaccctggtaatagacctagatttctttcatccctacatgagtacatgaggaaaaggccagggaagaaagacccctgttttgttcgaatgacacaacaggacttgtgcctattggttgaactatatgaggctgctttcatgcaagtccttagtgcagtctcagattggatagagtttggctgttttgctttgtgtttcagcaagactctcaactgcattatgatagccgatgacggtggggattacaggctgaaaggtaggccctgcaagaccctatctgcacagaaaacactcaccgacatcgagtag

SEQ ID NO: 12681 - DNA, 66 bp, unidentified; identical to SEQ ID NO: 4193
  misc_feature 1..66: note = Synthetic
  source 1..66: mol_type = other DNA

SEQ ID NO: 12682 - DNA, 375 bp, unidentified
  source 1..375: mol_type = other DNA
  misc_feature 1..375: note = Synthetic
atgttggcagtgatggctgagtttccatgtctgttgtttctctgcctaggagaacacaatggccagccgcggaggaaatcagtcaagcgaccgccaccgggagcacacccccgaacgcggaatgagctctgccagccatccgcctccaaggccagaccgcagcccatctcagtcgcctccacctctgcccccgaagaggaacacctaccgtcgtgtggggtccggttcttctaccgagagccaggtggtattggtaagcgaaacttcgcagtcatccctgtctccggagcggagcaacagtcctcccccgatccctcccaagaagaagcccaggaagaccaagcatgtccctctgcaagacatcagccaggatag

SEQ ID NO: 12683 - DNA, 1554 bp, unidentified
  misc_feature 1..1554: note = Synthetic
  source 1..1554: mol_type = other DNA
atggccagccgcggaggaaatcagtcaagcgaccgccaccgggagcacacccccgaacgcggaatgagctctgccagccatccgcctccaaggccagaccgcagcccatctcagtcgcctccacctctgcccccgaagaggaacacctaccgtcgtgtggggtccggttcttctaccgagagccaggtggtattggtaagcgaaacttcgcagtcatccctgtctccggagcggagcaacagtcctcccccgatccctcccaagaagaagcccaggaagaccaagcatgtccctctgcaagacatcagccaggatagtgaagaagaaagagaacaggctcagttggtggccgtgggcttcagctaccccccggtgcgcatcattgagaaggatggcaagagaagtgttgagaagatcgacaagaatgaccctatagctaaaggagctacttttattgctgttaggaatcctttgagtctgcccctggtatctgcctgggagaagggcatggaagtgatggctgtgctaatggaaaggtacaggctggataatgatctgagaacctctttcaagctgatgccagagcagcacgagcaatacaagcgtatctgccaccagtatgtgaacgaggagcaccgtggcatcccgctgacatttaccagcatgaagaccttgacaacaatgatgggaagattcatgcagggattggtacattattattctgagatcgcccacaataattgggagtgcaccgggtgcgctctgtgggctcatggatgcaccgattatgaaggcaaggtgaaatgcctgcatggcactatcatgatccagaaggaccacattatcgagatggatgtggcgagcgagaacgggcagcgcgctatgaaggagaatccagacagagccaagatcacccaaaaccgctggggcagaaatgtggttcagttggccaacaacgatgcccgctgttgtgtgaatgatgccaactgtactactaatcaattttccagcaagtcctgtgggatgttctacaccgagggaagtaaggcccaggaagcttttaagcagtacgaagccttcatgaaggctgtgtacccagggataactcccgaccaagccaggatgatgctgatccccattcattgtgattgcaaccacaagccaggctgcgctcccgtgatgggcaggcagacatgtaagatgaccccctttgggatggccaatgctgaagacttggatgtgactaccatcagtgacccaaccgtgttggcaagcgtaagacacccagcgttgatagtgttccagtgttgcaacccagtgtatcgcaactcccgtgtccagaatgccggccccaactgtgatttcaagatctctgctcctgacctgcttggcgctatgcaactgaccagaaagttgtggcaagacacctttcccgagattccagttcccaagctggtaatccccgagttcaagtggcagaacaggttacagttccgcaacgtatccctgcccgcgggtcactctgactcccgccagaacccattcgacttctga

SEQ ID NO: 12684 - DNA, 1743 bp, unidentified
  misc_feature 1..1743: note = Synthetic
  source 1..1743: mol_type = other DNA
gtggatcctaggctttggagattctacgcatcaacatcaacttctaccttcatcatgtctgatcaggtggtgcactcctttcgctggactcagtcactcaggagaggactctccaattggacatgtccagtgaaggctgacgtcctcaatgatacgagggctttactgtctggattggattttgcaaaggtggctagtgttcagagaatgatgaggagggacaagagagatgaaagtgatcttacaagtttgagagaccttaataaagaagttgattcattgatgacaatgaaatcaacacaaaaaaacatgttcctaaaggttggctcactctccaagggagaactaatggagttgtccggtgatctcaataagttgaaagacaaggtgcagaggactgagagaccaccaggttcgggtggtcagtaccagggcaatctcaccaccactcaactcacaaggagaggtgaactactacaattcattggtattcaaaaggcagggagagtcgggatgaacggggttgtgaaagtatgggatgtcaaagattcctcacttatgatcaaccagtttggttcaatgcctgcacttactatctcttgtatggcagaacagggtggtgaaaccctaaatgatgttgttcaaggattaacagatttgggtctactttatacagcaaaatacccaaacctcaatgatcttgaggctctctcagaaaaacacccttgcttaaaggtaatcacccaagaggagtcacagattaacatctcaggttataacttgagtttgtctgcagctgtgaaggcaggtgcatgcttgatagatggaggaaatatgcttgagaccatcaagattgacacatccactttcaccacagttatcaaaacactcctagaagtgaaagcaagggaaagaatgtttgtaagttcggttcctggtcaaaggaacccttatgagaacattctttataaattgtgcctctctggagaaggatggccttacatagcttctcgttcacaaataaagggaagagcatgggataacactgtggttgagtttgatagtgctccaccaagggcccctgttccagtgagaaacggaggtgcacccttactaggaccattaaggccggaattagaagaccaggtccgaaagggagtcgaaggcctatctccaaacctcacaacttggattgacattgaaggaccacccaatgacccagtagaactggcaatctaccaacctgagactcaaaagtacttacattgttatcgaagaccaaatgacattaagtctttcaaagatcagagcaagtactgccatgggatattgttgaaggacgtggagaatgctcgaccaggattgatctcaactatcataagataccttcccaagtctatggtcttcacagctcaaggtgaagatgacattaagagactttttgatatgcacggacgccaagatttaaagattgttgatgtgaaactaagtgcagagcaatctagagtctttgaggaacttgtttggaagaaatttgaacatctttgtgacaggcataagggaattgtgatcaaaagcaaaaagaaaggctcaaaacctgcatctacaaatgctcactgtgcattgatggattgtatcatgttcaatgcagttctggtgggatttgtggcagacgagaagcccaaaagactccttcctattgacattctcttcagagaaccagacacaactgtggtcctctaa

SEQ ID NO: 12685 - DNA, 48 bp, unidentified; identical to SEQ ID NO: 4201
  misc_feature 1..48: note = Synthetic
  source 1..48: mol_type = other DNA

SEQ ID NO: 12686 - DNA, 345 bp, unidentified
  source 1..345: mol_type = other DNA
  misc_feature 1..345: note = Synthetic
gtggatcctaggcttttttggatcacgcttacccctgttcaggataacactgaaaacatgggtctacgctacagcaaagaggtgagagagagacacggagacaaagatctggaagggagagtccccatgacactcaatctcccacagggtttatatggacgcttcaactgtaagtcttgctggtttgcaaacagaggtctcatagcctgctcagatcactatctgtgcctgaattgcttgactagactcaggtctcagtctcaattctgtggaatctgcggcaagcctctgccaacaaaaatcagatttgaggagagcccatctgctccaccatacgaaccctaa

SEQ ID NO: 12687 - DNA, 1452 bp, unidentified
  misc_feature 1..1452: note = Synthetic
  source 1..1452: mol_type = other DNA
atgggacagcttgtctccttcattggagaaataccagccattgtgcacgaagccctgaatgtagctttaatcgcagtaagtatcattgcgattatgaagggcctcataaatatctggaaaagtgggttattccaattgataatgttcctcatacttgctgggagatcctgttcaatttccattggacaccatctggaacttcaacatttcataataaacagcacatcactcctcccttctatgcccacactgtgcagaatcaatgccaccaactccctcataagaggtccattttctgcgcagtggggccttgatatattcattggtgacctcaccattttagtaaaccctgagccaggtagcaagacaaaacggatgactgcaaccaacattactgggtgtttcccaaataatgaagatcctgactctgtagcacaggtcctaagttggttttttagaggtgtgcatcatgatttccatttagacccaacaattctttgtgatgaaagtgtcactgtcttcagaatccaaatgaacctaactgaaagaatgtactgtgataggattgtttcaaaactagcaagactttttggttcctttggagactattgttcaaaggttggaaagaaattggttataatcagaaatgtaacctggtccaatcagtgtcatgaagatcatgtcggctccatgcaactcattctacaaaatgcccataatcaagtcatgagattcagaaaactgcaaaatttcttctcttggtcattggttgactctgcaggaaacagtatgcctgggggatactgtttggagaaatggatgttggtagcaagtgaattgaagtgctttggtaatacagctgttgctaaatgtaacatcaatcatgattctgaattctgtgatatgttgaggctctttgattataataaaaaggcaattgttaaccttcaagacaaaacaaaagcacaacttgattcacttattgatgctgttaattctttgatttctgacaatctgataactaaaaataaaataagagaactcatgaatattccttattgcaactacacaaagttttggtatgtgaaccacacaggtctaaatgttcattctttgcctaaatgttggcatgtgaggaatggcagttacctgaatgagtcagactttagaaatgagtggatcatcgagagtgatcatcttgtttctgagatattagctaaagagtatgaagaaaggcagaagagaacaccactgagtcttgttgacctctgtttctggagtaccctattctatacagcatcaatcttcctacatcttctgcacattcccacccacagacacatcatcggcgagggctgtcctaaacctcacagactgacatctgattcactctgtgcatgtgggttctttcaactgaaggggaggccaaccagatgggcaaggataccttaa

SEQ ID NO: 12688 - DNA, 6633 bp, unidentified
  misc_feature 1..6633: note = Synthetic
  source 1..6633: mol_type = other DNA
atgttagtgacaaaaagcctaggggcagaaaagatgttgccgtctacatcacttcgtgggcagaataacttaattctacctgagtcgcatctgtcttccccaattgtaaagcataagttattgtattattggaggataacagggttacaattacctgaatcatgcatgtatgacaacctgatcctaaccagggagtggaagaatatcatggaatctaatagaggtgatgtcataagagccaaaaaaatagggtcaaagacacacagctacttgaaccataagaaggctatctctcctctcatccatccaagcacactctcgtggcttacagcactaagatgtgaggtatctgaagataaaatggcacaaatagagaagaaagtgtctaggcacttccagatctttggaatgcgcttttcaaaactgtctgacatgatagagggtaagatctatggtcaccatgtgtctcgagaaaggacagaagagttcgcgttcttgcagaatcatcccggaatgtggtttcatacacaatggagttgcgcacggaatacctggcttcatgtcaagcaactgcagaggcatttaatacttaagagtcgggccaacaaacaaaacgatctcattttggacttaacagtaagtgatggtcacttgataatatcgtcagagctagttgtggttatccagacatcaacaaatgcttttacatgcttgacgccagaaatggtattgatgtattctgatctgttagaaggaaggaatctagtgcaaatgttatgtagtgcgatcccatttttccatcctctctttgaaaagattgagttattgttaagattgatagatgaactggcaactgtcataggcggagatgtatatgaggttgtggcaatactagaagccatgtcctatgctacagttcaacttttcgagccaacagagcgatttgcaggagacttcttttctttcaatttaactgagatcaaaaatgtcttaaaagacaaaattagtacagaattaaccaacagaatgatttcggccatagcagagatatatagtggtctcaatgcgaacctaggtgctgaaatgctttgcattctcaggctctggggccatccactactaacagcatctgttgcggccaaagcggtaagaacacagatgtgtgctgcaaagatcattgattttgacattcaaatgcaagtgttggcattcttcaaagggacgatcataaacgggttcagaaagaagaattctggactatggccaaaaattctaccggagtcaatactttcaccagtcctggacaggctgtacaaagatgcggcagaaattagccatcagataatgttaaaagagtataaatctctagctcttatcgacttcaaaccttgcattgattttgatcctgtcagtgatttaagtatgtttttgaaagacaaagctatcgcaagaccggcaaaggaatggttatgttcattcaagagagatctcctgtataagaaagatgcgcaaaagcttaccgggagcacgagatcgaaccgattacttatagaatttctggaagctgcagagtttgacccataccaggaattgcagtacctcaattctatggcttatctaggtgatgatgatgtatccgtatcctactctctcaaggaaaaggaagttaagatcaatggaagaatctttgctaagttgactaagactttgcggaattgtcaagtgatggcagaaggaatattagcagcagagatagcgccgtttttccaggggaacggagtaatacaggacagcatctcactatctaaaagtatgctagcaatgagccagatgtcgtataattgcaataaggagagattggaaaacaccaaaaaaaggatacacaggtatagggcgggtgagggttccaagcaagataagataaggatggccacattcatcacaacggacctctcaaaatactgtcttaattggagatatcagaccataaagccctttgcaagagctctgaaccagttgcttggatttgatcatttcttcgaatggatacatctaaggttaatgaatacaaccatgtttgttggtgatccgtacaatcctccagctgaaattgtgagtggtgatattaatgaccaaccaaatgacgatatattcatagtgagtgcaaggggggggattgaagggctatgtcaaaaactatggtctatgatctctattgctgctatcaacctggcagcagcaagatcctcttgcagagtggcatgcatggtgcagggagataaccaggtcatcgcgtccactaaagagataaaacccagtgacaatccagatgatgcccttgaagagctgcagaagctcagtgacaggttttttgaggagctagtgaagatcaaccatggtataggtcataaccttaagatgagagaaacagtgaggtcgaatacattctttgtgtacagcaagaggatctttaaggacgggaaaatattgagtcagatgcttaaaaatgctgctaagttgactttaatatcgggagaccttggagaagacacaggcgggtccgcaagtgacatctcagggacaatcgcaagaatatgtgaaaacggggcagggaaggatttttgttacctcttgaattactacatgttattaattcagttttattttgattgtgacttctctatactggatagagggagacaagacatacgtcaaaccatgtcagggaacattgaagccgtccataattacatcatgactccttcccaagtgggcggacttaatggtttacaatatgtaaggttatataacaggaatatcggagacccggggacaaccgcactggcggagatcaaaagattgaccacagtaggcttactcagccctcgcattttacctaacttgctaactcgacagcctggatctggaacttgggctactctgtgcaatgacccttatgctttcaactttgatactgtaggcagtccagggatcctcctcaaaaaacatacacagcgtgtcttatttgagtcatgcgcaaatcctctacttgcgggagtgcatagagaggatgctgacgcagaggagctgtcacttgcaaagtatttgctagatcaagagtttattcacccgagagtgggccatgtaatcatgcaggcaagttcaatcggccgccggaaacaaatccaagggctccttgacacaactaacacgatcgttaaatatgcattagataagaaaccgttaggcgtgaggagaacagagaagattattaactattcagtgattcattttcagcttttcttggatgagttatgggatgctcatcgtcattatccgcatctattatcccaagacatgtgttctttggcgctagctgaatactgcaggaataaaagttggtcctccatcacggggggacggcctattttaggggtggcgaatcccgatacactagagctcgcaactggctgtatcgtgtccataggaggcacctgccatttgtgcgatgctggtgactctcaatatacttggtttcacctccctgataatattaatttgatagatggagctaccgggaatcccgccattcgggtgccatttttaggatcaagaacacaagagagaagagtggcttcaatggcaaaattacgtaacttgtcacctcatgctaaagctgctttaagaggggcgtcagtattaatttgggccttcggagacaacgacacaaactggaatgcagcactggaaatcgcaaatagtagatgcaacatagatttagaacatttaaaaatattgtctccattaccgacagctggaaatttgcaacatcgccttgatgatgggataagtcaggtaactttcactcctgcatctctataccgagtttcaccctatgttcaaatatccaatgattcccagagattggtgattgatgactctattaaagagagcaacttgatatatcaacaactgatgttgctaggtttggcagcaattgaggctattttccctctcacctgtgatcacattgttgacagtatgacactgcatctacacagcgcacacagttgttgcatacgtgaagcttcattggcattccctatagagttagcaggagtcataccccagatacgggcagaggtgaccaatcggttcatgtatgatgggacccccatttctcttgatgatatgcctacaatggacatgcttgtgttcaagaattatgaattgagcttagatcaatataccacatttgaattaatgggaatcttggcaatgactacagggaaactcataggtcaatctattatctcatatgatgacgaaacctcaattaagaatgatgctattatcgtatatgataactcccggaattggataagtgaattccagaattgtgatgcaataaaattgctagagtatgtcgcagttgaggtcctgctggactgtgcctatcaaatttattatctgagagtaataggtgttgagaatatcatgctatatatgagtgacctgttgcaaagtatgccagggatcttgttggccaatttagcagcaacaatctcccatccgggtatttttggaaggctgtacagggtcggattattagagctctcaggtgttcaccagttggcttccgtagatttcatttcattggcggctcaagttcttacaaaatcaatgcggagggtactcacagcaattgcacacggggagataccgactttgactttcccttccataatagaggaaacactaaatgagaagatgttgcaactgattgcacggctctgttgtttagtgacagtggtgcacgccaagacaaaacagatcccaaagatcagagatctcagtgccgaggataagtgtagggtcttaactgaatttatgaattctcagactacacctgtgctcaatcaacatttggatatgaataagctaatgacacctaagttggtcaccttccctgctaacttgtattacatctctagaaaaagcttgaatttaatcagggagagagaagacaaagactgtatattacaaactatcttcccgattgaaattggagaacaaaggcagttacctgcaaatgtgggtagctttacaaaagaccctttttatcaagaatccacggcgttcatcttggaagtccccatagaaaatgaggtaacatataacaaagttgatctttgcaatgtagagagacgtgaggcaggccttatcggttctccatctagtagtgatctaagacggtatctgtttcgtgggattggtaactcttcttcatcttggtacaaggtaggacagattttctcaatacctgaggtgagacagacaaaaggcggagtaagtttattcctaggagaaggtagcggttccattatggcagtgtgtgaattgcacattcctcataggataatatattataataccatgtttgacaatgcaatgaatcctcctcaaaggcattatggcccatcgccagcacagttctttgagtctgttgtttaccaaaatatgcaggcaggagtaccatgtcaattgggctttgtccaggagtttactactttatggagggaggtaagtgcagaaacggatctaacccgggaggaatgtgtcacctacatcacatcaacagtcggatgtcaaacaacacagtttatcatggtagatgctgaaatacccaaggattctgcattaagtattatagagcagttcattactaatatactaaccatctcgtattttgtgcttagccaaaatggggtgttggtaatcaagactctctattctcaatgccgacaattcaatctcttagtgaccaatctgatgttgtcttgctcgaaattgtacatactaagcaatggctatatgtgcaggggggattatgaatgttttttaattgccattttctcaaaccctgtccctttctccagtgctgataggattatgcaaacatccaaaaatctcataagaaaaggaggatcaataatgaagcctgaagtgcataaaaagattattgacgcattcataaaacaagagagagaagtcatctcaatcatcaattcaccgactgaagttctcataaaattcttaagtgataatatcgatcaggctcttctagcagcaggaggccgtccagcaaggccaaacggaaccgattataatatgaccatggtgagggatgatatagagttcaaagacatcatagtacaacatattgataccgtgctcaaaagcattgtatacttttctgatgaggattgtctggctgatacagtgttcttattgacaccttataacttaagtaatagaggaaaatcaattacgatgctcaagcaatgtgtgactcaacttgtggaacaaatcataattagactgagtgtagatgatctgtattcgattgacagctggattacaaaaattatagggggagtcttatgtcttaatgatgtgatgcactggaaagagtatcttagaaggtcgcactgtaagaagtatttgcgacaccggatgggtgcgggacaagttaaagaaatcttttgccatgagtctgtaattactctgcatcgagcggcccaaaaactatacatgaaaataatcggtaactcaatcaaaggttataattaa

SEQ ID NO: 12689 - DNA, 18 bp, unidentified
  misc_feature 1..18: note = Synthetic
  source 1..18: mol_type = other DNA
ttggtgttgaagtgttga

SEQ ID NO: 12690 - DNA, 1491 bp, unidentified
  source 1..1491: mol_type = other DNA
  misc_feature 1..1491: note = Synthetic
atggggcagcttatcagcttctttcaggagattcctgtttttctacaggaagctctgaacatcgctttagtggctgttagtctcatagctgtcatcaaaggcatcattaacctttacaaaagtggtctcttccagttcatcttctttctcctcctagcagggaggtcctgctcggatggcacattcaaaataggcctacacactgagttccagtcagtcacccttaccatgcagagacttttagctaaccattcaaatgagctcccatctctctgcatgcttaacaatagtttttattatatgaggggaggtgtgaacaccttcctgattcgtgtttctgatatttcagtcctcatgaaggagtatgatgtatcaatctatgaaccagaagaccttggaaattgtcttaacaagtctgactcaagctgggctattcattggttctcaaatgctttgggacatgactggcttatggatcctccaatgctatgtagaaacaagacaaagaaggagggatctaacattcaattcaacatcagcaaagctgatgatgccagagtgtatggaaagaagataagaaatggtatgaggcatctcttcaggggcttccatgacccgtgtgaggaagggaaagtgtgctacctgaccatcaatcagtgtggtgaccccagttcctttgactactgtggcgtgaatcatctttccaaatgtcagtttgaccatgtgaacacccttcatttccttgtgagaagtaagacacatctcaactttgagaggtctttgaaagcatttttctcatggtctctgacagactcctcaggaaaggacatgccaggaggttattgtctagaggaatggatgttgatagcagccaaaatgaaatgtttcggaaacactgctgttgctaaatgtaatcaaaatcatgactcagagttctgtgatatgctgaggctattcgactataacaagaatgcaataaagaccctcaatgatgaatcaaagaaagaaatcaatcttctaagccagacagtgaatgccttaatctcagataatttgttaatgaagaataaaattaaagagctaatgagcatcccttattgtaattacacaaagttttggtatgtcaatcataccctgacagggcagcacactcttccaagatgttggttgataaggaatggaagttatcttaacacttctgaattcaggaatgactggattttagagagtgatcacctcatctcagagatgttaagtaaggaatatgctgaaaggcaaggcaaaaccccaatcacattagttgatatttgtttctggagcacaattttcttcacagcatcattgttccttcatctagtcggaatacccacccatcgacacctcaaaggcgaagcctgtcctttgcctcataagctggacagcttcggaggttgtagatgtggcaaatatcccagattgaagaaacccaccatctggcacaaaagacattaa

SEQ ID NO: 12691 - DNA, 63 bp, unidentified; identical to SEQ ID NO: 2246
  misc_feature 1..63: note = Synthetic
  source 1..63: mol_type = other DNA

SEQ ID NO: 12692 - DNA, 63 bp, unidentified; identical to SEQ ID NO: 2246
  source 1..63: mol_type = other DNA
  misc_feature 1..63: note = Synthetic

SEQ ID NO: 12693 - DNA, 1860 bp, unidentified
  source 1..1860: mol_type = other DNA
  misc_feature 1..1860: note = Synthetic
atgtcaaccattactaaaaaaatatattgttctggttttctttttctttcgtacatctctaattatgaaaaagtaaatgatgaaatgtatgagatgggcgagatggacgagattgtgcgcatcgttaacgatagtatgtggtacatacctaacgcatttatggacgacggtgagaatgaaggtcacatttctgtcaataatgtctgtcatatgtatctcgcattctttgatgtggatacatcgtctcatctgtttaagttagttattaaacattgcgatctgaataaacgactaaaatgtggtaactctccattacattgctatacgatgaatacacgatttaagccatctgtattaaagatattgttacaccacggcatgcgtaactttgatagcaaggatgaaaaaggacatattcctctacaccactatcttattcattcactatcaatcgataacaagatctttgatatactaacggacaacatcgatgactttagtaaatcatcagatctattgctgtgttatcttagatataaattcaataggagattaaactactacgttctgtacaaattattgactaaaggatccgacacgaattgcgtcgacgaggatggactcacttctcttcattactactgtagacacatatcatttttccacgaaaacaattattacgagacaaagaggtacactaagatgtacgccgagaagcgattcatcaacacgataatagatcatggagcaaacattaacgcggttacgaaaataggaaatacgccgttacacacttaccttcaagagcataccaaacatagtcctcgtgtggtgtatgctcttttatctagaggagccgatacgaggatacgtaataattttgattgtacacccatcatggaatacataaagaacgattgtgtcgcctgtcatattctcatactgttactcaattggcacgaacaaaaatacgggaaattacaaaaggaagaaggacaccatctactttatctattcataaaacataatcaattgcacaaacactctatcgacatactaaggtatctactagataggttcgatattcagaaagacgaatactataataccatgactcctcttcatgccgccttccagaattgtaacaacaaggttgcctcatacctcgtatacatcggatacgacatcaaccttccgactaaagacggtaagacggtattcgacttggtgtttgaaaacagaaacatcttatacaagtcggatgtcattcacgacatcatcagacacagactgaaagtatctctacctatgatcaaatcgttgttctataggatgtccgagttctctccctacaacgattactacgtaaagaagataatagcctactgcgtattaagggacgagtcattcgcggaactgcatcgtaaattctgtttaaacgatgactataaaagtgtatttatgaaaaatatatcattcgatgaaatagattccatcatcgaaagatgcagtcatgacataagtcgtctcaaagagattcgaatctccgacaccgacctgtatacggtattaagaacagaagacatccggtatcacacctatctcgaagccatacattcggacaaacacatttcatttcccatgtacgacgatctcatagaacagtgccatctatcgatgaagtataaaagtaaactcatcgacaaagcactcgataaattagagtctaccatcgatggtcaatctagactatattatttgcctccagaaattatacgcagcatcatatccaagttaagcgactatcatctaaaaagtatgttgtacggaaagaaccattacaaacattatccatactag

SEQ ID NO: 12694 - DNA, 1860 bp, unidentified; identical to SEQ ID NO: 12693
  misc_feature 1..1860: note = Synthetic
  source 1..1860: mol_type = other DNA

SEQ ID NO: 12695 - DNA, 429 bp, unidentified
  source 1..429: mol_type = other DNA
  misc_feature 1..429: note = Synthetic
acgacgggcgcgcttctcatagcatataaatcatggccgcgccctcgctcgagggcgccgtgctgcgtcacaagcaccgcctgctgcagctccgcgacgaactcgacaaggaggctttcttcctcgacgaggcctacagcgcgctgcacaccgagcgctacgacgacatgcacacgcaccgcctggtgctgcgcgacatgctgcccgcgcgcgactacgcactggcgatgtccatgtcgcgcatcaccgagcgagagttcgaggaactctacgacatgctcgcgctctacgccagcgacgcgacgccgtccgcgcagccaggcaccaatctcggcaaggagctgtgccgcgtgctggtcgggctgttccagcagggttgcactcgccaggagtactacaccggctgggctcgcaagttgcagaccgtga

SEQ ID NO: 12696 - DNA, 6735 bp, unidentified
  misc_feature 1..6735: note = Synthetic
  source 1..6735: mol_type = other DNA
ctgaggaacaagtgtgtggtgatggaggagttgctgtccgagagcaaagatcttgtgagcaggtacctcttagaggatgagaggctttcaaaacagaagctagccttcctagttcagacagagccgagaatgctattaattgagggccttaagttgttgtcactctgtattgagatagacagttgcaaagccaatggttgtgagcacaactcagaagacctttctgttgaaatccttctgcagagacaaggtgttctgtgccctggtctaccatttgtggtgccagatggattcaaattcagtgggaacacattaatattactggaatgctttgtcaggacttcaccaataaactttgagcaaaagtataaagaagataccattaagctagagtctttaaagcctgacttatcatctgttgacatcattctgttgcccttgatagacggcagaaccaatttctacactgatttgtttccagaatgggccaatgagaggtttaggcatatcctatttagcttacttgaattctcgcagcagtcatcaaaaatgtttgaagaatctgagtactcaaggctttgtgaatctttaacaaaagcaggagtgagaacatcgggcattgagagcctcaatgttttgacagattctcgatctgatcattatgagagggtgttggagctctgccacagaggcatcaataacaaaatgtccattcttgatgtgaaaaaagagattgtatcagaatttcatgcttttaggaataagcttaaagagggtgagatagaaagacaatttgtcaggacagataggcgacagctcttgagagatttcaacaacctttatattgacagagagggggacacaccctcagagattgatcctctaaaagagaggtttgtaaaatcctcgcctatggtaacagcgctctatggtgactacgaccgttataggcaagagggagttgatcgagacagctgcttgcagaatcacttccaaagctctgtgcctggatggaagtcactgttgaataaaataaaatcactaaagttattgaacaccagaagaaaactaatgctgacttttgacgcaatcatccttttggcccacttaaaggatcttaaatgtcacggcgagctgttaggatcagaatggcttggctcctcattcttaagtgtgaacgacagattggtgtcactacaagaaacacaaaaggaccttaaaaagtggattgaaaggagaatggtgagtgcaatgaagaagaagggaggtgtaggaactctgtgtcagagatctgagcttatattctttgacatcataaacaaactcctcacaaaggccaaagaggcattatcctctgccagtttgtgctttagagattatgttaaagaggaagatatactggaggaggacagttacgagaggcttatgttaatggagaaaagagggattcagccaacaatgagctatgagaaagaagaggggaatcaattcccctaccctcttattgagttggaagctgattccatagaagacctgagaagactatctagcatctctttggcattggtgaattcaatgaagacatcatcagtagccaaagtgaggcaaaatgagtatggtgctgcaaggtacaaacgtgtacgttgtaaggaagcttttaatcaaagctttatcatgggaagcgggaatttcaacttaatttatcagaaaacaggagagtgctcaaaatgttatgccattaacaatcctgagaagggggagatttgttcattctatgcagatccaaaaaggttttttcctgcaattttctcacactgtgttatctatgagactatcaacaccatgatgagttggttgtctgaatgtatagaactcagagatcaacaaaaaactttaaaattattgctcaaaatcaccatgatcctcatacttgtgaaccctagcaaaagagcacagaagttcttgcaaggtctgcgatacttcataatggcctttgtttcagacttccaccataagcagttaatggaaaagttgagggaggatctcataacagagccggagcacctcttgtatagtgtggtgaggagcattctcaacatcatcctgggtgaaggggtgagcactatgttgactaatagatttaagtttgtgttaaacctatcatacatgtgtcattttataactaaggaaactccagataggttgacagatcagattaagtgctttgagaagtatttggagcccaagttggagtttgacagtattaacatcaacccatctgaagagggggatgaagatgaaaggatgctgctgcttgaatcagcaaacaaatttttatccaaagaaaccagtatgagtaacaacagaatatcttataaagttcctggtgtgtcaagaaaattcttctcaatgatgacgtcttcttttaacaatggctctcttttcaagaaaggagatgacctaagtgggtttaaagatccattagttactgctgggtgtgcaacagctcttgaccttgcaagcaacaaaagtgtggttgtgaataagtatactgacggagagaggatactttattacgatcatgataaactagtggctgcttctgtttgccagctatcagaggtattccagaggaaaactaaatacctcttgagtaaggaggattatgattataaggtgcaaaaggccattagtgaccttgttgtggggaagaagtcaggttcctcaaatcccaattcacaaggggctcctgacgaattagatgagttattcttggatagttgtgcacttgactgtctagaggatgtgaagaaatctgttgatgtcgtccttgagaagtatagatatgacaggaagttccctgtgggaaatgggtcagaggagaagtccttgacagacttgaggaaggttttaggtactgaagatgtgggctgtgtttactacagactgatccaggcagagatagcacaccacatggtggaagattttgatgagtcactactacctggagatgcttatgagatgatctgcaaaggcttttttaaggatttggagttaagatcaaagtatttctatttggattccttggactcttgcccaataacatgcatcacccaagctgtctccaccagaacattcaatgaccagcagttttttcagtgcttcaagtcactacttcttcagatgaatgcagggaaattggctggaaaatacagccattacaaaaacaaatgcctaaacttcaagattgatagagaaaggctgatgaatgatgttaggatcagtgaaagagagagcaattctgaggcattaggtaaagcactgtcattgacaaattgtacaactgcagttctaaagaacctatgtttttacagtcaagaatccccacagtcatacacatccttgggtcctgatactggaaggctcaagttttccttatcttacaaagaacaagttggagggaacagggaactttatataggtgacctgaggacaaaaatgttcacacgcctaattgaggattattttgaggcactaactaagcaatatagagggagctgtcttaataatgaaaaggaattccacaatgccattctagccatgaaattgaatgtttcactaggtcaggtctcttatagcctcgatcacagcaagtgggggcctatgatgtccccttttcttttcctggtgtttcttcaaaatttgcgatgggagacaagagatgatatagaggacataaaaagtaaggattacgtgtccactttgctgtcgtggcacattcacaagttaattgaggtacctttcaatgttgtgaatgcaatgatgagatcttatcttaagtctaggttaggtttgaaaaaatcactccaccaaacgtcaacagaagctttcttctttgaatactttaaacaaaacagaataccatcacatctcagctcaataattgacatggggcaagggatcttgcacaatgcttctgacttctacggtctagtgagtgagagattcataaattattgcattaagtgtctatttgaagatgaagttgattcatatacctctagtgatgatcaaatatcactatttggcaaggatctttcagatttactctcaaatgagcctgaggaattccaagccattctagaatttcactatttcctaagtgatcaattgaataaattcatcagtccaaagagtgttattggttcatttgttgctgagttcaaatcaaggttttatgtctggggtgatgaagttccattgttaacgaaattcgtggctgccgccctccacaacgttaagtgtaaggagccacatcaattagctgaaactattgacactatcattgatcagtcagtggccaatggtgtgcctgtcacactatgtaacgctattcaggagagaacactgaatctacttagatatgcacaatatcccattgatcctttcttgttgtttttggattctgatgttaaagattgggttgatggcaataggggctataggattatgaggaacattgaggcaatcctaccagaaagcactcagaaagttaggaaggtcctaaggacagtttttaataagctgaaattaggagagcttcatgaagaattcacagccatctacttgtcaggagaccccgcagattccttcaagaaacttaccagccttgttggtgatgacaccctctcagaagaggatttatcggtgtgttggcttaatttgacaactcatcaccctttaaagatggtcatgagacagaaggtcatttacacaggtgctgttgaactcggggaagaaaaactgcctaccttggtgaaaacattgcaaagcaagttatcctctaatttcacaagaggggcacaaaagttgctctgtgaagccgtcaacaaaagtgcctttcagagtgggatagcatcaggtttcataggtctttgcaagacactaggtagcaaatgtgttcgattctcagataggtccaccgcctatataaaatcattagtttcaagactgtcagcattggattctgtttccagcttgaaagttaagggcgtcgatctttggatcttgggtaaggagcacacaaaggcagctgaggaagcgttaggtttcttgagacctgtcctttgggattacttctgcatagccttatctacatcacttgagctgggttcctgggtgttgggtgaacccaaagtgaaggagaaaacatcctcaattcccttcaagccatgtgactatttcccaatgaagcccactaccacaaaactcttggaagacaaggtggggtttaaccatattattcactcattcagaagactttacccatctctatttgagagacacctcttgcccttcatgagtgacctagcatcaacgaaaatgaggtggacaccaaggattaagtttcttgatctttgtgtggttctagatgtgaattgtgaggcaatgtcattaatttctcatgttgtcaagtggaagagagaagagcattatgtggttctgtcttcagatttagcaatagcacatgagaggtctcatctcccaatcacggatgaaagggtggtgaccacttatgatgtggtacaaaatttcctgagacaaatctactttgagtccttcatcagaccattcgttgcaacaagcaggactttaggttcttttacttggtttccacatagatcttcaattcctgagtcggaagggcttgacaacctcggccccttttcttcttttatagaaaaggttatttataagggtgttgaaagacccatgtacaggcatgatctttactcaggttatgcttggctggactttgaatgtgcaccagcaattctaaacttaggacagctcatagcatcaggattaaccgagcagcacgtctttgagtcggtaagtgagctgcttgaagcttttgccgacctcagtgttgggagcgttcaaatttctgtcacagtaaattttcaggtgagaagtcagggtgaatcattgaaagagaaatttagtctccacctccttttcaaaggggtggtgttggaaggtggattattcaagcctcattcccttgatgtaacttacagtggtagtgttcaaagatccgcaattaaagattgctggagagttgcacagacatctacatggtttaaaagggaaaccacatcaatttggttgctgtccactgaaaatatttgtgactacttgagggatagttcccccattcctgatgtgatacccttgtccgtcttattgaatgaggagatcctggacctggaggaacatgatttcacgcatatagggcctgagcatgttgaaatccccttagttgttgactcaggataccttattgaagggaccaggaaactcctgcccttcaaccccaacatccatgaccaggatcttaatgtttttattggtgagctaatggaggatcattccgaaatcttggagagatctttgagcaagatgctgagatccagaatggaccaaggactacactggctacaacttgatattataggggttgtgggacgatgcatgcctgaaggctacgaaaacttccttactagagtgttctccggaattgacttctgggcagattttaaaggctatagtctctgctacagtagatcgcaggcttcactgatgatccagtcttcagaggggaagtttagattaagagggaggctgtgcaggcccctctttgaagaggtggggcctcccctcgacattgagtag

SEQ ID NO: 12697 - DNA, 1617 bp, unidentified
  misc_feature 1..1617: note = Synthetic
  source 1..1617: mol_type = other DNA
ctgagtcacttcaccacatcagcaaagggagatgtcttgagggatgccaaatcactggtggatggtttggatttcaaccaagtttctcaggttcagagggtcatgagaaaggacaagagatcagatgatgatctttctaagttgagagacctcaatagatctgttgacagtttaatggtgatgaagaataagcagaataatgtcagcctcaagatcggaagcctgtccaaggatgaactcatggatcttgcaacagacctggagaagttgaaaaggaagattaacctaggagataggcaaggacctggtgtctatcaagggaacttaacatcagcacaactagaaaaacgttcagagattcttaagtctctgggctttcaaccaagagccaatcaaaacggtgttgtcaaagtttgggacatcaagaacccaaagctgttaatcaaccagtttggctcaattccagctttgacgatagcatgcatgtcagtgcaaggtgcagagcagatgaatgatgtcgttcaagggctgacatctttgggtctcctatacacagttaagtaccccaatctagatgatttaaacaagttgagcaaagatcatccctgtcttgagttcatcaccaaagaggaaagcgctaataacatatctggttacaacctcagtctatcagcagctgtaaaagctggtgcttgcttggtggatggtggtaacatgttggaaacaatcttggtcaaacctgacaacttccaagatattgtgaaaagtttacttgttatcaagcgtcaggaaaagatgttcgtgaatgagaaacctggactaaggaatccatatgaaaacattctctacaagttgtgtctctcaggagagggctggccctatattggatcaagatctcagattgtgggtcgtgcgtgggaaaacaccacagttgatttgtcaaaggaggtggtgtatgggccatctgcaccagtaaaaaatggaggtaatatgagactgagtccattgtctgacactcaggaagctgtgatcaaggaagccattgggaaactggacatggatgaaaccatctggattgacatagaaggcccacccaatgacccagtggaactggcaatttatcagccttccacagggaactacatacactgctttagagtccctcatgatgaaaagggcttcaagaatgggagcaaatattcacatggaatcttgctccgtgatattgagaatgctagatctggtcttctgagtaggatcttaatgagacttcctcagaaagtggttttcacttgtcaagggtctgatgatatccaaaaactgctgcaaatgaatgggagaccagacattgccaccattgatatgagtttttcatcggaacaggccagatttttcgaaggtgttgtgtgggaaaagtttgggcacttgtgtacaagacacaatggagttgtgctgagtagaaagaagaagggtggcaacagtggtgaaccacactgtgcacttttggactgcatcatcttccaagccgctttcgaggggcaggtgacaggtcaaattccaaaaccactcttaccgaacagcttgatctttaaggatgaaccgagagttgccatgtaa

SEQ ID NO: 12698 - DNA, 750 bp, unidentified
  source 1..750: mol_type = other DNA
  misc_feature 1..750: note = Synthetic
atgaaatccttgaaaaaattaaaagaattagaaacctcagacgtattcaacaccttacacgtccgaactatcctaaaggtgatcaagattgataagtgtgtatccctcgcacgacattcgttagtaaatataacagtaggagacgacggaatatggttccacttggaagacggaaccatgatcaacggcctggaatacaagaccatctgcgaaaaagagttgggattccaaggcttcattggcatcataatactagactcggaagatacactgcaagaactgcgactcaatccttttcagttcaaacgcagactaatccatatgaaagtggatacgccagaagaatttatgctttgcggactagtgttcgcattagagaatcttccactgaagcaaagcaccctgcacaaactaatcgctaggctcgttcttttccccgtcctatctccggtaacgaaaatattattcaacacgtgcgacaaattggtttgtacactaagacacattttttttaacgaacacgcctcagaaatcctccacaaggtgcctccgatgattagactatacaatgaaatgaaaaacacgcatatagaagttttggaactttattttaacacaaaacgtagtcacaatttcatcaatttatccttagaatctagacagctgcaagacagttctctccaagtcatacaactagcaacacaattcgcacaaattttttattcgaagaatgaagacacgtctagctaa

SEQ ID NO: 12699 - DNA, 750 bp, unidentified
  source 1..750: mol_type = other DNA
  misc_feature 1..750: note = Synthetic
atgaaatccttgaaaaaattaaaagaattagaaacctcagacgtattcaacatcttacacgtccgaactatcctaaaggtgatcaagattgataaatgtatatcactcgcacgacatccgttagtaaatataacagtaggagatgacggaatatggttccacttggaagacggaaccatgatcaacggcctggagtacaagaccatctgcgaaaaagaattgggatttcaaggcttcatcggcatcataatactagactcggaagatacactgcaagaactgcgactcaatccctttcagttcaaacgcagactaatccatatgaaagttgatacgccagaagaatttatgctttgcggactagtgttcgcattagaaaatcttccactgaagcaaagcaccctacacaaactaatcgctaagctcgttctctttccagccctatctccgataacgaaaatattatttaacacgtgtgacacgttggtttgtacactaagacacattttttttaacgaacacgcctcagaaatcctccacaaggtgcctctgatgattagactatacaatgaaatgaaaaacacgcatatagaagttttggaactttattttaacacaaaacgtagtcacaatttcatcaatttatcattagaatctagacagctgcaagacagttctctccaagtcatacaactagcaacacaattcgcacaaactttttattcgaagaatggagacacatctagctaa

SEQ ID NO: 12700 - DNA, 24 bp, unidentified
  misc_feature 1..24: note = Synthetic
  source 1..24: mol_type = other DNA
atgtgctgtggtgaaggcgtgtaa

SEQ ID NO: 12701 - DNA, 6630 bp, unidentified
  source 1..6630: mol_type = other DNA
  misc_feature 1..6630: note = Synthetic
atggatgaatatgtccaagagttgaaagggcttattagaaagcacattcctgagaggtgcgagtttggacatcaaaaggtcacattcctatctcaggtgcatcccagtcccttgctcacagaaggcttcaagttgctctctagtcttgttgaacttgagtcctgtgaagcacacgcctgccaggcaaacactgatcaaagattcgtagatgtaatactatctgacaatgggattttatgtccaactttaccaaaggtgatccccgatgggttcaaattaactgggaaaaccctaattctgctggagacctttgtaagagtaaacccagatgagttcgagaagaaatggaaagctgacatgtcaaagcttttaaacctgaagcatgacctgcaaaagtcgggcgtgactttggttcctattgttgatggcaggagcaattacaacaatagatttgttgctgattgggtgattgaaagaataagatggttgcttatcgggattttgaaagcatccaaatccatgcttgagattgatattgaggaccaggaatatcaacgattaattcatagtctatcaaacgttaagaatcaaagcttggggttggaaaacctagaacatttgaaaaggaattctttagattatgatgagaggttgaatgagtcattgtttattggtttgaaaggagacattagagagtcgacagtgagggaagaactcatcaaacttaaattgtggttcaaggatgaggtcttcagcaaaggtctgggcaaattcaaattgactgacagaagggaattattagagtccctatcgagcttaggtgctcatctagatagtgatgtgtcaagctgtcccttttgtaacaataagttgatggaaattgtttacaatgtgacctttagctgtgttgaaaggaccgatggtgtagccacagtggaccagcagtttagcaccacacactctaacatagaaaaacattaccttagtgtcttatctttgtgcaataaaataaaggggttgaaggtctttaacaccagaagaaacaccctactattcttagatctcataatggttaatttgatggttgacattagtgacagttgccaggacgcgattgaaagtttgagaaaatcgggattgatagtgggtcagatggttatgttagtgaatgatagagtgctggacattttggaggctgttaaactcatcagaaaaaagattgggactaatcccaattgggtcaagaattgttcaaaaattctagagagatcacatccagaaatatggcatcacttaagcactttgataaagcaaccagacttcaatagcttgatttcaatagcccaacatcttgtctcagatagaccaattatgaggtattcagtggaaagaggctctgataagatttgtagacataaattgttccaggagatgtctagctttgagcaaatgaggttattcaagactttgtcctcaatatccttgtcactaatcaattctatgaagacatccttttcttcaagattgcttgtgaatgagagagaattttctaagtactttggtaatgttagactcagagagtgttatgcccaaaggttttatttggctgagagtttagttggctttcttttctatcagaagacaggtgaaaggtccaggtgttattcagtttatttatctgataacggtgtgatgtcagaacagggttcattttattgtgatccaaagagattcttcttgcctgttttttctgatgaagttttggctggaatgtgtgaggaaatgacaagctggctggattttgacaccggattaatgaatgacactgggcccatattaaggttgttagttctggctatactctgctccccatcaaagaggaatcaaacctttctacaaggattaagatactttttaatggcttttgctaaccaaattcatcatatcgacctgacatctaaattggtagtggaatgcaagtcaagttcagaagtggtggttcaaaggcttgcagtgggactcttcattagactacttagtggtgagtcagatgcaagtttatttttctcaagaagattcaaatatctgctaaatgttagttacctttgccatttaatcacaaaagaaacgcctgaccgattaacagatcagatgaaatgttttgagaagttcattgagcccaaagttaagtttggatgtgctgtggtgaacccatctctaaatggaaagctgactgtagatcaggaagacattatgataaatggtttaaagaagtttttttcaaaatccttaagggacactgaggatgtgcagacaccaggtgtgtgtaaagaactcttaaattattgtgtgtctttgtttaataggggaaagttaaaggtttctggggagcttaaaaataatccctttagacctaatataacaagtactgctttggacttatcaagtaacaagagtgttgttataccaaaactagatgagttaggcaacatcctctccacctatgacaaggaaaaactagtgtcagcatgtgtttcctctatggcagagaggtttaaaaccaaaggaaggtacaatctagatccagattcaactgactatttgattctaaaaaatctgacaggtttggtgagtgcagggccgaaagctaagagtactcaagaagaattgtctttaatgtacgaggcgttaacagaagaacaggttgaatcattcaacgaaattaaacatgatgtacaagttgccttagccaagatggctgacaacagtgtgaacacaagaactaaaaatctcggccgagctgataattcagtaaaaaatgggaataatcctttggacaatttgtggtcaccttttggggtgatgaaagagattagagctgaagtatcgttacacgaagtcaaggattttgacccagatgttcttcctcctgaagtgtacaaggagttgtgtgacgcagtttacaaatcgtcagaaaaatgcaacttcttccttgagggagtacttgatgtctgtcccttggggttgctgctgaaaaatctgaccacatcaagttatgtggacgaagagtattttatgtgttttaaatacctcttgatacaaggtcactttgatcaaaaactaggaagttatgagcacaaaagcagatctagactgggtttcaccgatgagacattaagactcaaagacgaggttagacttagtataagagaaagcaactcagaggcgattgcagacaagttggataaaagttacttcaccaatgccgcattaaggaatctgtgtttttattctgaagattcgcccactgagttcacaagcattagttccaactcaggaaaccttaaatttggtctaagttataaggaacaggtgggttcaaacagagagctctatgtaggagacctcaacacaaaactgatgacaagattggtggaggatttttctgaagctgtagggaattctatgaagtacacctgtctgaactctgaaaaagaatttgaacgggccatttgtgacatgaagatggcagtgaataatggtgatttgtcatgttcttatgatcactcaaaatggggtccaacaatgagtcctgcacttttcctggcattattacaaatgctggaattgagaacccctgttgacaggtcaaaaattgatcttgattctgttaaaagtatactgaaatggcaccttcacaaagttgtagaagtgcctatcaatgtggctgaagcctactgtattggaaagctaaaaaggtcccttggattgatgggctgcggttccaccagtttgagtgaagaattcttccatcagaccatgcagttaaatggtcagattcctagtcacattatgtctgttttggacatggggcaagggatactacataacacttctgatttgtatggattaatcacagagcaatttttgtgttatgcactcgatcttttgtatgatgtaatccctgtgtcatatacctctagtgacgatcagatcactcttatcaagacaccttctctggatatagaagggggttcagatgctgcggagtggctcgagatgatctgcttccatgagtttctgtcatctaaattgaataagtttgtcagccccaagagtgtcatcgggacttttgtcgcagagttcaaatcaagattttttgtcatgggtgaagaaacaccattgctcacaaagtttgttgctgcagctttacacaatgtaaagtgtaaaacacccacacaattgtcagaaactatagataccatctgtgatcaatgcattgcaaatggagtcagcaccaaaatagtgacaagaatatctaagcgagttaaccaattaattagatactccggatatggagagaccccctttggggctattgaagatcaagatgtgaaagactgggtggatggctcaaggggttaccgtctacagagaaagattgaagctatctttcatgatgacaaggaaacctcttttattaggaactgtgccagaaaggtttttaatgatataaagcgtggcagaatatttgaggagaatctgatcaatttgattggtagaggtggtgatgaggccttgactggttttttacagtatgcaggttgcagtgaacaagaagttaatcgcgtgttgaactatagatgggtgaatttatcaagttttggagatcttaggttagttttgaggacaaagttgatgacaagtagaagagttcttgaaagggaggaagtgccaactttaattaaaaccttgcaatccaaactttccagaaacttcacaaaaggagttaagaagatccttgctgagtcaattaataagtcagctttccagtcatccgttgcctcaggttttattgggttctgcaaaagcatgggtagcaagtgcgttagagatgggaaagggggattcttatacataaaagaagtgtattcaggtgtaagtgcttgtacatgtgaaatatgtgcgttaaagcccaagatcatatattgcaacaactcacttaacaaagtgagtcagttttcaaaacctattttgtgggattatttttcattagtcctaacaaatgcatgtgaacttggagagtgggtgttttccacagttaaagagccccaaaagccattggtgttgaacaaccaaaactttttttgggctgtgaagcctaaagtggtgagacaaattgaagaccaactgggaatgaaccatgttctgcaatctataaggagaaattatccagttctttttgacgaacacttgactccatttatgaatgatcttcaggtcagcagaacaatggatagcgggaggctaaaatttctggatgtctgcattgctttagacatgatgaatgaaaaccttggtatcatcagtcacctgttgaagaccagagacaacagtgtttacatagttaaacaaagtgattgtgccttagcacacataaggcagtcaagctacacagattgggaattaggacttagtccgcagcagatttgcacaaacttcaagacccagctggtcctatcttcaatggtaaacccattagtcctttcaacatcttgtctgaagtcatttttctggttcaatgaagtcctagagctagaggatgatagtcaaattgagttagcagaattgactgactttgccttaatggttaagaatcaaaatgtttccagagctatgtttgtggaggatatcgcaatggggtatgttgtctctaacttcgagggtgttagaatctcgttaagcaacgtgatggttgatggtgttcaattgccgcctcaggagaaggctcctgatataggtgaattgtttggattgaaggctgagaatgtcattgtgggcctagtggtgcagatcgatcatgtaagaatgtcaacgaagttcaagttgaagagaaaaatggtgtatagtttctctttggaatgcataatggatgtaggagagatccagaacaaagaggttattttgaaggtggtggcagtcgatcagtctgtgtctgggtcaggaggaaaccatatgctgctggatggtgtgtcggttgttgcaagcctcccattatttactgggcaggccagttttgatttggctgcaatgttaatcgagtcaaatctggctggctcaaatgataatttcttaatgagaaatgttaccttggatttaggtggattttccccagagttgagtgacaaatattcctacaggctctcgggacctgaaaaccaagaagacccgttggtcttgaaggatggtgccttctatgtgggaggtgagagactgtccacatataaagtagagtttacaggtgatcttgtggtgaaagcattgggggccctagaagatgatgagagtgttgtttctatgctgcaccaactgtggccttatttgaaagcaacatcacaggttattttgtttcaacaggaagatttcaccattgttcatgatttgtacaagaaacagctcacaaaatcaattgaaagctttggcgaatggatcgaatttaccaactttaaggttgcctatagtaaatcactcaaagagcttgtgatatcagacacccaggggtcattcagactgaagggtgtgatgtgtagacccctggcaagcacgccccaagtggaggacattgagtga

SEQ ID NO: 12702 - DNA, 6621 bp, unidentified
  misc_feature 1..6621: note = Synthetic
  source 1..6621: mol_type = other DNA
gtggatcctaggcgaaatttgacaatggatgaaaaagtctttgttttgaaagattttatcagaagacaagtgcctgacatacctgaactgtcttatcagaaggaggcattactttctcaagtcgaagtaccaatggtcttaacagagggcttcaagctcctatcatgcctggtcgagattgaatcctgcaggaagaattcttgtgagtgcaactttgaacagaaatttgttgatacaatactctctgaaaatggggtggttgcacccacactaccaaaggtgatacctgacggttacaggttcttcaataagacattgatactccttgaaacatttgtccgtgtgaatcctgaagagtttgaaaagaagtggaaaaccgacatggcaaaattgcttagtttaaaagaggacattcacagaacgggtattacactggttcctgtggttgacggtagaggcaactacaacacagatttgctgccagattgggcgactgaaagattcagatggttgcttattgatctgctgagagaatcaagaggagctcctacaatggagattgaggatcaggagtaccataggttgattcatagcctctctaaaacaagtaatcagagcctcgggtttgaaaatatagaatgcttaaaaagggttcatctgaattatgaggaaagactcaatgagcaattgcttaaagacattgtgggagaagttagggaatccaagattagggaagagttgatcaaattgaaaacttggtacagagaagaaatctacaggaaaggccttgggaattttgttcagacagatagaaagtccctactacagactttggtgttgtcgagtgcccactctgactcattggcccctgagtgtcccatgtgctgtagtaaaatccttgacttatgttatcaactctcaatgagaattgcaaaccaaacatcactggagaataattttgatgaacctcctcttcccacaacccagatagaaaaagtttatctgtcattgttatcagcgtgcaataagataaaaggaaagaaagtgtttaacaccagaagaaacacacttctatttttggacttaatcattttgaactttgtggcacatgtttataagacacaaccttctgaaatggaaaccttgaaaaaagcaggtctgattatcggtgagatgttattacttcccaacgacagggttttagatattttggttgcaaggaggcttctattgaagaaagttgagtcctgctgcaattggttggacaggtgtagacatttgttaaggaaagaagagcctgttctatgggactgtgtgtcagagttcacaaatgttccagactttgagttgttgctatctttagctgaggagctctgttcagagaagcctgttatgcactacaaacctccaagttcattgattggcgattgtgcccataaggacctgatgtcaatgtcagatggagagtttgagagtttatttaaatgtctgtcgcatatatcactttctctcgtaaattcaatgaagacatcattctcttccagacttctagtaaatgaaaaggattataagagatactatggcacagttagattaaaagaatgctatgtgcagaggttctttttaagagtaggcttgtatgggcttttattttaccaaaaaacaggtgagaaatcacgttgttactccctttacctttctgataaagggaaccttgtagaacttggatctttttattctgatcctaaacgattctttttgcccatattctctgaatttgtgcttctagctacatgcgcagagatgttaagctggttagattttgatgagaagttggttgacgcagtaacccccttattgaaaatcctggttttaagtatattgagttcaccaacaaaaaggagtcaaacatttctacaaggattaaggtatttcatcatggcgtatgtcaatcaggcccatcatatccaattgatgagcaagttggctgttgaatgcaaatcagcctcagatgttttaattcagaggcttagtgtaaaaattgtggatatggtgttaagtgatggttctgatccagacatgcatatgacgaggaagtttaagtttgtcttaaatgtaagttacttatgtcatttgatcacaaaagaaactccagatagactcacagatcaaattaagtgttttgagaaattcatggaaccaaaactagagtttggtagtctcattgttaacccatctttaaatggctttctgtctaaggaacaagaagatgtcatgattgagggtgtagagaagttcttctcaaaagagcttcttactgtggaagatttaaagagaccaggggtttctagagagctactgagttattgtgtgtcactttttaacaagggaaggctaagagttaatggtacattgggtacagacccctatagacccagtttcacaagcactgcattagacttatctagcaacaagagtgttgttattccgaaattaaacgaagtgggagagattgtgtcggaatacgacaaacaaaaattggtttccacttgcattacttcaatggcagaaagatttaagacaaagggaaggtataatctagatcccgatacaatcgactttctgattatgaggaacttgactaatcttttgtctgcaagaaaacttgacagcagcaagaaggaagagttgtcattgttatatgagcacttgtctgaagatgtcatgaaagcatttgaagagataaagtatgaagttgagatcactttaagcaaaatgaggctctcaagggaacttgagtgtggccacaaaaaaccatgtacactggaaggtgtgtgggcacccttcaatgtcttgaaagtaattaggagtgagacaagtgttcatgaaattagggattttgatcctgacctcttgggggaagatgtctatgaaaagttatgtgtggctgtttatgattctccattaagacctaccttctttttggaaaagcctcttgacatctgtccattggaactcctactgaaaaacttaacaacaaaatcttatgaagatgatgaattctttgattgtttcaagtacatcctgattcaagcaggatttgatcagaggttaggggcttatgaacataaaaataggtccagattggggctctcagaggaagcttttaggctaaaggaggatgtgagagtgagcaatagacagagtaattcagaagccatagctgacagactagacaagagtttcttcaccagtgctgctctaaggaacttgtgcttttattcggaggaatccccaacagagtacacatgtattagcccaaatgtgggtaatttgaaatttggtttgagttacaaagagcaagttggttcaaatagagaactttacgtaggtgacttaaacacaaagatgatgacaagattagttgaagactttactgaggcagtggctaactcaatgaattacacatgtcttaactctgaaaaagagtttgagagggcaatctgtgatatgaagatggctgtgaacaatggggacctgtgctgttctctagatcattcaaaatggggccctttcatgagtccagctctttttcatgcattctttggagctcttaagtttaaaattagtaagacaggtgaacaagtagatctcgggccagttctaaatgtgttaaagtggcatttacataaagctgtagaagtaccaatcagtgttgctgaggcatattgcacaggcatgttgaaaagaaggttgggtttaatgagtttaagctgccaatcagtgtgtgaagagttctttcaccagaaattattattagaagaaggagtgcccagtcatattatgtctgtcttagacatgggacagggcatacttcacaattcatctgatctttatggtttgattactgagcaattcataaactactgtttggatttcctctttgacgtgataccggtgtcttacacgtctagtgatgatcagatcacaacgttcaaattgccaactatgtcttcaagtgaagatgggttagacggttttgattggttagagcttttatgtttccacgattttttgtcctcaaaattcaacaaatttgtgagccccaagagtgtttctgggacttttgttgctgagtttaaatcaaggttctttgtcatgggtgaggaaacacctctgttaaccaagtttgtatctgcagcattgcataatgtcaagtgtaaaactccaacacaacttgctgaaactattgatacgatttgtgatcaatgtgtggctaatggtgtcggaattgaaattgtcacaaaaatatcagaaagagtgaacaggttaattaggtactctggttaccctcaaacgccctttcttgctgttgaaaaacaagatgttaaggactggactgatggctcaagaggttacagattacaaaggaatattgaacactacctacaagggagtgaacaattggaatttgtgaggaagtgcgcaaaaaaggttttgttaaaaataaagaaagggcaagtttttgaggaatacttagttcagctaatagggaaagatggggatgatgctttgaaaggctttttgtcttatgcaggctgtgaatcagatgaaattaaggatgtccttaagtaccgctggctaaatttatctgcaaatggtgacttaaggcttgtgttgaggacaaaacttatgtcaacaagaagggtgcttgaaagagagcaaattccaactcttatcaagacgttacagtcaaaactctcaaaaaattttacaaaaggagtcaagaaaattctggcagaatcaatcaacaagtcagcgttccaatcatctgttgcttcaggtttcatcggtttttgtaagagtatgggtagcaagtgtgttagagatggcagtggaggtttcatgtacattcgtgaggttttaaataagcagagggtatgtccctgtgagatatgtgcacaaaaccctgggatcattttttgttctgatgcattgaccttaataccagaattttcgagatcaatattatgggattatttttctctggtgttaacaaatgcctgtgagttaggagaatgggtgttctcttcagtacaacctccaaaagtgcccattctactaaataaccccaatctcttttgggctgttaaacctagaggaacccgtttaattgaagatcaattaggattaggtcatgtattgcaatcagtaaggaggagttaccctaaagtttttgaagagcacttagtaccgttcatgaatgacctacaggttagtcgcactactgatttcacaagactgaggtacttagatgtgtgtgttgctcttgacatgatgaatgaaaatttgggaattgtgtctcatctgttgaaggcaaaggataattcaatatatattgttaaacaaagtgagtgtgctgtcgcacatataagacaagttgaatatgtaaatcaggaattagggttaagccctcaacagatttgcagtaattttaaaatacagttggtcttttcatctatgattaatcctttagttattacaacatctgtgctaaagtctttcttctggtttaatgaggttttgaatctagaagatgaaagtcagattgatgtcggtgagctcactgactttacaatactgataaaaaagtacaacttgaatagagcaatgatgctggatgatttaacaatgggttatgtggtgtcaacaattagtgagcccaccatacatttagtttcacttaaaagaaactcaaattcaattgtgggtgaacaaaactctgaaatgcttcatggagaacaagtggaagatatgtattccatagtgctgcacatccaacttgagcacaaaaggcattcaacaaagtaccatttatcaagaacagttgtttattcttacacagttgaatgtgagactaacatcactgacattgagaaagaaccaagcttagcaactgtaaagaatgtggtgctgagagcatctggatccatcgagggccatcaatttttagatggtgttaaccttgttgcttcccagcctatattcacagggaaaaaagtcataaacctaagtgagctgctggctgactcagaaatcacagaaacatacaaagagggcgatgcagtgggatcaattcttctaaactttggtacattttatgaacatattgacgacagatatgcttatgaaattgtggggcctgagtgttccgattcccctctagtgctcgatggaggctctatcttagctgatggcaaaaagctttccagcataaaagtcgaactcactggggatgtcatcctaaaggcattaggggccctagaatcagaaaaggaagtgcaaagcctgctgacagggttgtggccattcattagaataaacaatctaaaagtgaagatggctcaggaggacttccttttaatgtatgagatgcacagggaatcattgttaaaatctcttgaggtcttcagcgaatggtgcgagtttgtggactttagtgtctgctatagcaaatctttaagggacttggtgatatcagacagctccggcagcctgaggctcaaaggcatcacctgtaaacccatcaatctgtcaaattcagtcaccgaaattgagtag

SEQ ID NO: 12703 - DNA, 42 bp, unidentified; identical to SEQ ID NO: 4225
  source 1..42: mol_type = other DNA
  misc_feature 1..42: note = Synthetic

SEQ ID NO: 12704 - DNA, 1449 bp, unidentified
  misc_feature 1..1449: note = Synthetic
  source 1..1449: mol_type = other DNA
atcatgggtcaacttgttagtttctttcaggacatacaactctttttccaagaggctctcaatgtggctctagctgttgtcaccgtcctggctatcattaaggggcttgtgaacctttggaaatcaggtctcttccagttcctctttttcttaatcctggcaggaaggtcttgctccttcagaattggtcatcatacaacttttgaatctgtcacaatgtcagttgggggagtctttcacgaacttcctgctttgtgcaggatcaataacagccacagtctaattcaactgtctcacaacagtagtttagctttgtctgtcgaatatgtggatttgtgtgtcgttctagagtcagaccagtatttagtggctggggattactccaactgtactggggaagcgacaggatacaactgggttattgactggacgctaaagggtctgggtcacggtcttgagggcgaccccaagctgcactgtcagccaaagagatctaccaatgctgaattcaccctccaacttaatatatctcggaggcatacaaatgaccactacagggaaagaattgaaacaggaataaggcacatgtttggtccgttcaagattttgactaaagaagggaaggattgtgtaatcttaaggaacacaacttggaaagaacagtgtgtcaaaagtcattacaacacactagcatttctattaaaaaacacagccaactctctcccaaagagaaggcccttggccttttttagttggtcactttctgactcatcagggaatgacatgccaggtgggtactgtcttgaggaatggatgctcattgcagcaaaactcaaatgctttggaaacacagctcttgctaagtgcaacttaaatcatgattctgaattttgtgacatgttgaaactgtacgaattcaacaagaatgcaatttccaaactaaacaaccagacaagagaagctgtgaatgcattgacccactcaataaacagcctaatttctgatgaccttttgatgaaaaacaaattaagagaatttcttaaggtcccatactgcaactacacaaagttttggtatgtaaatcacacaaaatctggtgaacattctctgccaaaatgttggttggtgaacaatgggagctttttaaatgaaagtgaatttaggaacgaatggatcttggagagtgatcacttgattgcagagatacttagtaaggaataccaagacaggcagggaaaaaccccaataacattagtcgacatgtgtttttggagtgctattttcttcgacaacaagtctctcttacacttggttggatttccaactcacagacatattgtaggagaagcatgtccattgccccataagatcaacagacatggagcttgtgcctgtgggctataccaaaaattaaagaagaagactgcttggagaaaaaggcaccaatag

SEQ ID NO: 12705 - DNA, 6657 bp, unidentified
  misc_feature 1..6657: note = Synthetic
  source 1..6657: mol_type = other DNA
gtggatcctaggcggcacttgaccatggatgaaactgtgtctgaactcaaagacttggttagaaaacacattccaaataggcatgagtttgcccaccagaaagatgccttcctgtcacactgtcattcagggtcactgcttcaagaaggttttaaacttctctccaaccttgtggagttagagtcctgtgaatctcatgcatgccacttgaacacctgccaaaaatatgttgatgtgatcctcagtgatcatggaatcccatgtcccactctccctaaagtgatacctgatggattcaaactcactggaaaaacattaatactattggaaacatttgtgagggtcaatccagaagaatttgagagaaaatggaagagtgacatgacaaaactactaaatctcaaacaagaccttctgaggtcaggcatcacacttgttcctgttgttgacggtagaactaattattctaataggttcactcctgaatgggtggtggagaggatcagatggttgttaattgaaattttgcggaaatcccgatcgtccgcagagattgatattgaggatcaagagtatcaacgtctgatacacagtctttcaaacgttcgtaatcaaagtttaggatttgagaatatagagtgtctcaaaagaaatcttttggagtatgatgatagactggccaaatcattatttgttggagtcaaaggcgatgttcgagaatctgtgattagggaagaattaatgaaattaagactctggtacaaaaaggaagtttttgacaaaaacttggggaagtttaggataactaatagatcagagcttctgaacaatttaattaggttagggaaacatgaggataacaccacctcagattgtcccttttgtgtcaacaaattcatggacataatctatagtttgactttcacagcactaaaaaggcaggacagggagaaatcaaactctgaattagatcagtatgttgtctgcccccatgagaaggcctatttaggcgtgttgtcgatttgcaataaaattaagggattaaaagtttttaacacccgaagaaatacgttgctctttctagatctcataatggtaaactttttagatgacctatttacagccaaacccgaagcactggactctttgagaaggtctggtctcatcctgggtcaaatggtcacactagtcaatgacagggccttggattttttggaggcggtgaaattaattaaaaagaaaatagagacgaatgttaagtgggtggagaattgctctaaaatcttgaggaggtctcaacaagatatctggtcacaaatatcggtgtgggcaagatatcctgatttatccaagctaatatctatagctcagacaatatcttctgatagacccattatgagatactctgctggggggaactttaacactgaatgtaaacataagacatttcacatgatgtcagatgctgaacaggttgaggctttcaaaatactctcctcagtgtctctttccttaataaactctatgaaaacctcgttttcttcaaggttgcttattaatgaaaaagaatactcaaggtattttggcaatgtgagactaagggagtgctaccaacagagattctttttaactgatggactgattgttattcttttttatcaaaagacaggtgagcgttcaggatgctactcaatttacacatgtgaagatggtgttcttgtcgagaagggctctttttactgtgacccgaagagattttttctgccaatcttttcacaagaggtgttggttgagatgtgtgatgagatgacaacttggctggacttcaacagtgatcttatggtgatatccaaagagaaactaagacttttattgttaagcattttatgcgccccgtccaaaagaaatcaggtatttctgcaagggctaaggtattttttgatggcatactcaaatcaattccaccacgtggatctactgtccaaattaaaagtggagtgtatgtctggctctgaagtcatagttcagaggctggcagtggaccttttccaatgccttcttggtgaaggtgttgattcggacccctattttgctaggaggttcaagtatctcttaaatgtaagttacctttgtcatttaataacaaaggaaacacctgacagattaacagaccaaatcaaatgttttgagaaattcattgaacccaaaattgattttaactgtgttatagtcaacccatctttaaatggtcaactgacagaagctcaagaaggaatgatgttggacgggctggataaattttattcaaagaccctcaaagactgttctgacaccaaattaccaggggtcagcaatgaactgttgagttattgcatctcattatttaataaaggaaagctaaaagtcacaggtgagcttaagaacgacccattcaagccaaacattactagcactgctttagacctctctagcaataagagcgtagtagtaccaaaactagatgaacttgggaatgttctttcggtatatgatagagagaagatgatttcttcatgtgtttcttccatggcggaaaggttcaaaacaaagggaagatacaacattgatccaagtacattagattacttgatactaaaaaacttaaccgggcttgttagtattggttctaaaacccagagagattgtgaagagctgtcaatgatgtttgaagggttgacagaagagcaagcagaagctttcaatgatataaaaaattccgtgcaattagcaatggtcaaaatgaaggactccaaatctggagatgtcaatctaagtccgaatcaaaaggaaggcagggttaaaagcagcacaggtacacttgaggaactttggggtccttttgggattatgagagagattaggacagaggtctcacttcatgaggtgaaagactttgatcctgatgtactcgcttcagacttgtataaagaactatgtgatgtggtctattactcctcaagcaaaccagagtatttcttggagagacctttagaagtttgtcctctaggattgcttttgaaaaatctcactacttctgcatattttgatgaagagtattttgagtgcttcaaatacttattgatacaaggtcattatgatcaaaaactaggaagttatgaacataggagtagatcaaggcttggtttcactaatgaagcactgagagtgaaagatgaagtaagacttagcatgagagagagcaattctgaagctatagcagataagttggataggagttattttaccaatgctgcactaaggaacctgtgcttttactctgatgattctcctactgagtttaccagtatcagttcaaataatggtaacttaaagtttggcttaagttacaaggagcaagtgggttccaatagggaactttacgttggggatcttaacactaagctgataacaaggttagttgaagactttgcagaggcagttggcagttccatgagatatacatgtctcagttcagaaaaagaatttgatagagccatctgtgacatgaagttagcagtgaacaatggtgacctatcatgttctcttgatcactctaaatggggaccaaccatgagtcctgcgcttttcttgacattcctccaatttttggaacttaggaccccaaaagaaaggaacattattaatcttgaaccagtcttaaatgtgctgagatggcacctccataaagttatagaagttccagtaaatgttgctgaggcttactgtactggcaatctaaagagaagcttagggttgatgggttgtggtagctcaagcgtgggagaggaattcttccaccaattcatgccagtccaaggagagataccaagtcacataatgtctgttctagatatgggccaaggcatcctgcataacatgtctgatttgtatggattgataacagaacagttcttaaattatgtgctagatttactatatgatgtcattccaacttcctacacttctagcgatgaccaggtcacacttatcaaattgccttgtgcttcagatgataatcaagttaatgatgagtggttggaaatgttgtgttttcatgagtacctctcctcaaaattgaacaaatttgttagccccaagagtgtagcgggcacctttgtagctgaattcaaatcaagattttttgtgatgggggaagaaaccccgctattaactcaatttgttgctgcagcgttgcacaatgtgaaatgcaaaacaccaacacagttgtcagaaacaatagacacaatctgtgaccagtgtgtcgcaaatggtgttagtgtccaaattgtctcaaagatctctcaaagggtgaaccagctgatcaaatactccggcttcaaggaaaccccttttggtgctgttgagaaacaagatgtaaaagattgggtggatgggacgaggggttatcgattgcagaggaagattgaatcaatattttctgatgatgagatgacaggcttcattagaagctgtgctaaaagggtttttaatgatataaaaagaggcaaagtttttgaggaaaacctgatcagtcttattggtagagatggtgatgacgcccttgtggggttcttgcgttattcaagttgctcagagcaagatattatgcgtgccttaggctttagatgggtgaatttgtcaagttttggtgacctaagactagtattgaggaccaagttaatgacgagcagaagggttcttgagagagaagaggtgccaacactgattaagacattgcagtccaggttgtcaaggaacttcacaaagggtgttaaaaagatcttagcggagtccataaacaaatctgcattccagtcttcagtggcatctggttttataggtttttgtaaaagtataggcagcaaatgtgtcagagatggtgagggcggtttcctttacattaaagatatttatacaaaggtgaagccctgtctgtgtgaggtgtgcaacatgaaaagaggtgtgatttattgcagaccctcactggaaaaaattgaaaaattttccaaacctattctttgggattacttttctttagttttgaccaatgcctgcgaaataggggagtgggtattctcatctgtgaaagagccacagattccagtggtgttaagtaacaggaatttgttctgggctgttaagcctagaattgttcgtcaattagaagatcaactgggtatgaatcatgtattgtattccattcggaaaaattacccgaaattatttgatgagcacttgtctcccttcatgagcgatttgcaagtgaacagaacactggatgggaggaagctgaagttcttagatgtttgcatagcattggatttgatgaatgagaatctaggaatcgtcagccacctactgaaagccagagacaatagtgtctacatagtcaaacagagcgactgtgccatggcacacgttaggcagtctgattacgtagataaggaagttggactgagtcctcaacaggtttgttacaacttcatggttcaaatcatcctatcatcgatggtgaaccctttagtgatgtcaacttcttgcctaaaatcgtttttttggtttaatgaagtattggagctggaagatgatggtcagattgaattgggtgagttaacagatttcaccttcttagttagggatcagaagatcagtagagcgatgtttattgaagacatagcaatgggttatgtgatttcaaatcttgaagatgttagattgtacattgacaaaatcacaattggagagcaaccactggctccagggagacacatcaatgacttgctggatcttcttgggaactttgatgaccatgaggattgtgacttgaggtttttgatccaggtggagcattctagaacatcaactaagtacaggtttaagaggaaaatgacttactcatttagtgttacatgtgtttctaaagtcattgatcttaaagaagcaagcgtagagttacaggtggtggatgtgacgcagtcagtgtcagggtcggggggaagtcacctcttgttggatggagtttccatgattgcaggacttccgatattcacaggtcaaggcacttttaatatggcttccctgatgatggatgcagatcttgtggagacaaatgacaacctaattctgacggatgtaagattcagctttggtggatttttatctgaattgagtgacaagtatgcctatacactcaatgggccagtcgatcaaggggagccattggtgttaagagacggccacttttttatgggaactgagaaagtttctacttacagagtggagttgactggtgatataatagtgaaggcaattggcgcactggacgaccctgaagatgtgaatgctttgttgaaccaactctggccctatttaaaatcaactgcacaggtgatgctattccaacaagaggactttgtccttgtctatgatttacatagatctggcttgatcaggtccctggagttgatcggggactgggttgaatttgtcaacttcaaggttgcatacagtaagtccctgaaagaccttgttgtatctgacaaccaggggtccttgaggttgagaggcattatgtgcagacctctagctaggagaaacacagtggaggacattgagtag

SEQ ID NO: 12706 - DNA, 99 bp, unidentified; identical to SEQ ID NO: 4228
  source 1..99: mol_type = other DNA
  misc_feature 1..99: note = Synthetic

SEQ ID NO: 12707 - DNA, 6657 bp, unidentified
  misc_feature 1..6657: note = Synthetic
  source 1..6657: mol_type = other DNA
gtggatcctaggcggcacttgagcatggaggaatcagtaaatgaaataaaaagccttattagaaagcattttccagaaagacaggagctagcataccaaagggacatctttttatctcaacatcaccccagctctctgttgttggaagggttcaaacttctgtcaagtttagtagagcttgagtcctgtgaggcacacgcctgtcagatcaattcagatcagaagtttgttgatgtgatcctgtctgaccatggcatactatgtcccacccttccaaaagtcattccggatggtttcaaactcacagggaaaacactcatcctattggaaacctttgttagggtcaatcctgatgagtttgagagaaaatggaagagtgacatgtcaaagctcttaaacctaaagtccgacctactaagggcagggattacgttggttcctgtagttgatggcagatctagctacagcaatagattccttgctgattgggttgttgaaagagttcggtggttgctgatcgacatcctaaagaaatcaaaatttatgcaagagattaatattgaagaacaagaataccagcgattgatccatagtttgtccaacacaaaaaaccagagcttgggattagaaaacatcgaatgcttgaaaaagaattctttgggttatgatgagaggttaaatgaatccctctttgttggggttagaggagacattagagaatctgtcataagagaagaactcataaagttaaggttttggtttaagaaggagatttttgacaagcagttggggaaattcaaattttcacaaaagtctaagcttataaatgacttgatcttattaggaagccacaaagacagtgatgtgcccagctgccctttttgtgcaaacaagttgatggatgtagtctactctatcgcattgcatccaatagatgaagtcaacatggaaagccagtcagatgagaattctatatctattgatgctgtagagaggtgttatcttcaagccctttccgtgtgtaacaaagtgaaaggtctaaaagttttcaacaccaggagaaacactttactgtttctggacttagttttactcaatttactttgtgatcttttcaaaacgcatgatgatgcaattgtaaggctaagaaatgcgggaatagttgttggacaaatgttaatgttagtcaatgacagacttctagatattctggaggcgattaaactaataaggaagaaattgatgaccagccccaagtgggttcaagtgtgttccagaacattgaagaactctcatcaagatctctggtcacagctggaaaaactaataaaacaccctgatatggatagcttgatgattttagctcaggcacttgtttctgacagaccagtgatgagatatactattgacaaggaatttgagaaaatctgtagacatcagccattcagcagcttagtggaaggtgagcagaagaaattatttaggattttgtcctccatttcccttgcattggtcaactcgatgaagacatcattttcctcccgattgttaatcaatgaaagagagtattctagatattttgggaatgttagactaagagagtgttatgtacaaagatttcatctgacaaagaacacatttggtctcttgttttaccaaaaaacaggtgagaagtcaaggtgctattctatctatctatccatcaatggggtattggaagaacaaggctctttttactgtgatccaaagagatttttcctgcctatattttcggaggatgtgttaattgaaatgtgtgaggaaatgaccagctggttggattttagccacgaactcatgacaatgacaaggccaatattaagattgttagtgttagctgtactctgttccccttccaaaaggaaccagacatttttacaaggtctaagatatttcttgatggcatatgcaaatcaaatccatcatgtggatttgatgtcaaagttaagggtcgactgcatgtctggatcagaggtgctgattcagaggatggctgtggaacttttccagacaattttgggtgaaggggaagatgcagatctttactttgcaagaaggtttaaatatctattaaatgttagttatctgtgtcacttggtaaccaaagagacacctgatcgcctgacagatcaaataaagtgttttgagaagtttattgagcccaaagtcaagtttgattgtgttgttgtaaacccccctctaagtgggagtctaacactggaacaagaggacaccatgataagaggattggacagattcttttccaaagaggctaagacttcctcagatactcaaattccaggagtgtgtaaagagattttgtccttctgcatttctctcttcaatagaggaagacttaaagttacaggtgaactgaaaagcaatccctacaggcctaacatcactagcacagctctggatctgtcaagcaataaaagtgtggtaatccccaagctcgacgaacttggaaatattctttctgtttatgataaggagaaacttgtttcaacatgcgtttctactatggctgagaggtttaaaacaaaaggcaggtataatcttgatcctgattccatggactacttaatattaaaaaatctaacaggtcttgtgagcaccggttcaagaaccagaaccaatcaagaagaattatcagtgatgtatgagagtttaacagaggatcaagtaagggcctttgagggtattagaaatgacgtacaaatgacactagccaagatggctaatagtgaggggacaaaagttgagatcaccaagttgaaatcaaagaatctatctgttgatgagcgagagtctcttgagtcattgtgggccccttttggagtgttgagagagattaaagcagaggtgtcaatgcatgaggtgaaggattttgatccagatgtgctcaggtctgatgtgtataaagagttatgtgatgctgtttatctatctccatttaaattgacttattttcttgaagcaccgcaggacatctgccctttgggtttgttattaaaaaatttgacaacaatagcctaccaagaagatgaattctttgaatgcttcaagtatcttttaattcaaggacattatgatcagaaattgggtagttatgagcatagaagtagatctagattgggcttttccagtgaagttctgagactaaaggatgaggttcggcttagtaccagggaaagcaattctgaagccattgctgataagctagacaaaagttattttacaaatgcagccctacggaatttatgtttctattcagacgactctcctacagagttcacaagcatcagctcaaatacagggaacttgaaatttggactaagttataaggagcaggttggctcaaatagagaactgtatgtgggagacctcaacactaagctgatgaccaggttagttgaagacttctcagaagctgtgggtagttcaatgagatacacatgcttgaattcagaaaaggaattcgaacgtgcaatctgtgatatgaaaatggctgttaacaatggtgacttgtcctgttcatatgaccactccaaatggggaccaactatgagcccagcacttttcctttcttttttgtacacattagaattgaagaatcccagagatagaacaaaggtgaatcttgaaccagtaatgaacattctcaaatggcatcttcataaggtcgttgaagttccaattaatgttgcagaagcctactgtgtagggaaattgaagagatctttaggtttaatgggttgtgactgtactagtgttggtgaagagttttttcaccagtatctgcagtcaagggaccaggtccccagccatataatgtctgtcttggacatgggccagggaatcttgcacaacacatcagatttatatgggctaattactgaacaatttctgtgttatgcacttgacttattgtatgatgtgatacctgtcacttatacctccagcgatgaccaggttagccttataaaaattccttgccttagtgatgaaaagtttcaagacaggacagaactgctggaaatggtgtgcttccatgaattcttatcttctaaattaaacaagtttatcagcccaaagagtgtgataggaacttttgttgctgagtttaagtcaagattttttgtcatgggtgaagagactcctttactcaccaagtttgtgtctgctgctctacacaatgttaagtgtaaaactccaacacaactgtcagagactatagacacaatttgtgatcaatgtattgctaatggggttagcactcatatagtgtcaaagatttccattagagtcaaccaattgattagatactctggatacagagagactccgtttggagctattgaagaacaagatgtcaaagactgggttgatgggtctagagggtaccgtctacagaggaaaattgaagctattttttctgatgataaggagacaatgtttataaggaactgcgcgaggaaagtgtttaatgacattaagagaggcaaaatctttgaggaaaaccttatcaacttgataagcaggggaggggatgaggctttatccggattcctgcaatatgccgggtgtagtgaagatgaaatcagacaaactctagactacagatgggtcaatttagcgagctttggggacttgaggttggtcttgaggaccaaactcatgacaagtcgaagagtgttagagaaagaagagatgccaacattgataaggacaatacagtccaggctgtcaagaaatttcacaaaaggcgtgaagaagatcttggcagagtcaatcaacaaatctgcatttcagtcttctgttgcctcaggcttcattgggttttgtaagagtatggggagtaagtgtgttagggatggtaaaggcggatttctgtatataaaggacatatttactcgaataatgccatgtctttgtggaatttgtgagagaaagcctaaagttatttactgtcaaaaatcacttaaagaagttaaccaattttctaaaccaattttgtgggattacttctctttggtgctgacaaatgcctgtgagttaggggagtgggtgttttctgctattaagagtccacaggcccctctggtcttatgtaataagaatttcttctgggctgttaaacccaaagcagtacgacagatagaagaccaattaggcatgaaccatgtattgcattctatacgaagaaattaccccaaactatttgaagaacatttggcaccctttatgaatgatcttcaagtgaacagatctttggatagtggaagactcaagtttctagatgtctgtgtggctctagacatgatgaatgaaaacttagggattataagtcacttattgaaagtaagagataataatgtttatattgtgaaacagagtgattgcgcttcagcccatgttagacagtcagagtatacaaattgggaagttggcatcagcccacagcaagtttgcaggaacttcatggtgcaagttgtcttatcttcgatgataaacccactagtcatgtcaacatcgtgtctcaaatccttcttttggttcaatgaagttctagatctagaagatgacagtcaagtagatctagctgaactcacagattttaccttgtcaattaggaataataaagtatcaagagcaatgtttgttgaagacattgcaatgggttatgtagtttctagctttgataatatcaaggttttccttgagggtgtctctgttgacaacatctccttgttgcctcaggaagacatgatggacctgcacactgtgttgcgcaatgttgcttgccaagaagctgtgaaactaaaattgatcattcaagtagaacacacacgagtttcgacaaaatttaaacttagaagaaagatggtgtacagttacaccattgtcagttcactaggagtggatgatgtcggtacccctgaattagagctgaatgtggatgcaatgagtcaatgtgtttctgggtctgagggaagccactcattgttggatggtgcactggttatcgctagcctaccattgttcacaggccatgagagctttgacctagctggcttgtttattgatgcaggctacgctgcgacaaatgatgacaatattctgagccatgttaagttcaactttggtgacttttattctgaactaagtaacaagtatgcatatgacctcattgggccagataacccaggagaacctcttgtcttgaaagagggtatcttttacagaggtaatgaaaggttgtcaacatatagagttgagttgtctggggatgtcatagtcaaggcaattggagcactagaggacattgatagtgtggaaaccttattaagccaactatggccttatctaaaaacaacatcacaaacaatattatttcagcaagaggactttgtcctcgtttatgatctacacaaagagcagttgatccgttcacttgataaatttggtgactggttggaattctcaaatttcaaggtggcattcagcagatctttaaatgacctgctgatatcagatccccaagggcagttcagattgaaaggggtgacatgcaggccactgaagcacaaagtcgagatcaaagacattgactaa

SEQ ID NO: 12708 - DNA, 36 bp, unidentified; identical to SEQ ID NO: 4232
  misc_feature 1..36: note = Synthetic
  source 1..36: mol_type = other DNA

SEQ ID NO: 12709 - DNA, 1500 bp, unidentified
  misc_feature 1..1500: note = Synthetic
  source 1..1500: mol_type = other DNA
atagtgattcagttaattttcagacatactcagaacccgatcatggggcaactgatctccttctttggagagattccaaccattctgcaagaggctctcaacattgcactcattgcagtcagcatcattgcaaccatcaagggtgtcgtgaatgtctggaaaagtggtctcatccagctgctcatgtttgttatgttggctgggaggtcatgctcagtgcagatagggcatcaccttgaacttgagcatataatactgaatagttcttcaatcctaccattcaccccaaccctttgcaaactaaacaagacttacttccttgtgaggggacccttccaggctcactggggggtcgatcttgcaataggcagcacaacggttgcagttgaaaatgcaacgaaaacctacaccctgaagtctaaaaactttacaggctgtttcgagggcaaccccgatccagattcagcagcactactggttacttggttgttcaacagtctgcaccatgattacaaaaatgacccatcaattctgtgtgagcgtgtgagtggggagaattcttttcgattccagatcaacataagtgaaccagagtactgtgagaaaattctctctaggatggccaacctatttggcagctttgaaaactactgcttaaacaatagacacattaaaaaactgataatcatcagaaaccttacatggagtcagcagtgtcacgagaatcacatgagtgccatgcagcttataacctccaatatccacacccaggttgtgagagccaggaggattctcagtttcttcacctggtcgttgtcagatgctgtgggaaacgacatgccaggagggtattgtttagaaaaatggatgctgattgccagccaactaaaatgttttggcaatactgctgttgcaaagtgtaacttgaaccatgattctgagttttgtgacatgctcagactttttgacttcaacagaaaagcgattgagactctgcagaacaaaacaaggagccagctaaatatagctattaatgccatcaactccttaatatctgacaacctgttgatgaagaatagagttaaggaattgatggatatacccttttgtaattacaccaaattttggtatgtgaatcacacaaaattgaaccaccattcacttcccagatgttggttagtgaaaaatgggagttacctcaatgaatcagagtttagaaatgattggcttcttgagagtgatcacctcatctctgagatcctgagcagagagtatgaggagaggcaggggcggacacccctatcattggtcgacgtctgcttttggagcactttgttttatactgcatctatctttctccatttgatcagaattccaacacacagacacatagttggtgaaggctgtccaaagccccacagacttagggcagattccacctgtgcatgtgggttatacaaacaaaaaagaaggcctcttaagtgggttaggtccaactaa

SEQ ID NO: 12710 - DNA, 48 bp, unidentified; identical to SEQ ID NO: 4234
  source 1..48: mol_type = other DNA
  misc_feature 1..48: note = Synthetic

SEQ ID NO: 12711 - DNA, 33 bp, unidentified; identical to SEQ ID NO: 3211
  source 1..33: mol_type = other DNA
  misc_feature 1..33: note = Synthetic

SEQ ID NO: 12712 - DNA, 1443 bp, unidentified; identical to SEQ ID NO: 12109
  source 1..1443: mol_type = other DNA
  misc_feature 1..1443: note = Synthetic

SEQ ID NO: 12713 - DNA, 1440 bp, unidentified
  source 1..1440: mol_type = other DNA
  misc_feature 1..1440: note = Synthetic
atgggacagttaatcagtttctttcaggacataccgatcttctttgaagaagcactcaatgtagccttggctgtggttacactgcttgctattataaagggcattgtgaatgtttggaaatcaggaattcttcagctgtttgtgttcttggttctggcgggaaggtcatgctctttcaaagttggtcatcatacaaattttgagtcatttacagttaagctaggaggtgtcttccatgaattaccttcactatgtagggtcaacaactcttacagtctaattaggctttctcataacagtaatcaggcattatcagttgagtatgtggatgtgcaccctgtcctctgttcgtccagtccaaccatactcgacaactacactcaatgtataaaaggctctccagagtttgattggattcttgggtggacaattaagggattgggacatgactttttgagggatccaagaatctgctgtgagcctaaaaagacaactaatgctgaatttacattccaattgaatttaacagatagtcctgagacccatcactataggagcaagattgaggtaggcatccgacatttattcgggaactacataactaatgatagctattcaaaaatgtctgtggttatgaggaacactacctgggaaggtcaatgctcaaatagtcatgtgaatacactgagatttcttgttaaaaatgcaggttaccttgttggaagaaaaccactggcattttttagttggtcactttctgacccaaagggtaatgacatgccaggtggttactgtcttgaaaggtggatgttggttgctggggatttgaagtgctttggcaacacagctgtcgccaagtgtaatttgaatcatgattctgagttctgtgacatgttgaggctgtttgatttcaataagaatgccattgaaaaactgaacaaccaaactaaaactgctgtcaacatgttgactcactcaataaatagtctaatatctgataatttattgatgagaaacaaactgaaggagattttgaaggtcccatattgcaactacacaagattctggtacataaaccacacgaaatctggtgagcactcactgcctcggtgttggctggtcagtaatggttcctatttgaatgagagtgattttagaaatgagtggatcttggagagtgatcacctaatagcagagatgttaagcaaagaataccaagataggcaggggaagactcccctaacactggttgatctatgtttctggagtgcaatctttttcaccacaagtctctttttacacctggttgggttcccaacacatagacatatacagggtgacccgtgccctttgcctcacaggctcgatagaaatggtgcttgcaggtgtggcaggtttcaaaaacttggaaaacaagtaacctggaagagaaagcattga

SEQ ID NO: 12714 - DNA, 1725 bp, unidentified
  misc_feature 1..1725: note = Synthetic
  source 1..1725: mol_type = other DNA
aagcctccaacaatgtccaattcaaaggaggtgaagtccttcttgtggacacagagcctgaggagagaactctcagggtactgctccaacataaagatccaagtcatcaaggatgctcaagcacttcttcatgggctggacttctctgaagttgccaatgttcaaaggttgatgagaaaggagaagagggatgactctgacctgaaaagattgagggacctaaaccaggcagtgaacaatctagttgagttaaagtcagtccaacagaagaatgttttgagagtggggacactaacctctgatgacctcctcgtccttgctgccgacctggacagactcaaagcaaaagtcatcagaggtgagaggcctcttgctgctggagtctatatgggcaacctaacagctcagcagctagaacagaggagggttttgttacagatggtcggaatgggtggcgggttccgggcaggaaacactctcggagatggcattgttagagtgtgggatgttcgaaacccagagcttttaaacaatcagtttgggacaatgccaagcctgacgattgcttgcatgtgcaaacaagggcaggcagatctgaatgatgtgatccaatcgttgtcagacttggggcttgtgtacactgcaaagtatccaaacatgtctgacttagacaaactctctcagacccacccaatcttggggatcattgagcccaagaaaagtgccataaacatatcagggtacaattttagcctgtcagctgcggtgaaagctggtgcttgtctaatagacggcggaaacatgctggagaccatcaaagtaacaaaatccaatttggaaggaattttgaaggctgccttgaaagtcaagcgttctttgggaatgtttgtctctgacacgccaggggaaaggaacccttatgaaaatctcctctacaaactatgtctttctggagagggttggccttacatagcatcaagaacatcgatcgtcggcagggcttgggataacacaactgttgatctgagtggtgatgtgcaacagaatgcaaagcctgacaaaggtaactccaacagactcgctcaggcccaaggcatgcctgctggtttgacctactctcagacaatggaactcaaagacagcatgttgcaattggatccaaatgctaagacatggattgacatagaagggagacctgaagaccccgtggagatagctatctatcaacctaataatggtcagtatattcatttttacagggaaccaacagacattaaacaattcaaacaagactccaaacactctcatggcattgacatccaagacctattctcagttcagccggggttgacaagtgctgtaattgagagcctgccaaagaacatggtcttgtcgtgtcaaggtgctgatgacatcagaaagcttcttgactcccagaacaggagggacataaaactgattgatgtgtccatgcagaaagacgatgcaagaaaatttgaggataagatctgggatgaatacaaacacctttgtagaatgcatacggggattgtaacgcaaaagaagaagagaggtggcaaagaagaagtgacaccacactgtgcattgctggattgtctcatgtttgaagcagcagtcatagggagtccacaaattccaacccccagaccagtcttgagtagagacctggtgtttagaacaggtcctcccagagttgtcctgtaa

SEQ ID NO: 12715 - DNA, 51 bp, unidentified; identical to SEQ ID NO: 4238
  source 1..51: mol_type = other DNA
  misc_feature 1..51: note = Synthetic

SEQ ID NO: 12716 - DNA, 1737 bp, unidentified
  misc_feature 1..1737: note = Synthetic
  source 1..1737: mol_type = other DNA
gtggtacccacgggatcttctcaactacttcaattgaccatgagtgatcagtcagtgccatcattccggtgggttcaatcccttagaagggggctgtctgcatggacaaccccagttaaagcagatgtgctcaatgataccagagcccttttgtctggtcttgacttctcaaaggttgcaagtgtgcaacgcatgatgagaagagagaagagggacgacaatgacctgacaaaccttagggacttgaacaaggaagtggattctttaatgacaatgaggtcatcacagaaaaatatgttcttaaaggttgggtctctgtcaaaagatgaactaatggaactctccagtgatctcaataaattaaaggagaaggttcagagatcagagagaataagtgggagcagtggtgtgtatcaaggcaatctcaccacaacacaacttactagaagatcagagattcttcagctagttggcatccaaaggcctggactgaatagaaggggaggtgttgttaaaatttgggacatcaaagaacccgagcactctctcatcaaccaatttggatcaacccctgcagtgaccatctcctgcatggcagaacagggaggagagactttgaatgatgttgttgcaaggcctaacagatctgtgggctactttacacagcaaagtttcctaatctgggtgacttggagagccctgtccagtaagcactcctgtctcaaagtgatcacccaagaagagtcacaaataaacatttctggctttaacctgagtctctctgctgctgtgaaggcaggcgcatgtttggttgatggcgggaacatgcttgagacaataaaagttgaagaatcaaccttcacaacaatcatcaaaacactattggagataaaatcaaaggaaaggatgtttgttgatatcacgccaggtcagagaaatccatatgaaaaccttctgtacaagctttgtttgtctggagaggggtggccatatatagcgtcacgatcacagatcaagggtcgagcttgggacaacactgtcattgagtttgatgtctcaccaagaaagccgccggttcctatcaggaatggtggctcacctgtgctgacaacattgaagcctgaagtagaggagcagatcaaaaggtcaattgagtccctctcagttcatgacactacatggattgacattgagggaccaccatttgaccctgttgaaatggcaatttaccagcccgactcactaaaatacatccactgctaccggaaacctaatgatgtcaaatcttttaaagatcaaagcaaatattgccatggaatcctgctaaaggatattgagtattgctcgtccctggcattatatcagccatcattaagacatcttcctaagtccatggttttcacagctcagggaagtgaggatataaggaggctctttgatatgcatggtagacaagatttaaagattgttgatgttaagttcacagctgagcaatcaagagtctttgaagaactcacttggaagaggtttgaacatctatgtgacaaacataaaggaatagtcattaagagcaagaagaaagggaccacaccagcaagtaccaatgctcactgcgcgttaatggattgcattatgtttagtggtgttttgttgggagcaatccctaatgataaacccagaaggcttctaccactagacatcttattcagagaacctgacacaacagttgttctctag

SEQ ID NO: 12717 - DNA, 1512 bp, unidentified
  misc_feature 1..1512: note = Synthetic
  source 1..1512: mol_type = other DNA
gtgaccctcttccaatcgatcccagagatcatagaggaggcagtcaacattgctctcattgctgttgcaataatgtgcattgttaaaggcactgtcaacctatggaagtgtggtattgtccaactgtgcatctttctactgttggcagggaaaagatgtgatgggtttcaaattgataggaggcacaaactggagtcagttgagttcaacctcaccagaatgttcaacaacctcccaatgtcctgtagcaaaaacaacactcaccattactacaaggggccagagggaacaaactgggggattgagttgaccttgaccaatgaatctgttgctaattactctaatatgtcagccataaggagccttgcatatggaaacataaccaactgtgataagactaatgaagcaggtcataccttaaaatggttgctaaatgagctacactttaatgtactacatgtgacacggcacattggtgcaaggtgcctaactacagactcagcgggcatactcatacagtataacttgactgtaggagattatggaggtgaggttgggagacacttaattgcttcactagcacaaattataggggatgacaaagcagcgtgggtgggcaaatgcttcaacaactgttccgcaaatggtacctgtcgacttaccaactgtgaaggctacacacattacaattacctaataattcaaaatacaacatgggaaaatcactgtagttactcaccaatgtctactatcagaatggcactaaacaaagttgcttacagttctgtttcaagaaagctactgggctttttcacttgggacatatctgattcatcaggaaggcatgtgccaggtggctactgtcttgaacaatgggcacttgtctgggcaggtataaaatgctttgacaactcagtgatggcaaaatgcaacaaagaccataatgaagagttttgtgatactatgagactctttgacttcaaccaaaatgctataaaaactttacaattgaacactgagaattccatcaatcttctgaaaaggagtattaacggtttgatatccgattctcttgttataagaaacagtctcaaacaattggctagaattccttattgtaattacacaaaattctggtatgttaatgacacaatcactaaaagacatagtcttcctcaatgctggctgacatacaacggaagttatctaaatgaaacccactttaggaatgattggctgctagaaagtcaacaactatacaatgacatgctagtcaaagaatatgaagagaggcagggaaaaaccccaattgcattgacagacatctgcttttggagcctagtttattttacagtctcagtcttcttacaacttgtagggattccatctcaccgacacattgtgggtcaaggctgtccaaaaccccatagaatctctagaaatggattatgtagttgtggatattataacatcccaatgaaaccagtgagatgggttaggaaaggcaaataa

SEQ ID NO: 12718 - DNA, 1710 bp, unidentified
  misc_feature 1..1710: note = Synthetic
  source 1..1710: mol_type = other DNA
atgagtgcctcaaaggaaataaaatcctttttgtggacacaatctttgaggagggaattatctggttactgctccaacatcaaactacaggtggtgaaagatgcccaggctcttttacatggacttgacttctccgaagtcagtaatgttcaacggttgatgcgcaaggagagaagggatgacaatgatttgaaacggttgagggacctaaatcaagcggtcaacaatcttgttgaattaaaatcaactcaacaaaagagtatactgagagttgggactctaacctcagatgacttattaatcttagccgctgatctagagaagttaaagtcaaaggtgatcagaacagaaaggccattaagtgcaggtgtctatatgggcaacctaagctcacagcaacttgaccaaagaagagctctcctgaatatgataggaatgagtggtggtaatcaaggggctcgggctgggagagatggagtggtgagagtttgggatgtgaaaaatgcagagttgctcaataatcagttcgggaccatgccaagtctgacactggcatgtctgacaaaacaggggcaggttgacttgaatgatgcagtacaagcattgacagatttgggtttgatctacacagcaaagtatcccaacacttcagacttagacaggctgactcaaagtcatcccatcctaaatatgattgacaccaagaaaagctctttgaatatctcaggttataattttagcttgggtgcagctgtgaaggcaggagcttgcatgctggatggtggcaatatgttggagacaatcaaggtgtcacctcagacaatggatggtatcctcaaatccattttaaaggtcaagaaggctcttggaatgttcatttcagacacccctggtgaaaggaatccttatgaaaacatactctacaagatttgtttgtcaggagatggatggccatatattgcatcaagaacctcaataacaggaagggcctgggaaaacactgtcgttgatctggaatcagatgggaagccacagaaagctgacagcaacaattccagtaaatccctgcagtcggcagggtttaccgctgggcttacctattctcagctgatgaccctcaaggatgcaatgctgcaacttgacccaaatgctaagacctggatggacattgaaggaagacctgaagatccagtggaaattgccctctatcaaccaagttcaggctgctacatacacttcttccgtgaacctactgatttaaagcagttcaagcaggatgctaagtactcacatgggattgatgtcacagacctcttcgctacacaaccgggcttgaccagtgctgtcattgatgcactcccccggaatatggtcattacctgtcaggggtccgatgacataaggaaactccttgaatcacaaggaagaaaagacattaaactaattgatattgccctcagcaaaactgattccaggaagtatgaaaatgcagtctgggaccagtataaagacttatgccacatgcacacaggtgtcgttgttgaaaagaagaaaagaggcggtaaagaggaaataacccctcactgtgcactaatggactgcatcatgtttgatgcagcagtgtcaggaggactgaacacatcggttttgagagcagtgctgcccagagatatggtgttcagaacatcgacacctagagtcgttctgtaa

SEQ ID NO: 12719 - DNA, 1710 bp, unidentified; identical to SEQ ID NO: 12718
  source 1..1710: mol_type = other DNA
  misc_feature 1..1710: note = Synthetic

SEQ ID NO: 12720 - DNA, 6669 bp, unidentified; identical to SEQ ID NO: 10803
  misc_feature 1..6669: note = Synthetic
  source 1..6669: mol_type = other DNA

SEQ ID NO: 12721 - DNA, 6573 bp, unidentified
  source 1..6573: mol_type = other DNA
  misc_feature 1..6573: note = Synthetic
atggaggaatacgtttccgaatttaaagacatggtaagaaaatgggttccagaatgggaagagttatctgagcagaagaataacgtgcttgcacaggttaaagacagagccatcacaatagaaggcctgaaactcttatccatgttggtagaggtggactcatgtaagaaacattcctgcagacacaacacaagaatgactgtcaatgctatccttagagagttgaaagtcacatgtcctacactaccggatgtcacaccagatggctactgcatggttggagatgtcctcatccttttggaagtgtttgtgaggaccagtcaagaagcatttgaaaaaaagtacaatcaggacttcttgaaattgatgcagcttagttctgatctcaagaggcagaatataactttagtacctgttattgatggtagatccagctattatgtggaatatattcctgattgggttgtagagaggcttcggtggttgctcttgaagcttatggatggactgaggacatctggtgaagaagttgaggaattggagtacgaacgccttataagttccctgtcatctttggaaaatcagagtcttggtttagaatcactacttgccgtgaaagaaagaggacttccttacaaggtgaggttagaaaaggcattggtgtcttgcattaataacaaattgacaacagatcaatgcagaacaaagatcatggaagtttttcagcaatttaaaatgttgcaactctctggccaacatgataggaaactgcaagctacagatagagaagatatgatctccaaactccagaaccatgaattcatccaatgttctatcaaagatatgcctaaatcagaaatcagattatgtgaattttgttcagtacatattttaggcataatagaccaacttaggcaatctgaaatcaggcacccatcaatcgaaagcaaagagtacttcagagtgctttcaatatgtaacaaaattaagtcccagaaggtttttaacacaagaaggaacactttattggttttggacctcatcatgtacaacatcttgtgtgacttagacaaatcttctccaggcactgtgttcagagaggtgctcttaatgcaagggctgccgtctgtaaatgacaggttaattaatgttgatttcttaatagagcaaatcaccaaaaaatttatcaaaaatcccagttggttggagaaagccaagaaaagactaagtctggtgtgtagtgaatttcctcttgatgacatcttgcctcttctaagggaaccagacattgaatactactttgatctaaaaacatcaatattagatgagtggggagccaagccttatcttcaatacaagactaagtcacggtgtatgtgtggaggtagaccagggagggggcaacctgattatgcaattatgggtgaaagtgagtttgaggagttgttgaaagcattgtcaagtctaagtttgtcactcattaacagcatgaagacagcagcagttcctaagatgaaagtgaacaatgctgatgagttttatggaaaggtctactgtgatgaagttttctttcaacgatttggagaagggggctctctcacactattgtaccaaaagacaggagagagatccaggtgttatgctgttgctttcagatccaaaagtggaggtttatatgagacaaaagcatcattttactgtgatcctaagaggtttttcttgccgatctttagtgcagatgtgattcaaagaacttgtgaagaaatgttgtcttggttagactttatgtcccaacccttgttggatttggtatctgatttgctcagacgtctcatcctttgcatactatgcactccttccaagcgtattcaaatttacttacaaggctttagatattatattatggcttttgtgaatgaagttcattttaaggaattgtttgagaaactgaaagttgttatgctaacaccttcagaatggcagacagcaatacttattgacgatctcatactcctagtactcaacaattcaagagaggaagatatggctaaaatctttaaatttgttctaaatgtatcctacttgtgtcatttcataaccaaggagacccctgatagattgactgatcaaatcaaatgttttgagaagttcttagaaccaaagttaaagtttgactcagtcctggtcaacccctccaacagtatggagctccctattgaggaggaagagaaaatggtgcatgacatggagagactactaagtaaaaagctggaatctaaatgcgaagggagaccagggatcaacaaggatgtgcttagtgtttgtctatcattgttcaacaatggctcactcgaagtgaaaccctcatcttcttgcgaccctatgaccccctccttcacaagcacagctctggacatgtccagcaataaaagtgtggtggttcccaaacttgatgaagttggtgaagttatcactgagtatgactactcttctattgtctctgctgttgttgtggaaatagttgaacatttcaaaaccaaaggtaagtacaagctggacccaaaagagataaacttcaaaattctaaagaggttatcatcattgattcaaataaagaaggagtcagtagagcctgatgagactgaggagctgttatcagaagatcagagtgattgtcttaaagagattgagactagagtttcgaaagtgttatctaaggttgacaccaatgtcaaacccgacttgaagactccgtgtccgttggagaggttgtgccctaaatccacaatggtaatcatcaaaagggaaacttcgcttcatgatgtgaaagactttgactacaacttattttcagctgaagtgtatgaagatcttgtgaatttgatttatgaggatgtcactgctagatcaatgtactttgcagacagactaatgaatccgtgtcctttggagtacttgataaagaacctcacactgaaggcttataaagaggctgattattttgagtgcttcaagtacatccttattgcaagcgattttgataatcgagttggaagatatgatcacaaaagtagaagcagacttggattcacagatgcagcactacaaataagggagacatcacgcattagttcaagagagagcaactctgaatcgatagctaaaagattagatcagagtttctttacaaactcatctttacgaaacctttgtttctattcagatgaatccccaacagagaggtctagtgtgtctactaatgtggggagattgaaattcggactttcttacaaggagcaagtaggtggtaacagagagctttatgtcggtgacttgaacaccaagctcacaactagacttattgaggattactctgaatccctcatgcagaacatgaggtacacctgcctgaacaatgaaaaggagtttgagagagcattattagatatgaaatcagttgtcagacaaagcggccttgcagtgtcaatggaccactcaaaatgggggccacacatgtcaccagtcatctttgccgcattattgaagggccttgagttcaatctcaaagatggatcagaagttcctaatgctgcgattgtcaacatattactatggcatatccacaagatggtagaagtgcctttcaatgttgtagaagcatacatgaagggcttcttgaaaagagggttgggtatgatggacaaaggagggtgcacaattgcagaagaatttatgtttggatattttgaaaagggtaaggtgccatcacacatttcttcagtcctggatatgggtcaaggcattttgcacaatacctctgatctgtatggcctaatcactgagcaattcattaactatgcattggagctctgctatggtgtgcggttcatctcatatacttcaagtgatgatgaaatcatgctgtccttaaatgaggctttcaaatttaaagatagagatgagctaaatgttgacctggtgttagattgtatggagtttcactactttttatcagacaaactcaacaaatttgtgagtcctaaaacagttgtggggacctttgcaagtgaatttaaatcgagattctttatttggtctcaagaagtccccctccttacaaagtttgttgctgcggccttacacaatataaaggctaaagcacctaaccagcaagcagatacaattgacacaatattagaccaatgtgtcgccaatggggtgtcaatagaggttgtgggggccattgcaaagcgaactttcagcatgattatctacagtggatttccaaatgatccattcttgtgcctagaagagatggatgtgctagattgggtcaacgggtcgagagggtacagactccaacgatcaattgaatcattgtttcctgatgatttgctactttcaataattaggaaggcatgcaggaagatattttacaaaatacaatctggagctctggaagaaagttatattgtaacaactcttcagcagtcaccggatgactgtttgaaacagttgttggagacttgtgatgttgagactgaggctattgaagatgctctagacatcagatggttgaatctaagggttcatggtgatctgaggttggtgcttcggaccaagttgatgagcaccacaagaactgtgcaacgggaagaaatacctagtcttgttaaatccgtacaatctaaattgtcaaaaaattacgttagaggagccaagaaaattttagctgatgctatcaataaatcagctttccaaagtagtgtggcatcaggattcataggagtctgtaaaagcatgggttcaagatgcgttagagcgaaaagggggattcaaatacatcaggatcacacaggtaagatcaccttacatcgtgattgtcaccactgtaatcagcgcaagggtgtttactgtaaagcagcacttagtgaagtgagtgagtactccagacctttaatctgggattattttgcacttgtgctgaccaatgcttgtgagctaggcaattgggtgtttcaaaaggctgaagtgccaaagatagtcactcacttaaataaccctaatcacttctggccaataaaaccaagtacacattctgaactagaagacaaggtgggcatcaaccacatactgtactcaatcaggagaaacttccccacactgtttgatgaacacatatcccccttcttgtctgacttaaacatgttgagactgtcatgggttcagaagataaaatttttagacctttgtgttgcaattgacataacatcagagtgtcttggtattgttagtcacattataaaacatcgtagagaagagttgtatattgtaaagcaaaatgagcttgcaatgtctcacagtagggagtctcacccactagagagggattcaaccttgagccagagagtatgtgcaaactttttaatacaaatcttgttcgagtctatgttggtgcctgtgatcatgtcaacgtctcaatttaaaaagtacttttggttcggcgaagttgagttattaccaaacaatgcacaacatgatttgaaacaattaacccaatttgtatgtgactgcaaaaagaacaacacctctagaacaatgaatctagatgacttggacgttggctttgttagcagcaacctgattttgtcctgtgccaatttgaatattagtgtattcattaatgaacttgactggatgaatagagatgactatgagaatatggagcaacacatcttagcatcaccctcggaaatcatccctattgagctcaacttgacattctcgcataaaagggtgagtcacaaatttagatatgagaggtccaccaattacatattaaaactaagatttcttattgaaaggggttcattgctggattcattagactgtgatggctatctactgttgaagcctcattctgtcgagtactatgttctcaatcctctgaaatcacataagcttgatggtgtgtcacttttagttttaaatcctctcatcaacgggaaagatgtgttagactttaatgatttgttagaagatcaagatgttcgtttcaagtcaaggtcagctgtattccagaaagtaaaactagatatgaaagactacttcaaggacctgaagaacaagttttcttataagttgattggtcctgatgttgggatgcaacctctgattttggaaaacgggttgatcaagaaggaacagagtgtttctagattggaagtgaatttggactcaaaggtggtcatcattcgactggaagcactggaacctgagaaaaggtcaaagttcattgctaacctcttccaatacctctcaagtgcacagtctcacaataaggggataatcatgactgagcaagacctaaggtacatgatcgagaactttcctgaagtcttcgaacatatgttgcatgatgctaaagactggttgaactgtggtcactttagcatagtaaaaagcaaaacactagggaccgtcatgattgcagatgaaaaaggacccttcaagatcaaaggaatcaggtgtcggaaattgttcgaagacaatgagtcagtggagatcgagtga

SEQ ID NO: 12722 - DNA, 6588 bp, unidentified
  misc_feature 1..6588: note = Synthetic
  source 1..6588: mol_type = other DNA
ttgactatggatgaaaagatcaattctttgaaagactttgtgagaaagcaggttcctgaaatacctgaactttcctatcaaagagaacttttgttatctcaggtggagatgggcatgattttaatggaaggctttaagttactttcctgtttagttgagatagagtcctgtaagaagaattcctgtgagcacaactcaagtcagaagtttgttgatgtaatcctatctgacaacggagtggttactccaactttgcctaaggtaattcctgatggctttagattttttaataaaacattgattcttcttgaaacctttgttagagttaaccctgaagagtttgaaaagaaatggaagcgtgatatgtcaaaattgttaacattaaaagaagatgttcagaaagcagggatcactttagtgccaattgtggatggaagatgcaattacaacaccaatctgatgccagattgggcaacagaaagatttaggtggttgcttattgacttgttgagggaatcaaggggtgattcaaagattgacatcgaggaacaggaataccagaggttggttcacagtttgtccaaaactgggaatcagagtttaggatttgaaaatattgagtgtctcaagagacattgtctcaattatgaaagtagactggatgagagtttattgacaggtttcaataatgatcttcgagaatctaaaatcagagaaggtttaataaaaatgaagaattggtatagaaaggaggtttttgttaaggggatgggtaattttgtcaaaactgacaaggcaaagctattgcaaagcttggaaagtctgggtttgcatgctaattctgggacttcagaatgtcctttttgctgttgtaaaatacttgatatttgttacaaattgatgcaaaaattaaagcatggtcattctttatctgaaggaattcctgatgagttcattgcaaaatcacagattgaaaaggaatatcttttggttctatcagtgtgcaataaaataaaaggaaaaaaagtctttaatactagaagaaacactctgttgttcttagatttaattatgctcaattttgttattgatgttttcgaaaataatcctactgagttgtgtttcttgaaggaatcaggactcatcatcggacaaatgttgctgttttcaaatgacagagtgttggatatcttatctgccaggaagcttttaaagaagaaattggaaattagtgcccactgggtgaagaaatgtaactcaattttaaaaagggcggaaccagacctttgggattatgtttcaaaatatatcacagaacctaagtttgatagccttacctcactagctgaagaattatgtactgagaggccggtcatgaggtacaaggtgcaaattcactcaggagatgggtgctcacacaaggaatttgaaaccttatcagagcaacagcagatttgtctttttaaatgtctttctcatgtgtctttgtcattaaccaattccatgaaaacctcattttcatccagattgttagtgaatgaggtggaccacaaaaaatatttcggcactgttagattgaaagaatgttatgttcaaaagttctttttaaccaatgagttgtacggacttttgttttatcaaaaaacaggtgaaagatcaaggtgctactcattgtacttgtcagataaagggcaactcaaagaggttggttccttttactgtgacccaaagcgattcttcctccccatcttttctgatacagtactcttgttaatgtgtgcagaaatggtgagctggctagatttttgtgaggaattagctagagaagtggaccctcttttaagactactggtgcttagcattctttgctccccttctaaaaggaatcaaactttcctacaaggactaaggtacttcattatggcctttgtaaaccaagctcaccatgttcaattgatgtctaaactagtagtagaatgtaaatctgcatcagatgtattaatacagaggctaagcgtgaggatgttccgaatggttttagattttggttcggatcctgatgcgtttatgtcaagaaagtttaaattcctactcaatgtaagctacctttgtcatctagtgacaaaggaaactcctgataggttaactgatcagataaaatgtttcgaaaagtttttggaacccaaattagaattcggtttctttgttgtgaatccctctctcaatggcacattgacgaaggaacaagaagatgccatggtgggtggcgttagcaaattcttttctaaggacatcttcaatatagaagatatgaaacagccaggggtttctagagacttgctgagttattgtttgacactgtttaacaaaggtaagctaaaagttaacggtagtttgaaggtgaatccatttagaccaagttttacaagcacagcattagacttgtccagtaataaaagtgttgtgataccaaagctagatgagcttggaaacattgtttctgtttatgacaagcaaaagctggtttcaacttgtgtggcatcattagttgagagatttaaaacaaaaggcaaattcaatctggacccgaatgagattgagtttttaatcatggataatctgacaaatttgctggctattaagggttctgctgtgaaagagagagaagagttgtctatgttatatgagcagctatccgacgatgccataaaggcttttgaagagttaagacaagatgtagaatttactcttgggagaatgagaactccagaaaaaaagaagaagacaacaaacttttatggcaattgtacattggagtccctttgggctccctttaatgtcatgaaggcgattagaactgagactagcattcatgaaatcagagactttgatcccaatattttgccacctgaaatttatgaagaattatgcacatctgtttttgaatcgtcactaaaggaatctttctttctaaatgaggttcttgatatttgcccactcgaacttttattgaagaacttgacaacaagatgtttcgaagaacaggagtttttcgattgctttaagtatttattaattcatgctgggtttgatcagagattaggtacatatgagcacaagagtaagtctaggttagggttatctgaagatgtgtttaagctgagagatgatgttagaatgagtcaaagggagagtaactctgaagccatcgcaaggaggcttgataaaagcttcttcaccagtgcagctttaaggaatctatgcttctattcagaagaatcccctacagaatacacttgtattagtccgaacactggcaatttgaagtttggtttaagttataaggaacaagttggttctaatagggagctttatgtaggtgaccttaatacaaaaatgatgacaagacttgtagaggattttgctgaagctgttgctaagtccatgaactacacctgtttaaactctgagaaagaattcgagaaggccatctgtgacatgaagatggctgttaatgctggggacatttgctgctcactagatcactcaaagtgggggcccttcatgagcccagccctctttctttctttcattaatgaattaaaattgaaggatcatgaaacaagtgctctgattgattgcagaccagttctaagtgttttgaggtggcatttgcacaaagctgttgaggtgccattcaatgtggcagaggcgtattgcaccgggatgctgaagaggagattaggtttgatgagcctacaatctcaatcagtgtctgaggaatttttccatcaacagttattaatggggaaggaagtgccaagtcatattatgtctgtgttagacatggggcagggaatacttcacaacctctctgatctttatggactgatcacagaacagtttttgaattattgtttagatttgctttttgatgtggtgcccatttcttacacatcaagtgatgatcaaataacaatgataaaattcccaactacaaatgcacctgaggggggggagagtcaatctgattggttagaagttctttgttttcatgacttcttgtcctccaagctaaacaaatttgtaagtcccaagagtgtttgtgggagttttgctgcagagtttaagtcaaggttttttgttatgggtgaagaaacccccttactcacaaaatttgtctcagcagcactccacaatgttaagtgcaaaacacctactcagcttgccgagacaattgatacaatttgtgatcagtgtgttgctaatggtgtaggggtcaccattgttggtgagatatcaaagagggttaataggttaataaaatactctggttatccacagactccctttttagctgtggaagtccaggatgtgaaagattgggtggatggttcaagaggttatagattgcaacgaaatgtggagaactgtctatctgatcatcctcagttagagcttataaggaaaagtgccaaaaaggttttaacaaagatcaaaagggggctcatatttgaagagcatttagttcagctgataggaaaaggtggtgacaatgcaatggaagctttcctctcttacatagactgttcggaaatagaaaaaagggaggctttgcgttatcgttggttgaatctgtcttccaatggagatctaagacttgtcttaagaaccaagttaatgtcagcaagaagggtactggaaaaagaacaaataccaactttaattaagacattacaatcaaagctttcaaagaatttctcaagaggtgcaaaaaagatattagctgaatctataaacaagtcagcctttcaatcgtctgtagcttctgggttcataggcttttgtaagagtatggggagcaagtgtgtcagagatgggagtggtgggtttttatacatcaaagatgtgatcagtaaggtgaaaatttgttcatgtgacatatgttctttggctccaggcattgttttctgtgatgaagcactagagaatgtctcaatgttctcaagaccaatactttgggattatttttctttggttttgacgaatgcttgtgaacttggtgagtgggtcttttcttgtgttcaaataccacctaaaccaactctattaagcaatcccaatcttttttgggcagtgaagccaagaggtgtgcgtctggttgaagatcagttaggattaaaccatgttctacaatctgtaaagagaaattaccctaaaatatttgaggagcatttggtaccgttcatgagtgatttgcaggtgagtcgaactactgatttcacaaaattaaaatacctagatgtttgcatagctcttgatatgatgaacgagaatcttggtataatttctcatttattgaaagggagagacaattcattgtacatagtgaaacaaaatgagtgtgcatctgcgcatgtaaggcaagttgaatatgttgactatgatgtaggtttgagtcctcaacagatctgttcaaattttaaaattcagttgaccttttcttcttttatcaacccacttgtgatgacaacttcaacattaagatcctttttttggtttggggaggttcttaggttggaagatgagaaccaaatagatgttggtgagttgacagactttgttttattgattaagaagtacaatgtggatagagcgatgatgttagatgatctaacaatggggtttgttgtctcagaaattggtgagccaaaattccgtttgttagattttgaatggtctggtgtcgaggaacaaacttcttttccactatctgaaaactcaaacaacaacgaaataaaatttacattgaatttgcagctggaacacaaaaggctttcaacaaaatatcgtctgactaggcttgttgtgtattcctacacaatggtctgcgtaatgttagttaatgattccagaggtgttttgaaagttgaaaacttgacgctgagggcctctggtgatgtgaaagagcatcggtttcttgatggggtaacgcttgtctctcatcatccaaccctatgtgggaaaagggggataaacattctggacttatttagggatgctgagttgcccatacctgaaacaagaatgtttcctgaagaagtgtttttggatctcagtgattatcaatcagaagttgaagacaagtatgcatatgaaatcgtgggtcccgaattttctgatgtgccattggttatgagtggaggatgtcttgttgtaggggataaaaaactgtcacacctgttgactgagctgacaggaaacgtcattttgaaggcattgggtgccctggagacagatggagagattggaagttttttgatgggattgtggccctacataaaggccacaaaacaaagggtgaaaatatctcaagaagaatttctttttatatatgagacacatagacgttcacttcttatgtcttttgaagcatataatgactggttagaatttttagattttagtgtgtgtttcagcaagaccttaggtgatctggttgtgtcggacagttctggcaatatgaggttaagaggagttgtttgtagacctctgcgtcaagtcggcacagtgatggagatagagtag

SEQ ID NO: 12723 - DNA, 297 bp, unidentified
  misc_feature 1..297: note = Synthetic
  source 1..297: mol_type = other DNA
attgcaataatggggcttaggtattcaaaggaagtcagggatcggtatggtgacaaagagccagagggaagaattcctattacattgaacatgcctcagactctttatggtagatacaattgcaaatcttgctggtttgcaaacaagggcctccttaagtgtagtaatcattatctatgtttaaaatgtctcacattgatgcttgggagatctgattactgtgggatttgtggcgaggttctgccaaaaaaactggtattcgaaaattcgccatcagcccccccatacgaggcctaa

SEQ ID NO: 12724 - DNA, 282 bp, unidentified
  misc_feature 1..282: note = Synthetic
  source 1..282: mol_type = other DNA
atgccgggacttaagtggccgtataacaccccgcgaagacgcggggtactcgcaacgcctgcgggggtcctggagggccgcgggggatcgataattcgccgctccctacagcgcacgacagtcattcccgcccggtctcgtcgttggtctacgctgtcccccacccacgcgagccgggcgtcatggcagaccgcggtctcccgtccgaggcccccgtcgtcacgacctcacccgccggtccgccctcggacggacctatgcagcgcctattggcgagcctag

SEQ ID NO: 12725 - DNA, 861 bp, unidentified
  misc_feature 1..861: note = Synthetic
  source 1..861: mol_type = other DNA
ctggcaaacggaaagatggcggacaacatgaccacaacacaaattgaggtgggtccgggagcaaccaatgccactataaactttgaagcaggaattctggagtgctatgaaaggttttcatggcaaagagcccttgactatcctggtcaagaccgcctacacagactaaaacgaaaattagaatcaagaataaagactcacaacaagagtgagcctgagaataaaaggatgtctcttgaagagagaaaagcaattggggtaaaaatgatgaaagtgcttctgtttatggatccctctgctggaattgaagggtttgagccatactgtgtgaaaaatccctcaactagcaaatgtccaaattacgattggaccgattaccctccaaccccaggaaagtaccttgatgacatagaagaagagccggaaaatgtcgatcacccaattgaggtagtattaagggacatgaacaataaagatgcacgacaaaagataaaggatgaagtaaacactcagaaagaggggaaattccgtttgacaataaaaagggatatacgtaatgtgttgtccttgagagtgttggtgaacggaaccttcctcaagcaccctaatggagacaagtccttatcaactcttcatagattgaatgcatatgaccagaatggagggcttgttgctaaacttgttgctactgatgatcggacagtggaggatgaaaaagatggccatcggatcctcaactcactcttcgagcgttttgatgaaggacattcaaagccaattcgagcagctgaaactgcggtgggagtcttatcccaatttggtcaagagcaccgattatcaccagaagagggagacaattag

SEQ ID NO: 12726 - DNA, 384 bp, unidentified
  source 1..384: mol_type = other DNA
  misc_feature 1..384: note = Synthetic
ctggcaaacggaaagatggcggacaacatgaccacaacacaaattgagtggaggatgaaaaagatggccatcggatcctcaactcactcttcgagcgttttgatgaaggacattcaaagccaattcgagcagctgaaactgcggtgggagtcttatcccaatttggtcaagagcaccgattatcaccagaagagggagacaattagactggccacggaagaactttatctcttgagtaaaagaattgatgatagtatattgttccacaaaacagtaatagctaacagctccataatagctgacatgattgtatcattatcattactggaaacattgtatgaaatgaaggatgtggttgaagtgtacagcaggcagtgcttatga

SEQ ID NO: 12727 - DNA, 39 bp, unidentified; identical to SEQ ID NO: 4255
  misc_feature 1..39: note = Synthetic
  source 1..39: mol_type = other DNA

SEQ ID NO: 12728 - DNA, 1131 bp, unidentified
  misc_feature 1..1131: note = Synthetic
  source 1..1131: mol_type = other DNA
atgtctagcgtgagcggcgtgcgcacgccgcgcgaacgacgctcggccttgcgctccctgctccgcaagcgccgccaacgcgagctggccagcaaagtggcgtcaacggtgaacggcgctacgtcggccaacaaccacggcgaaccgccgtcgccggccgacgcgcgcccgcgcctcacgctgcacgacctgcacgacatcttccgcgagcaccccgaactagagctcaagtacctcaacatgatgaagatggccatcacgggcaaagagtccatctgcttacccttcaatttccactcgcaccggcagcacacctgcctcgacatctcgccgtacggcaacgagcaggtctcgcgcatcgcctgcacttcgtgcgaggacaaccgcatcctgcccaccgcctccgacgccatggtggccttcatcaatcagacgtccaacatcatgaaaaatagaaacttttattacgggttctgtaagagcagcgagctactcaagctctccaccaaccagccgcccatcttccaaatttattacctgctgcacgccgctaaccacgacatcgtgccctttatgcacgccgagaacggccggttgcacatgcacgtcatcttcgaaaactccgacgtgcacatcccctgcgactgcatcacgcagatgctcacggcggcgcgcgaagactacagcgtcacgctcaacatcgtgcgcgaccacgtcgttatcagcgtgctgtgtcacgccgtctcggccagcagcgtcaagatcgacgtgactattttgcaacgcaagattgacgagatggacattcccaacgacgtgagcgagtcctttgagcgctacaaagagctcattcaggagctgtgtcagtccagcggcaacaacctatacgaggaggccacgtcgtcctacgcaatacggtctcccttaaccgcgtcgccgttgcacgtagtttccaccaacggctgcggcccctcctcctcgtctcagtccacgccgcctcatctccacccgccgtcgcaggcgacgcagccccaccactactctcaccaccagtctcagtctcagcagcatcatcaccgtccccagtcaccaccgccgccgctgtttctcaacagcattcgtgcgccttga

SEQ ID NO: 12729 - DNA, 297 bp, unidentified
  source 1..297: mol_type = other DNA
  misc_feature 1..297: note = Synthetic
atggggaaagcccagtccaaacaaaaccacatagcccaaggctctgagcccaggacggagctgatacctgacgcctcaggctatgggcctgagttctgcaaaagctgctggtttgagagaaggggtcttgtcaaatgttatgaccattatttatgcatgaattgtctgacattgcttcttacaatctccgacagatgcccaatctgcaagtatcctctgccaacaaaactgcagatcaacaaaacaccaaccgctcccaaagagtcggccagcaatcccccgccgtacagtccctga

SEQ ID NO: 12730 - DNA, 339 bp, unidentified
  source 1..339: mol_type = other DNA
  misc_feature 1..339: note = Synthetic
ttgtctttttttgaggccttgtgcgctgtacttctccaaatgggaaacaagcaagccaaagccccagaatcaaaagacagtccgagagccagcctgatcccagatgccacacatctagggccacagttctgtaagagctgctggttcgaaaacaagggcctggttgagtgcaacaaccactatctgtgtctcaactgcctcaccttacttctaagtgtcagcaacaggtgtcccatttgcaagatgcctctccccacaaaactgagaccatcagccgctccaacagcacctccaaccggagcagcggacagcatcagacccccaccctacagtccctga

SEQ ID NO: 12731 - DNA, 342 bp, unidentified
  misc_feature 1..342: note = Synthetic
  source 1..342: mol_type = other DNA
ctgcactcaaagccgcatccggcaagagtcatggggaaaacgcagtccaagggacagcccagcacaaatctcctcaaggagacagaaccaaggcatccagtaataccagatgccaggggaactggccctgaattctgcaagagctgctggttcgaaaggagggggttagtcaggtgcaacgatcactacctatgtttgaactgtcttacacttttacacacagtgtcagataggtgccccatctgcaaacacaaactacccttcagactagagctccagacccagccgacagcaccaccagaaatcccaccatcccaaaatcccccaccctacagcccctga

SEQ ID NO: 12732 - DNA, 201 bp, unidentified
  misc_feature 1..201: note = Synthetic
  source 1..201: mol_type = other DNA
atccccgtcccgaattaccgaggaagatcccgccgcaggagaggcatggcaggcagcggcctgaaccgccgccggcggcgggccatgcgcaggcgcctgagtggcggctttctgcccgcgctcatccccataatcgccgcggccatcggcacgatcccgggcatagcttccgttgcgctgcaggcgtcgcagcgccgttga

SEQ ID NO: 12733 - DNA, 21 bp, unidentified
  misc_feature 1..21: note = Synthetic
  source 1..21: mol_type = other DNA
atgagggtttatctactttga

SEQ ID NO: 12734 - DNA, 33 bp, unidentified
  misc_feature 1..33: note = Synthetic
  source 1..33: mol_type = other DNA
atgtgcagatacaaaatgagaattcatttatag

SEQ ID NO: 12735 - DNA, 153 bp, unidentified
  misc_feature 1..153: note = Synthetic
  source 1..153: mol_type = other DNA
acgcgtctttccgcgaagaataccatcagctccagccccacgccgcacagacccaggacgccgaacaccactgccgccgagatcgacagacccagcagcaccgacatcctcgcgcggacatccggctatttaatcgttctggaaacgtattaa

SEQ ID NO: 12736 - DNA, 1077 bp, unidentified
  misc_feature 1..1077: note = Synthetic
  source 1..1077: mol_type = other DNA
atgggggacaccgtatccaaggtggaggtgctcgacacgccgacgcccggcgagtacgcgctgcgcgtcacacacacgagcgccacggacaccttcgccttcgcggaagaaacagaaaccttctccgacccgaagctgaagaccgtacggccgcggttctgtctgctgccgaccatggaccccgggcagtgcgggcgcttcctctcgccagagctggcgagccgcgcgcggctcgtgcgaggcccgccctgcgactcgctcttcttccgcccgggctcgctgctgcgcgcagactacgttcccgagatcgcgaagccgtacctgcgccagggcaccatgtgtgtgttcgagataggcgcctcggcgccgcccacggacgccgccatggcgcgctgctgcacaaatccggggcccgggtgcccgtccgtgttcgcgaacgggtacaagaccgcgcactgcgacggcgtcatggccagccgctgcgcggtggagcctgacgcgcccgagtgcatggcctggctgcgcacgggccgctacgcggcgctggacacctacgcggcgctctgcgccaagcacatggacgcgcgcttctgctcggagttcgtgcgcgtggcgcggcccgcctccttcgccttcggcgactccgcgctgcggcgctactgcgacgcgcaccgcgccgcgccggagtgcgcttgcgtcgcaggcaccacgctcgggaagtacctgggcccgcgcgtctgccgcgcgcacgagtgcacggaccagtcgcgcgaccgcaagtggctcttcttcagccaggacgaacagcgctcgcggtgccgctacgtgggctgccgcatcgacgtagacagcctggtcatgcagaactcgcgcgcgcacatgatcgccgactgcggcaaggccgtgggcgcgggctatgcagacccggaccccggcgtgcgcgacaacgcgtccgcgaacctgcccgccgtgccgcccttcctggtggcggcgctcgcggctggcgtcatcttctacttcgtggctgtctactcgaggcgatccgtggaaaccaagaccataaatgtttctagatag

SEQ ID NO: 12737 - DNA, 6735 bp, unidentified
  misc_feature 1..6735: note = Synthetic
  source 1..6735: mol_type = other DNA
ctgaggaacaagtgtgtggtgatggaggagttgctgtccgagagcaaagatcttgtgagcaggtacctcttagaggatgagaggctttcaaaacagaagctagccttcctagttcagacagagccgagaatgctattaattgagggccttaagttgttgtcactctgtattgagatagacagttgcaaagccaatggttgtgagcacaactcagaagacctttctgttgaaatccttctgcagagacaaggtgttctgtgccctggtctaccatttgtggtgccagatggattcaaattcagtgggaacacattaatattactggaatgctttgtcaggacttcaccaataaactttgagcaaaagtataaagaagataccattaagctagagtctttaaagcctgacttatcatctgttgacatcattctgttgcccttgatagacggcagaaccaatttctacactgatttgtttccagaatgggccaatgagaggtttaggcatatcctatttagcttacttgaattctcgcagcagtcatcaaaaatgtttgaagaatctgagtactcaaggctttgtgaatctttaacaaaagcaggagtgagaacatcgggcattgagagcctcaatgttttgacagattctcgatctgatcattatgagagggtgttggagctctgccacagaggcatcaataacaaaatgtccattcttgatgtgaaaaaagagattgtatcagaatttcatgcttttaggaataagcttaaagagggtgagatagaaagacaatttgtcaggacagataggcgacagctcttgagagatttcaacaacctttatattgacagagagggggacacaccctcagagattgatcctctaaaagagaggtttgtaaaatcctcgcctatggtaacagcgctctatggtgactacgaccgttataggcaagagggagttgatcgagacagctgcttgcagaatcacttccaaagctctgtgcctggatggaagtcactgttgaataaaataaaatcactaaagttattgaacaccagaagaaaactaatgctgacttttgacgcaatcatccttttggcccacttaaaggatcttaaatgtcacggcgagctgttaggatcagaatggcttggctcctcattcttaagtgtgaacgacagattggtgtcactacaagaaacacaaaaggaccttaaaaagtggattgaaaggagaatggtgagtgcaatgaagaagaagggaggtgtaggaactctgtgtcagagatctgagcttatattctttgacatcataaacaaactcctcacaaaggccaaagaggcattatcctctgccagtttgtgctttagagattatgttaaagaggaagatatactggaggaggacagttacgagaggcttatgttaatggagaaaagagggattcagccaacaatgagctatgagaaagaagaggggaatcaattcccctaccctcttattgagttggaagctgattccatagaagacctgagaagactatctagcatctctttggcattggtgaattcaatgaagacatcatcagtagccaaagtgaggcaaaatgagtatggtgctgcaaggtacaaacgtgtacgttgtaaggaagcttttaatcaaagctttatcatgggaagcgggaatttcaacttaatttatcagaaaacaggagagtgctcaaaatgttatgccattaacaatcctgagaagggggagatttgttcattctatgcagatccaaaaaggttttttcctgcaattttctcacactgtgttatctatgagactatcaacaccatgatgagttggttgtctgaatgtatagaactcagagatcaacaaaaaactttaaaattattgctcaaaatcaccatgatcctcatacttgtgaaccctagcaaaagagcacagaagttcttgcaaggtctgcgatacttcataatggcctttgtttcagacttccaccataagcagttaatggaaaagttgagggaggatctcataacagagccggagcacctcttgtatagtgtggtgaggagcattctcaacatcatcctgggtgaaggggtgagcactatgttgactaatagatttaagtttgtgttaaacctatcatacatgtgtcattttataactaaggaaactccagataggttgacagatcagattaagtgctttgagaagtatttggagcccaagttggagtttgacagtattaacatcaacccatctgaagagggggatgaagatgaaaggatgctgctgcttgaatcagcaaacaaatttttatccaaagaaaccagtatgagtaacaacagaatatcttataaagttcctggtgtgtcaagaaaattcttctcaatgatgacgtcttcttttaacaatggctctcttttcaagaaaggagatgacctaagtgggtttaaagatccattagttactgctgggtgtgcaacagctcttgaccttgcaagcaacaaaagtgtggttgtgaataagtatactgacggagagaggatacttaattacgatcatgataaactagtggctgcttctgtttgccagctatcagaggtattccagaggaaaactaaatacctcttgagtaaggaggattatgattataaggtgcaaaaggccattagtgaccttgttgtggggaagaagtcaggttcctcaaatcccaattcacaaggggctcctgacgaattagatgagttattcttggatagttgtgcacttgactgtctagaggatgtgaagaaatctgttgatgtcgtccttgagaagtatagatatgacaggaagttccctgtgggaaatgggtcagaggagaagtccttgacagacttgaggaaggttttaggtactgaagatgtgggctgtgtttactacagactgatccaggcagagatagcacaccacatggtggaagattttgatgagtcactactacctggagatgcttatgagatgatctgcaaaggcttttttaaggatttggagttaaggtcaaagtatttctatttggattccttggactcttgcccaataacatgcatcacccaagctgtctccaccagaacattcaatgaccagcagttttttcagtgcttcaagtcactacttcttcagatgaatgcagggaaattggctggaaaatacagccattacaaaaacaaatgcttaaacttcaagattgatagagaaaggctgatgaatgatgttaggatcagtgaaagagagagcaattctgaggcattaggtaaagcactgtcattgacaaattgtacaactgcagttctaaagaacctatgtttttacagtcaagaatccccacagtcatacacatccttgggtcctgatactggaaggctcaagttttccttatcttacaaagaacaagttggagggaacagggaactttatataggtgacctgaggacaaaaatgttcacacgcctaattgaggattattttgaggcactaactaagcaatatagagggagctgtcttaataatgagaaggaattccacaatgccattctagccatgaaattgaatgtttcactaggtcaggtctcttatagcctcgatcacagcaagtgggggcctatgatgtccccttttcttttcctggtgtttcttcaaaatttgcgatgggagacaggagatgatatagaggacataaaaagtaaggattacgtgtccactttgctgtcgtggcacattcacaagttaattgaggtacctttcaatgttgtgaatgcaatgatgagatcttatcttaagtctaggttaggtttgaaaaaatcactccaccaaacgtcaacagaagctttcttctttgaatactttaaacaaaacaggataccatcacatctcagctcaataattgacatggggcaagggatcttgcacaatgcttctgacttctacggtctagtgagtgagagattcataaattattgcattaagtgtctatttgaagatgaagttgattcatatacctctagtgatgatcaaatatcactatttggcaaggatctttcagatttactctcaaatgagcctgaggaattccaagccattctagaatttcactatttcctaagtgatcaattgaataaattcatcagtccaaagagtgttattggttcatttgttgctgagttcaaatcaaggttttatgtctggggtgatgaagttccattgttaacgaaattcgtggctgccgccctccacaacgttaagtgtaaggagccacatcaattagctgaaactattgacactatcattgatcagtcagtggccaatggtgtgcctgtcacactatgtaacgctattcaggagagaacactgaatctacttagatatgcacaatatcccattgatcctttcttgttgtttttggattctgatgttaaagattgggttgatggcaataggggctataggattatgaggaacattgaggcaatcctaccagaaagcactcagaaagttaggaaggtcctaaggacagtttttaataagctgaaattaggagagcttcatgaagaattcacagccatctacttgtcaggagaccccgcagattccttcaagaaacttaccagccttgttggtgatgacaccctctcagaagaggatttatcggtgtgttggcttaatttgacaactcatcaccctttaaagatggtcatgagacagaaggtcatttacacaggtgctgttgaactcggggaagaaaaactgcctaccttggtgaaaacattgcaaagcaagttatcctctaatttcacaagaggggcacaaaagttgctctgtgaagccgtcaacaaaagtgcctttcagagtgggatagcatcaggtttcataggtctttgcaagacactaggtagcaaatgtgttcgattctcagataggtccaccgcctatataaaatcattagtttcaagactgtcagcattggattctgtttccagcttgaaagttaagggcgtcgatctttggatcttgggtaaggagcacacaaaggcagctgaggaagcgttaggtttcttgagacctgtcctttgggattacttctgcatagccttatctacatcacttgagctgggttcctgggtgttgggtgaacccaaagtgaaggagaaaacatcctcaattcccttcaagccatgtgactatttcccaatgaagcccactaccacaaaactcttggaagacaaggtggggtttaaccatattattcactcattcagaagactttacccatctctatttgagagacacctcttgcccttcatgagtgacctagcatcaacgaaaatgaggtggacaccaaggattaagtttcttgatctttgtgtggttctagatgtgaattgtgaggcaatgtcattaatttctcatgttgtcaagtggaagagagaagagcattatgtggttctgtcttcagatttagcaatagcacatgagaggtctcatctcccaatcacggatgaaagggtggtgaccacttatgatgtggtacaaaatttcctgagacaaatctactttgagtccttcatcagaccattcgttgcaacaagcaggactttaggttcttttacttggtttccacatagatcttcaattcctgagtcggaagggcttgacaacctcggccccttttcttcttttatagaaaaggttatttataagggtgttgaaagacccatgtacaggcatgatctttactcaggttatgcttggctggattttgaatgtgcaccagcaattctaaacttaggacagctcatagcatcaggattaaccgagcagcacgtctttgagtcggtaagtgagctgcttgaagcttttgccgacctcagtgttgggagcgttcaaatttctgtcacagtaaattttcaggtgagaagtcagggtgaatcattgaaagagaaatttagtctccacctccttttcaaaggggtggtgttggaaggtggattattcaagcctcattcccttgatgtaacttacagtggtagtgttcaaagatccgcaattaaagattgctggagagttgcacagacatctacatggtttaaaagggaaaccacatcaatttggttgctgtccactgaaaatatttgtgactacttgagggatagttcccccattcctgatgtgatacccttgtccgtcttattgaatgaggagatcctggacctggaggaacatgatttcacgcatatagggcctgagcatgttgaaatccccttagttgttgactcaggataccttattgaagggaccaggaaactcctgcccttcaaccccaacatccatgaccaggatcttaatgtttttattggtgagctaatggagaatcattccgaaatcttggagagatctttgagcaagatgctgagatccagaatggaccaaggactacactggctacaacttgatattataggggttgtgggacgatgcatgcctgaaggctacgaaaacttccttactagagtgttctccggaattgacttctgggcagattttaaaggctatagtctctgctacagtagatcgcaggcttcactgatgatccagtcttcagaggggaagtttagattaagagggaggctgtgcaggcccctctttgaagaggtggggcctcccctcgacattgagtag

SEQ ID NO: 12738 - DNA, 1464 bp, unidentified
  source 1..1464: mol_type = other DNA
  misc_feature 1..1464: note = Synthetic
atcaccttctttcaggaggtgccacacatcatagaagaagtgatgaacatagtcctcatcactctgtcccttcttgcaatactcaaaggaatttacaacctggcaacatgtggactgttaggtttgatttcatttttatttctctgtgggaggtcatgcacaatggtatacaaggacaactatgctctgaacagtgtggagctcgacatgtccactttgaattatacaatgccgttgtcctgttctaagaacaacacccatcattacattcagacctacaatgattccggcttggagcttacattgacaaacaattccattttgagtcataagttctgcaatctctctgatgcacacaaaaggaacctgtatgatcacacccttatgtccatagtaacaactttccacctaagcattccaaacttcaatcagtatgagtctatggcctgtgactttaatggcgggaagataactgttcagtacaatttaagtcactcatcaccaactgatgcagcaaaccactgtggtacagttgcaaatggtgtcctagacacattcagaaggatgcattggggaccagcacattttcccaacccccccttcaccattggaggggtttcgtgcatccagacaagctatcagtacctcatcattcagaacacaacatgggaagatcattgccaaatgtcaaggcccacacccatgggctacttatcactgatagcacagagaacaagacaactatacatttcaagaagactaatggggacctttacctggaccttgtctgattctgccgggaatgatctgcctggaggttactgcctacagaggtggatgttgattgaggctgagatgaagtgttttggcaacactgctgtagctaaatgcaatcaacagcatgatgaggagttttgtgatatgctgagactgttcgatttcaacaaagaagcaattagaagactgaaagttgaggcagagagaagcatcaaccttatcaacaaagcagtgaattcccttattaatgatcagctgataataagaaaccacctgagggatctaatgggtataccttactgcaactactcaaagttctggtacctaaatgacacaaggaacggaaagacatctctgccaaaatgttggaaagtttcgaacaactcttaccttaatgaaacccacttttcaaatgaaattgaggaggaggccaacaatatgataacagaaatgctcagaaaggagtatgagaagagacagagtacaactccccttggtttggtggacctctttgtattctcaacctctttctacttaattagtgtgtttcttcacctaataaagatccctacacacagacacattgttggcaagggctgccccaaaccccacagattgaatcacatggcggtttgtagctgtggtgtttttggccaaccaggacttcctgtgagatggaagagatga

SEQ ID NO: 12739 - DNA, 333 bp, unidentified
  source 1..333: mol_type = other DNA
  misc_feature 1..333: note = Synthetic
gtgcactcttctttattgggctggattacacaaaacttttcaagcatgggcaactgcaatcgaactcagaaacccagttcgtcttctaacaacctcgagaagccaccacaagctgcagaatttagaagaacggcagagcccagtctatatgggaggtacaattgcaaatgttgttggtttgctgacaaaaacttaatcacctgtagtgaccattatctttgtctaagatgtcaccaaatcatgctgagaaactcagagctgtgcaacatctgctggaagcccctgccaacatccataagagtcccgctagaggcaagtgctccggatctgtaa

SEQ ID NO: 12740 - DNA, 57 bp, unidentified; identical to SEQ ID NO: 4272
  misc_feature 1..57: note = Synthetic
  source 1..57: mol_type = other DNA

SEQ ID NO: 12741 - DNA, 288 bp, unidentified
  source 1..288: mol_type = other DNA
  misc_feature 1..288: note = Synthetic
atgggtctgagatactccaaagaggtcagggaccgtcacggcgacaaagacccagaagggaggatcccaatcactcaaaccatgcctcagacactgtacggcaggtacaactgtaaatcatgttggttcgccaataaggggttgatcaaatgtagcaaccattacatatgtctcaggtgcctaacctcaatgttaaacaggactgactactgcgagatctgtggtgaagtgctgccaaagaggctcacctttgagacgaccccaacagctccaccctatactccctga

SEQ ID NO: 12742 - DNA, 6675 bp, unidentified
  misc_feature 1..6675: note = Synthetic
  source 1..6675: mol_type = other DNA
gtggatcctaggcattcctttatcatgagtgaataccttgatgaattgaaggaactcattaggaaatggatacctgacgaagagatgtatatagaacagaagaccagtttcttgtctcaagtcaatctcagatcagtagtcattgaaggcctaaaattattgtcaattattatagagatagattcctgcaagaagcatggatgcgtgcacaacaagaacaaaacagtgaatcagatcttgagagatcataggattgtgggacctactctacccgatgttgtgcctgatggttacagagtgattggatcaacgataatcttgttggaggcttttgttagggtaagtcatgaatcctttgagatcaagtacaaatcagattttgagaagttgatgcagttatctaaagaccttagtagatgtggtctaacactcatccctgttgtagatggtagatcaaattattatacagaacactttccagattggacaatagagagaatgagatggttgatactgaaaataactaacttcctaagagacaacggggaagagattgaggaactagaatactctagacttgtgtacagtctctcaaatatggaaaataaaaacttgggccttgagtctctgaagatattgaaagaagaaggcttagattacaaagcaaaattgatgtcagtgatgagagatggtgtcaactccaacatgtcggcctctgaatgcagagttgaaatggccaaaatttatgatcaattttctttcttgagaaaaaatggattatataaagatgtgtattgtaagacatcacgaacagaaattatcaactggttgaaggatcataaattaatcctgcttagtggtgagaccaggactgccatgctggacgagaggcagtgcggttactgtagaaaccacatgtttagaatattggcaagtctgatcaagaataaaagacactaccaaagtctcaccaaccctaaaaaatgtggcagtatacaaagtcataagaaactactttctgattgcaacaagattaaaggtttaaaagtactaaatactcgaagatttacactcctatgccttgatgtcatcattcttaacagtctactcgaattgatagatgcaggggaaattgataatgagttcttggttaacaaccattttaaaagtgtgaatgatagactggtgtcaattgatttgataatagacagattgaataaaaaactaatgagtaagccaaactggattggtagtgtcaaatacaaaatgaagaggacacttgagatacatgggctgtactatgtatctaaatggcttaaacaggttgatattgattcttggtatgagtttaagatgatgcgagagcactcagataaatgtgtaaagccaaccttgaaatacaaaaaagatgctgcaagaaaatgtggtcaacctgaatttggtagtagcacaattttagatgatgaagttttccttgagtatcttgaggcgctatcaaccttgagtcttggtttagtcaactcaatgaaaacaagttcagctgcaaaatttctaatcaatgataagagcaattactttggtacagttcaatgcaatgagtgttattttcaagatcttgataaaagttataatagtttgctaatttatcagaaaactggtgaacggtcaaggtgttacgggctgatgttcaagagtgaacaatttgagaatgtatatgaggttggtgaaagcttttatgcagatcctaaaagatttttcttgcccataatgagttcagaagtcatcttaaagatgtgtgttgagatgttatcatggctagactggctgagtgagcaagagttgaaggcttttaagtcaaaactctacactctaataattaatatactaactgttccaagtaagcgagttcaggtttacctgcaggggtttagatacttaataatggcgtttgttaatgaactacactttaaggaattacaaaataagctaaaggtccaacctttgacaatttcagagtgttatgtgtttacactaatggatgatttagttcatctcttattaacagaagcccaagaggaaaacatgtctaaggtgtttagatttgttttaaacttgtcatatttatgccatctagttacaaaagaaaccccagatcgtttgactgatcaaatcaaatgttttgagaagtttttagagccaaaagttgacttcaattctgtttttgttaatttggattcatcaccacacctgtcaggagaggtggaagaaaagtttatcaaggatctcaatagacttttctccaaagatttgggtgttgaggatttgaaagaccctggaatttcaaaagaactgatttcattatgtgcatcatgcttcaactgtggtttgctgccaatgagcaaagtccttaaacatgacccacagtcaccatcattcactagtacagccttggatatttctagtaacaaaagtgttgtcgttccgaagttagatgaagtaggtgaaacagtaacacaatatgattaccaatcattactgtcttccactgttgttgatatggctcagtcctttaaagacaaactgaagtataaacttgatagaaaaagtatccaatttgcaattttcaaacgcttaacaaacatggtcttaaagaggaagacagatcatgatgtaaaagatgatcttgatgatgaactgtcagaaattgtagatgatgatacacttagagtcataaatgatgtagaagctaatgtctctgaatgtctaagcaagatggggaagatctccagagctgccactgtgggtggtcagaacaatctaggtaggtttgaaaaaattgatacattgaagagactatgggatagagaatcaatgaactttattttgatggaaacttccctacatgaggtcaaggattttgacccctcaatattccccattgagaaatacaaatcaatgtgcgagttagtttatgatagtaaaatgaaatctgaattttttaccgatgaagttttgaagttttgtccactggatttgctggtgaagaatttggccacaaaatgctatttggaggaagatttttttgaatgctttaaatatatcctcataagtgctggttttgataatagagttggtaggtatgatcacagaagtagatctagattaggatttaaagatgaggcaatattaattaaagagaactccagaattagttcaagggaaagtaactcagaagcaatttctagaagacttgataagagtttttttaccaattcttccttgaggaacttgtgtttctattctgaagagtccccaacttatagatccactgtgtcatccagtgttgggaaactgaaatttggtctttcttacaaagaacaggttggaagcaatagagaactttatgttggggatctaaacacaaagcttactagtagactgattgaagattactttgaatccttaacctcagagtgtaagttctcctgtcttaataatgatgcagaatttgaaagggctcttttagatatgaagtgtgtcgtaaggctttcaggtctagcagtgagcatggatcattccaagtgggggccatatatgtcacctgcaatcttcaacatactttttagtaatctgaaccttgagttaaatgacggggtgtttattgacaaagctcctattgagaaccttttgaattggcacttacataagattgttgaggtaccttataatgtgattgatgcttatttgaaaggttacacaaagagaaggcttggcttaatggacaggtcaagtacatccatcacagaagacttcatttttaactggtttgcaaaaggggttgttccttcgcacatttcttctgttctggacatgggacagggaattttgcataatacctcagattattatggtctgctcacagaacagttcatcttgcagtgtctggattttatctttgacatcaagtcaacagcttacacatcaagtgatgatgagatcctcttaagtaattctccttccttaaagaaagttgatgaagactcactagatataaacaaatgccaagaagtacttgaattccataattacttgtcatctaaattcaacaaatttgtaagccccaaaacagtggcaggctcctttgcaagtgagtttaaatctagattctttatctggtctcaggaagttccactgctcacaaagtttgtagcagcagcacttcataatgtaaaagcaaaatctccacatcagttggctgaaacagtagatacaattttggatcagtgtatagcaaacggtgtgtcaattgaagtggttaaagcaatttcaagaaggactaacaaacttatcacctatagtggacatcctaaaaatccctttctttgtgttgaaaatacagacctgaaagattgggtggatggttcaaggggttaccgtcttcagaggtcagtggagtcactgtttaatgatgatgacctcccattgacaatcagaaactcatgtagaagtttgtttcatagaatcagatcaggtgatatacaagaagagtttctaatcaatgcattgcaaacctcacctgatgaatgtctagcaaaaatgttgaggttgagtgatgttgatgaaagtacaattgataaggtgcttgagttcagatggttgaacttaagagctcatggtgacttaagattggtcttgaggactaaggtcatgtcaggcacaagaattttagatagggaagaagtgccctcactggttaaatcggtacagtctaagctttcaaaaaactttgtcagaggggcaaagaagataatcactgatgctattaataaatcagcctttcagagtagtatttgctccggcttcataggattttgtaagagtatgggttctaaatgtgttagagatggaaacggtagttttcagtacataaaacattttttgaaatctatcatcttgcattcgcattgtgaagtctgcaaaccagagatgagtgtcttttgtcgagcagcactagaggagcttaaacccttctcaagacccatcttttgggattatttttctttgactttttcaaatgcctgtgaattgggaaattgggttttttcgaatgtgaccattcctaaaagaactccaacaacagtaaatcccaacttcttttggcctgtaaaaccagggagccacactgaattagaggacaaagtaaacatgaatcatgtgctctactcaatcaaaagaaattttcctgacctttttgatgagcacattgctccattcttatcagaccttaactctctgaaaatttcctggatacagagaataaagttcttggatttatgtgttgccatggatatgtcaagtgagtgtttaggtattatttcgcacataatgagaaggaagagggaagaattatacattgtgaagcaaaatgaactgtctgttgcacacatgagggattcctcaccaatggaagcagggtatcaattaaactcatctgaaatttgtcataattttctctgtcagttagtttttgaatctatgcttcatcctgttttattaaccacaggtcaatttaaaaagtacttctggttcggtgaagtagaactcctgcctaatgaagcagatcatgacctggggcagttaactcaatttgtaatggattgcaaaacactcaacatctccagatgcatgtccctcgatgatttagatgttggatatgtgcatagctcaattctaatgggtgacatttatgtgaacttttctagtttcttacacttactggattgggaaaataggcgtaattataagacttttgatgagatcattttgtgctcaagagaggacaccattccaatggaaattgacttcactataagccattcaaggaagagtttcaaatttaaatatgaaagaaaaactaactatcacattaaaagcaaggttctggttcagaaggtcgacatagaagaggcacaaaatcaggggtttgacatacttgaacttgaagtacatgaaattgaatgttttgttagtggatctcaagggaaccacatcagtcttgatggagtgggtctcattccactacaccctctttttagtggcaaggaattccttgatgttaacaaactcctcataaagcaggatgaaaattttgaatccacccattccgtcttttccaaggtcaaactgaacttcagtaaccacacaaaagatctgaaaaataagtactcctataaattacagggacctgaatacaatatgaaccctttgcacctttacagagggcaaattatggaaaacaactttgtaatttcaaggcttgatgttcagataacttccagatcagtcttccttgctttggaagcactggaaagtgaagacaggattcctttcctgatttctttacatatctacacaagatcaaataacaagaaagaaaattcttgttttataaggatgacacaatctgatctctgtctattgattgattcctacgaaaaggagttcactgaagtactaaaatccctatcggattggatggactttggtgactttgctctatgcttcagcaacaacttaaattgcatcatgattgcagacccagatgggcaattcaaactcaaaggtagacagtgtagaaaggtctcatcagcatcagcacccctcgaaattgactaa

SEQ ID NO: 12743 - DNA, 342 bp, unidentified
  misc_feature 1..342: note = Synthetic
  source 1..342: mol_type = other DNA
gtggatcctaggctttactggtcattgcgcaaagtgaaatcttttcaagtcccaatgggtcttagatattcaagagaggtcaaacaacggtatggtgaaaaagaactagaaggtagaatacccatcactttagatatgcctcagactctgtatgggagatacaattgcaaatcttgttggtttgccaacaaaggattgattaagtgcagcaatcattacttgtgtttgaagtgtctaacagcaatgttgagcaggtcagattattgtggcatctgtgggggcatcctcccaaagaaactggtctttgaaaccacgccatctgcaccaccctacaccccatag

SEQ ID NO: 12744 - DNA, 204 bp, unidentified
  source 1..204: mol_type = other DNA
  misc_feature 1..204: note = Synthetic
atgaggacgacgactactattactatagggaggacgaaccgcgacaacacggtgaaccgaactatgtggctccgccggcacgtcagtttcgctttccgccgcttaacaacgtgtccagctatcaggccagctgcgtcgtcaaggacggcgtgttggacgctgtgtggcgtgtacagggtacgttctatcccgagaaagggatag

SEQ ID NO: 12745 - DNA, 93 bp, unidentified
  source 1..93: mol_type = other DNA
  misc_feature 1..93: note = Synthetic
ttgtatcacagaagtgaagaccaactgcagcgcacgctggaggacgccgaggcactgttcaataaatattgctcggtgtctcttaaggactaa

SEQ ID NO: 12746 - DNA, 6648 bp, unidentified
  misc_feature 1..6648: note = Synthetic
  source 1..6648: mol_type = other DNA
atggagacaagtgtgtgtgaggcaaaggacctcatttccaaatacttagccaatgatcagaggctgtccagacagaagttgaactttctgatccaatctgagcctcaaaacttattgattgagggcctcaagctgctttctctatgcatagaattagacagctgtgaggccaatggttgtgaacataacacagaggaattgagtgttgaggtgatcttactcaatagaggcatattgtgtcctggtctgccctttgttgttccagacggttttaaactaactgggaatgtattggttttactagaatgctttgttaggagttcaccttcaaattttgagcaaaagtataatgaggactctgtgaagttaaattctttaaaacaggatttacagagtgtgggggtcactttgctccccataattgatgggagaacagtttttgatcacacttttatgccagagtgggcaaacgaaaagttcagatccatcttattctcactacttcaatttgctcaagaatcatcaaggatgttggaagaatcagaatatagtagactctgtgaatcgttaaggaatgtagaaggtaaaaggtctgggttggagagtatcaacatcctacaagactgcaggacaacacaccatgaagaaattcttaaattgtgtcacatggggattgacaactctatgagctctatagatgtcaaacgagaaataatcaatgaattccaagccttcaggaatggtgtgagctccggggcaattcccagacaatttaggagggtcgacaaatctgagctgctaaagtccttttgtaagatgtacccctcagattttggagcagaggcggagagtatggagaaattgagaggggagttcctcactctgtctcccacaataacattactctatgctgacattgatgatactgaagagttaagacccaagcacagttgtgtcccagcctggagatcattgctgaacaaaatcaagagtcttcacatactcaacactaggagaaagactttgttgttgtttgattcaataattttgctgtgtcatgctgttgacaaagaggtggttggccactttgaagattcagagtggcttggcacatcatttttaagtgttaatgataggcttgtctcattgactgccacaaagaaggaattgtatcaatggatggaaagacgaaggacaaatcaagtgaggaatctaggctcaggccatgagcatcaaggactggtgtattataaccttgttagctccaccctaaggaaggctgaacaggcattggcacttgttaacttaaaattttctgattttggcgttttagaaaacataatttcaatctcaagttttgaaaagataatgggggttgaagtgagaggtgtcatgccgtccatcaattatgaaaagaatgaccttagtgactttccgtataagctgagcccagcactggagactgaagatgatctaaaacggctctcaagcatttcactggcaattgtgaattcaatgaagacatcctctgttgtcaaattaagacaaaatgagagaggtgccgagaggtttaagaaggtgatttgtaaggaagcttactgccaagagttttacatggctgggaccagatttagactgttgtaccagaagacaggagaatgctcaaaatgttatgcaattaacaattctcgtaaaggtgaggtctgttccttttatgctgatcctaagaggttctttccagctatcttttcgcagtcagttatatctgagactattaaagtgatggtgagctggttgaatgattgtttagaattaaagcaggatttgagagacattgaagcattgctaaaaatgatctttatactggttttaacccatccgagcaaaagatctcaaaagttcctccaaaatttgagatactttgttatggcatacgtctctgaatattatcacaaggaccttttgagtaagttggaggaaaaattgataacaaaagttgagttttttctttttagagttttgagaacattgattagtaaggttctcaaccctacgattaacacaatgttgacgaataggtttaaatttgtcctcaatgtctcttacatttgtcacttcattacaaaagagacaccagacagactcacagatcaaattaagtgctttgagaaatacttggagccaaaattagaatttgactccgtcaatgtgaacccccttgaacccgcagaggccactgagttgtccagcttattgatgagcggggctgcctttttgggtaagacatcatgtactgaaatgggtggcatccaatttaaaaaaccgggtatctctaaaaagatactgtctttagtcacatcatcattcaataatggcactctttttagtaaacaagaattcaagggtgaaataaaggatcctttagtccttagtggttgtgcaactgcaatggacctagccagcaataaaagtgttgttataaataagtatgttgatggtgagagggtgctaaactatgattatgacaaacttgttgctgctgcagtatgtcaattatcggagacattcgagaggaaaagtaagtactttctaagtaaagaggagtatgactacaagattatgaaagtgattgcaagtctagtgattggtagtacaaagacttctgatggagggatatccactgaggaactggatgaagtattgattagtggtgccgcttcttcctactttgaggacatcaaagagtcagtgagaactgtgatggaaagttataaaagcctaagtgatgaaaaacttggtaaggtgaacgctggtgacataaatgatctacacaaagttgttgacaacccaatgcacttgaaattgattctgtcagaactgtccaaccatttaatagaagactttgaccaatcattgatgtctgatgatgattacaaagcagtttgtgagaaggtctatttaaacgatgagttaaaaggtaaatacttttacttaggaccaatggactcatgtgccatctcagagatcaccagggcagtgacaaccagaacctatgaaaatgcagaatatttcttgtgtttcaagtccattttgttgcagatgaatgccaatagacttgtagggaaatacagtcattataagtcgaaatgcataaactttaagttaaatagagagaggttaatggatgattgcagattaagtgatagagaaagtaattctgaggctttgagcaaagcactttctcttaccaattgtacaactgcagttttaaagaacttatgtttttatagtcaagagtctccacagtcatacacatctattggtcctgacacaggaagattgaaattttccttatcttataaggaacaagttggtgggaatagagaactttatattggtgatttaagaaccaaaatgttcacaaggctgattgaggattattttgaatctttgacaggtcaatttagaggcagctgcctaaatagtgaatcagagtttgaaaatgctgtgttgtcaatgaagcttaatgtatcattggctcaagtatgctacagtctagatcatagcaaatggggacctatgatgaaccccctgttgttccttgtaatcttacagaacattcactggaattcttcggatatattagaggatgtgaaaagtagagattatgtgagcacattgctctcctggcacatacataaattgatagaagttccccatccagttgtgaatgccatgatgaggtcctatcttaaaacaaacttagggttgaagaaatcattacatgaaacactaactgaagctttcttttttagacactttaaacttggtgttgtgccctctcacatcagctcaattttagacatggggcagggaatcctccataatgcctccgacttctatggactgatcactgaaaaatttattaactattctatcggcttactttatgaggggactcttaaatcatatacttccagtgatgatcagatctccttatttgatcataagttgactaatctgctagacagagaccctgatgaatttgaatacattttggaatttcataattacttgagtgacagattgaacaaatttattagtccaaaaagtgtaatagggcggtttgttgctgagttcaagtcaaggttttatgtctggggtgatgaggttccactattgacgaagtttgttgcagcagctttacacaatgttaagtgcaaggaaccgcaccagttggcggagactattgatacaatcattgatcagtctgtggcaaacggggtgcccgtgaagctctgcaatctaatccaacagagaactttagatcttctgaggtatgcacaatatccgattgacccattcttgatgtattgtgactccgatgtgaaagattgggttgacggtaatagggggtatagaatcatgaggaacatagagcaactttgcccaggtggaacaaagaaagttaggtacttccttagaagactttacaataaacttaaaactggtgaattacatgaagaattcacagctgcttacctatctggagatcctagtgagtcgttacaaaaaatttgttcactacttaatgtagaccctttagaagagtcagagttaagtctgtgttggctaaacctctctgcctacttccctttgagaatggtgttaaggcagaaagttatttacacaggtgccttgaatcttgaagaggaaaaattaccaaccctagtcaaaactcttcagaacaagctctcttccaactttactaggggagcacaaaaactcctatcagaggcaataaacaagagtgcatttcaaagtagcattgcttcagggtttgttgggttatgcaagacattggggagtaaatgtgtaaggggctttgataagtccaactactttattaagtcaattgtaagccaacttgaagggcgaactgatgtgaaggggtttattttgaagggtatgaatctgtggtctgtccctgtctgtcagagatgttcaaatgactggcttataaaatttctcaggccagtgttgtgggattacatgtgtattgccctctcttgtgcattagagattggaccttgggttttaggtgagccaaagctaaaggcaaaaatccctgcaataaatttcaaaccttgtgattacttccccttaaaacctacaatcacaaagttgctggaggataaagttgggttcaaccatattatacattcatttagaaggttatatccatcactatttgaaaagcatttgttaccttttatgagtgatttggcttcaacaaaaatgaagtggtctcccagaataaaatttcttgacttatgtgttgttttggatgtcaattgtgaagcaatgtctctcattagccatgttgtcaagtggaaaagagaggagtactatattgttctgtcatcagagttgtcagaagctcatgatcgatctcacatgtctttaacagaggaaagggtggtaagtactgaagatgtggcaaagaacttcttaagacaaatctttttcgagtccttcattaggccttttgttgcaactagcagaacattaggatcatttacctggtttcctcataagacatcgctccctgcttctgagggactgaatcttcttggtccatttgcatcatttgtagaaaaggtgatttataaaggtgttgaaaggccaatgtttaaatcagacctatatatgggattctcttggatggatatggtgattaaaccagcttatctaaatctaaaccagcttatagcttctggcatcactcttgatcagcagtttgcgtctttagatgaattttgggaggctctccaatcattgccgagtagatccactcaactcacattttcggttttctttacgattaagagtaaaggggagaccctgagtgaagaatttgcgtttcatgtcaaaacatggggcatgatagaccacacaggttcctttgtgttaagtaggttagaagtgctatatagtggtcaagtgcacaggtctctgttattggattgttggaggttggtattgaacactgatcagttttgtaagccggagcctgtgtggatagttgatgctgacaacctatcagaatttcttgaggatcccaaatcaattgggcaggtagttaggctcaatgttaaactaagtgagaatgttacaggcctcaccgaatatgattttgtgcacgtaggaccaaatcctgagcccctgcctctggttgtggaggatggctacttgattgaaggcaggaagaaaattttaccaataaacccgagtattcatgatcaagacatggaggtgttgatttcagaaatggatgggagttgtgttaactcaccccctatagtggttgggaacattttgagacagaggcttgatcaaggtttgcactggttggaactggacctggttggggttgtcaaaaagtgcaggcccaatgattataaagtgtttcttaaagatgctctacaggatgtatgtgaatggttgggctttaatggttacaatttgtgctttagcaaaactttaggtgacataatggtacacagttcacagggtaaatacagattgaaagggaggcagtgtgataaactgtttgaggaggtcagggaggtgcaggatattgactag

SEQ ID NO: 12747 - DNA, 2088 bp, unidentified
  source 1..2088: mol_type = other DNA
  misc_feature 1..2088: note = Synthetic
aagggctgctcggcggccacggcgtcttcctcctcgtcgtcgccgccgtcgcgccttcctctgcctgggcacgcgcgtcggccgcgtcgcaaacgctgcttggtacccgaggtcttttgcacgcgcgacttggccgacctgtgcgtgcgacgcgactatgagggcctgcggcgttacttgcggcgcttcgagggctcgtgcgtgtcgctgggctggccctcgcagtgcatctacgtggtcgggggcgagcattcgccgcactcgctgactgagatcgatctggagcactgccagaacgactttttcggcgaattccgagctctgcatctcattggcacggtctcgcacgccacctgccggtaccaggtgttcgtggacgcgtacggcgccgtgttcgcctacgacgcgcaagaggactgcctgtacgagttggcctcggatctggccggattttttgccaagggcatgatccgctgcgacccggtgcacgaatccatctgcgcgcgtctgcaacctaacgtgcccttggtgcatcccgaccatcgggccgagctgtgccgccgctcgcgcgcctccgctcgcggccgctacctacgttcgctgctggctttccgcgagttgctggcctgcgaggacaccgccgctcgttgcgcctacgtagaggcgcaccgcgaggcgcaactgaccctcatctggcccgagaagcattccctagtgctgcgcacggcgcgcgatctggggctctcggcctcgatgctgcgccgctttcaacgttcgttgtacacgcgcgagcccgtcatgccgctgggcgaaattgagggcgccgaggacaagaccttctttcaccgcgtgcggattctctgcggcgacacgggcaccgtgtacgcggcgctggtggggcaggataagttggtgcggctgtcgcgcgacctcaggggcttcgtgcgcgtggggctggcgctgctcatcgacgactttcgctacgagagcatcggccccgtggaccgcagctcgctgtacgaggccaatcccgagctgagactgccgttcaaaaagcgtaggctcgtcgtgggctactttgactcgctctcgtcgctctatctgcgcgggcagcccaagttcagcagcatctggcgcggtctgcgtgatgcctggacccacaagcgcccgaagccgcgcgagcgtgcgagcggggttcacctgcagcgctacgtgcgcgccacggcgggtcgttggctcccgctgtgctggccgccgctgcacggcatcatgctgggcgacactcagtactttggggtggtgcgcgatcacaagacctaccggcgcttctcgtgcctgcgccaggctggccgcttgtactttatcggcctcgtcagtgtgtacgaatgcgtgccggacgcaaacacggcgcccgagatctgggtctccgggcacgggcacgcctttgcgtacctgcccggcgaggacaaggtgtacgtgctggggctctcgttcggcgagttttttgagaacggcctctttgccgtgtacagcttctttgagcgcgactacgtggatgagatcgtagagggcgcgtggtttaagcacacctttgcgggcatgtacgaactctcccagatactgcacgaccgcgccaatctgctgcgcgtatgtcagctccacgccggtagcaagatccgcctgggcggctcgcccgcttgtactttcactttcggctcgtggaacgtggccgaggccgacgaggccaacaatttcgtgatcggcgtgctagaacaggcccattttgtagtcatcggatggatggaacccgtgaacaaagccgtatttatggacgcgcatggcggcattcacgtactgctgtacggtacgatgctggttaagttggccgagacgctgcgcggttttatccgtcagggctccttctggtttcgttgcccacggcgtttttgcttctcgccgttggactcgagcgcaaccgttgccgcgaaaccggtgagcagccatacatcgcccgcgtacgacgtcagcgagtacgtgttttcgggtcgtagcgtgctggatagcgtgagcggcacgggggcgtcgtga

SEQ ID NO: 12748 - DNA, 51 bp, unidentified; identical to SEQ ID NO: 4288
  misc_feature 1..51: note = Synthetic
  source 1..51: mol_type = other DNA

SEQ ID NO: 12749 - DNA, 936 bp, unidentified
  source 1..936: mol_type = other DNA
  misc_feature 1..936: note = Synthetic
aagccgtctatccaacgttccgcgttcgcctcttatatacactctgcaatgcagtccgactctgcccctctacccagggtggaatatgtgttcgaaacaagcaaatttagaatgacgtcgagagcaaatgaagccagactcagactgacaaatgagtgtccgatactggtgagaccccacgagccgttcatcatgcccaccggaatacacttcacgcgaacccctagctgcgctttcatcctgaccggagagaccgacaaggatgtattttgccacacgggcctaatcgacggaggctaccgcggggagatacaggttattttactcaacaagaggaagtaccctgtgacgctgtatcgcggggagctcaacatctgcctgtctgctttcaattacgtgctacctccgttgagggacgtatcattcttaaccccccctatgtatgcaaacgacgccggatttgacgtgatggtgatgcactctatggttatccctcctactactgaccaaccgttcatgatatacctaggagtggagaccccaggcccccctgaaccccacgtggctctagcattggggcgatccggtctagcatctaggggtatagttatagacgttagtgagtggggaccgcgaggattgcagctgaagttttataactactcggggcagccgtggctggcgcagcccggtagccgcatatgccagattgtgtttgtggaacgcagacacatcctcaagggcttcaaaaagtgcttgcgccataggaagctagctcctggcgtccgtttccgggaggctcgagtgcattttcgcgaggatacaaatagcgtccgaaaacatacccacgaagacaaccccgtccacgaacccaacgtagccaccgcttccgctgacattcgtggaaccaaggggctggggtcgtctgggttttag

SEQ ID NO: 12750 - DNA, 21 bp, unidentified
  misc_feature 1..21: note = Synthetic
  source 1..21: mol_type = other DNA
atgccttttagcgtagtgtaa

SEQ ID NO: 12751 - DNA, 162 bp, unidentified
  misc_feature 1..162: note = Synthetic
  source 1..162: mol_type = other DNA
atggtgtccgactacgacccggcggtgctcgtgtttatcttctgcatggcgctggccgcgaacttctgcatgcccatgaagacgaagctgagcaccatcttcgtgctgcagtccgtcgtgttctcgtggtttctattccacttcgtccattcagtaatttaa

SEQ ID NO: 12752 - DNA, 939 bp, unidentified
  misc_feature 1..939: note = Synthetic
  source 1..939: mol_type = other DNA
ctgaacaagcactacgagctcaccaaaggccagctctcgatcctgcgcacggtcaacgacaagctgctcgcgcgcaccgtgcagcactcggacggagagagcgatgagagcgagagcgaggaggacgacatctccagtccgctgccgccggacgaagaggagccggactcgtgtgtggcccgggtcatgccgcgggacgcggacctggcggcgccaaaaaaggccgacggctacatcattgccgccgagcagcagcgccagcagcgcataaacattctggtatccgatcgagaggccgtcgtggagcgggagccggttcagacgtcgttcgcgcgcgtctcggctatcccgatccacggggacggcgcgcgccgcaccaccgcctccttctccgcgaccacgccgtcgctgggcgccgtgttcgacgacgccaagcgcgtgcggctgctggaggaggaagtcaaggagctccgcaaaaagtgcgcgacctctcaggataacggaaacctggagaacttcaccaaggtgctgttcggcaaggcgccgcgcgcgagcgagctgaacaagcgcgtggtcatcgtgaactacgccacgctgaacaacgtgacgctgtccatggaggacctcgagaagtgctccgatgaggaggtggaccgcatgtactcggtcatccggcgctacaacgagacgcggaagaagaagatcctggtcacgaacgtggtcatcatcgggatcaccgtgctcgagcacgtgctggtgaagcttggcttctcggaggtgcgcgggctcagcgccgacctctcgtcggagctcatcgacgtggagatcggcgaggactgcgagcacatcgcagagcgcctggggttcgggaacagcccggtgctaaacgtggcgctcttcgtggtaaagctgttcgtgcggaagctgaacctgatctga

SEQ ID NO: 12753 - DNA, 30 bp, unidentified; identical to SEQ ID NO: 4294
  source 1..30: mol_type = other DNA
  misc_feature 1..30: note = Synthetic

SEQ ID NO: 12754 - DNA, 30 bp, unidentified; identical to SEQ ID NO: 4294
  misc_feature 1..30: note = Synthetic
  source 1..30: mol_type = other DNA

SEQ ID NO: 12755 - DNA, 30 bp, unidentified; identical to SEQ ID NO: 4294
  misc_feature 1..30: note = Synthetic
  source 1..30: mol_type = other DNA

SEQ ID NO: 12756 - DNA, 399 bp, unidentified
  source 1..399: mol_type = other DNA
  misc_feature 1..399: note = Synthetic
atggaactcgctaatgtcttcctagagaccgacgaaggcaagctcccgctgcgcttcgagctgcccccgccatgccaacgcaccggcagggaaatgcgggaggctctcgagcacttcctttccgtgcttgacaagtacatgcacgtcgacaagtccaccttctatatggccgtgcgcgacggcgagctcttttacttccgttgcgagaacgggcgcgttgctcccgtcgagcacgattttttcgtgttcgacgacgtcttcgactttgcgaaggaacccgcggaagtgcgagccgtgaccttcgtgcttacggacaggatgcctgtcttgttgcgcatgcgcaagcgctatgctttgcgcgcgtatgcgaacagccgccgctactacggagcgacatag

SEQ ID NO: 12757 - DNA, 69 bp, unidentified; identical to SEQ ID NO: 4296
  misc_feature 1..69: note = Synthetic
  source 1..69: mol_type = other DNA

SEQ ID NO: 12758 - DNA, 18 bp, unidentified
  misc_feature 1..18: note = Synthetic
  source 1..18: mol_type = other DNA
atgctgacccgcccctga

SEQ ID NO: 12759 - DNA, 483 bp, unidentified
  misc_feature 1..483: note = Synthetic
  source 1..483: mol_type = other DNA
atggagttctgctgcacggaaacccttcgggttgtccgcctcagccaaaacgctaccataccaaccagaggatctcccggtgccgcaggattagacctatgtagcgcgtacgactgtgtcgtcccttcgcattgcagttgcgtagtgtttactgaccttctgataaagctcccacctggttgctacggacgcatagcaccacgttccggccttgcggtcaaacactttatcgacgtgggcgctggcgttatcgacgaagactaccgaggcaatgtcggggtggtgctgtttaacttcggaaacagcgactttgaggttaagaagggagacaggatagctcagctaatatgcgaacgcatatcgcacccagcagttcaagaggttaaccgcttggacgacaccgaccgcggcgactctggattcggttctaccggatcgggtgcttgtggtggcagtggagatacagtgtggtacatcagctaa

SEQ ID NO: 12760 - DNA, 735 bp, unidentified
  source 1..735: mol_type = other DNA
  misc_feature 1..735: note = Synthetic
acggaaaaaggcgggaattacgtcacctgtgcacccccacccagcaccgctatgagcaaagaaattcccacgccttacatgtggagctaccagccccagatgggcctggccgccggcgccgcccaggactactccacccgcatgaattggctcagcgccgggcccgggatgatctcacgggtgaatgacatccgcgcccaccgaaaccagatactcctagaacagtcagcgctcaccgccacgccccgcaatcacctcaatccgcgtaattggcccgccgccctagtgtaccaggaaattccccagcccacgaccgtactacttccgcgagacgcccaggccgaagtccagctgactaactcaggtgtccagctggcgggcggcgccaccctgtgtcgtcaccaccccgctcagggtataaagcggctggtgatccggggcagaggcacacagctcaacgacgaggtggtgagctcttcactgggtttgcgacctgacggagtcttccaactcgccggatcgggaagatcttccttcacgcctcgtcaggccgtgctgactttggagagttcttcctcgcaacctcgctcgggcggcatcggcactctccagtttgtggaggagttcactccctcggtctacttcaaccccttctccggctcccccggccactatccggacgagttcatcccgaacttcgatgccatcagcgaatcggtagacggctacgattga

SEQ ID NO: 12761 - DNA, 1092 bp, unidentified
  source 1..1092: mol_type = other DNA
  misc_feature 1..1092: note = Synthetic
aagatactgagcagtctccgatgttgtgtcccagcggcaagtatgtccaagcgcaaatacaaggaagagatgctccaggtcatcgcgcctgaaatctacggtccgccggtgaaggatgaaaaaaagccccgcaaaatcaagcgggtcaaaaataacaaaaaggaagaagatgacgatgatgggctggtggagtttgtgcgcgagttcgccccaagacggcgcgtgcagtggcgcgggcgcaaagtgcgtcaagtgctcagacccgggaccactgtggtttttacacctggcgagcgttccagcactacttttaaacggtcctatgatgaggtgtacggggatgacgatattcttgagcaggcggcagaccgccttgacgagtttgcttatggcaagcgcactagatccagtcccaaagaggaggctgtgtccattcctttggatcatggaaatcccacccccagcctcaaaccagtcaccctgcagcaagtgctgcccgtgcctgcgcggagaggcgtaaagcgcgagggtgaggacctatatcccaccatgcagctaatggtgcccaagcgccagaggctagaagacgtactggagaaaatgaaagtggatgccgatatccagcctgaggtcaaagtaagacctatcaaggaagtggcgccaggtttgggagtacaaaccttcgacatcaagattcccaccgagtccatggaagtgcagaccgaacctgcaaaacccaccacctcaattgaggtgcaaacggaaccctggatgcccgcgcccgttgccgcccccagcaccactcgaagatcacgacgaaagtacggcccagcaagtctgctaatgcccaactatgctctgcacccatccatcattcccactccgggttacagaggcactcgctactatcgaaaccggagcaacacctctcgccgccgcaaaccacctgcaagtcgcactcgccgtcgccgccgccgcaacactgccagcaaattgactcccgccgccctggtgcggagagtgtaccgcgatggtcgcgctgaacctctgacgctgccgcgcgcgcgctaccatccaagcatcaccacttaa

SEQ ID NO: 12762 - DNA, 72 bp, unidentified; identical to SEQ ID NO: 4303
  source 1..72: mol_type = other DNA
  misc_feature 1..72: note = Synthetic

SEQ ID NO: 12763 - DNA, 1470 bp, unidentified
  misc_feature 1..1470: note = Synthetic
  source 1..1470: mol_type = other DNA
atggggcagatagtcaccttctttcaagaggtgccacacatccttgaagaagtgatgaacattgtgctgatgaccctctcaatcttggccatcctaaagggcatctacaatgtgatgacctgtggaatcatcggtttgataacatttttgttcttgtgtgggagatcatgctcaagcatctataaggacaactatgagttcttctctttcgacctcgacatgtcttcactgaatgcaacgatgcctctctcctgctcaaagaacaactcccatcactacatccaagttgggaatgagacaggcctagagctgacattgacaaacactagcataattgatcataagttttgcaacctgtctgatgctcacaggaggaatctttatgacaaagcacttatgtcaatcttgacaacattccacctaagcattccagattttaaccaacatgaggcaatgtcatgtgattttaacggagggaagatctcagttcaatacaacctgtcccactcaaattatgtggatgccggcaaccactgtggcactattgcaaatggcattatggatgtttttagaagaatgtattggagcacctccctttcggttgcctctgacataagtgggactcaatgcatacagaccgattataagtatttgattattcagaacacatcatgggaggatcattgcatgttctcaagaccctcacccatgggatttttaagccttctgtcacagagaaccaggaatttctacatctcaagaagacttttgggtctttttacatggactttgagtgactcggaagggaacgacatgccaggtggttactgtctcacaaggtctatgctaatagggcttgatctgaaatgctttgggaacactgccattgcgaagtgtaatcaggcacatgatgaagaattctgtgacatgctccgcctttttgattttaataaacaagcaattagcaaactgaggtctgaagttcagcagagcataaatttgataaataaagctgtcaacgccctcatcaatgatcaactggtcatgaggaaccatttgagagatctaatgggtattccttattgcaactactctaagttttggtacttgaatgatactaggacagggagaacatccctcccaaagtgttggcttgtgaccaatgggtcatacctaaatgaaacccagttctcaacagaaattgagcaagaagccaataacatgttcactgacatgttgaggaaggagtatgagaaaaggcagagcacaacacctctggggttagtagatctttttgttttctccactagcttttatttgatctccgtgttcctccacctaatcaaaattccaacacatagacacataaaaggcaagccttgcccgaaaccacacagactcaatcacatggcaatctgttcctgtggcttctataagcaaccaggtctccccacacaatggaaaaggtga

SEQ ID NO: 12764 - DNA, 273 bp, unidentified
  source 1..273: mol_type = other DNA
  misc_feature 1..273: note = Synthetic
ctggggtccctgtcgcctcccaaccccctaagacccaccccccgtcctatgcgaggttggtcgcccgtctctgctacgccgctgacccccaccgcgctcctcccgccacccgaaccaccactgcactccctgccgcgtggatcggcgccatgctggcggacggctttgaaactgacatcgcgataccctcgggcatctcgcgccccgatgcggcggcgctgcagcgctgcgaagggcgggtggtattcctgccgaccatccgccggcaactga

SEQ ID NO: 12765 - DNA, 48 bp, unidentified; identical to SEQ ID NO: 4309
  source 1..48: mol_type = other DNA
  misc_feature 1..48: note = Synthetic

SEQ ID NO: 12766 - DNA, 48 bp, unidentified; identical to SEQ ID NO: 4309
  source 1..48: mol_type = other DNA
  misc_feature 1..48: note = Synthetic

SEQ ID NO: 12767 - DNA, 2067 bp, unidentified
  source 1..2067: mol_type = other DNA
  misc_feature 1..2067: note = Synthetic
atggacaaagtgctgaatagggaggaatccatggagcttatggatttattaggccttgataggtctgcatgggggaacattcctgtcatgagaaaagcttatctgaaaaaatgcaaagaactccaccctgataaaggtggggacgaagacaagatgaagagaatgaattttttatataaaaaaatggaacaaggtgtaaaagttgctcatcagcctgattttggtacatggaatagttcagaggtgccaacctatggaacagatgaatgggaatcctggtggaatacatttaatgagaagtgggatgaagacctgttttgccatgaagaaatgtttgccagtgatgatgaaaacacaggatcccaacactctaccccacctaaaaagaaaaaaaaggtagaagaccctaaagactttcctgtagatctgcatgcattcctcagtcaagctgtgtttagtaatagaactgttgcttcttttgctgtgtataccactaaagaaaaagctcaaattttatataagaaacttatggaaaaatattctgtaacttttataagtagacatggttttgggggtcataatattttgtttttcttaacaccacatagacatagagtgtcagcaattaataactactgtcaaaaactatgtacctttagttttttaatttgtaaaggtgtgaataaggaatacttgttttatagtgccctgtgtagacagccatatgcagtagtggaagaaagtattcaggggggccttaaggagcatgactttaacccagaagaaccagaagaaactaagcaggtttcatggaaattagttacacagtatgccttggaaaccaagtgtgaggatgtttttttgcttatgggcatgtacttagactttcaggaaaacccacagcaatgcaaaaaatgtgaaaaaaaggatcagccaaatcactttaaccatcatgaaaaacactattataatgcccaaatttttgcagatagcaaaaatcaaaaaagcatttgccagcaggctgttgatactgtagcagccaaacaaagggttgacagcatccacatgaccagagaagaaatgttagttgaaaggtttaatttcttgcttgataaaatggacttaatttttggggcacatggcaatgctgttttagagcaatatatggctggggtggcctggattcattgcttgctgcctcaaatggacactgttatttatgactttctaaaatgcattgtattaaacattccaaaaaaaaggtactggctattcaaggggccaatagacagtggcaaaactactttagctgcagctttacttgatctctgtgggggaaagtcattaaatgttaatatgccattagaaagattaaactttgaattaggagtgggtatagatcagtttatggttgtatttgaggatgtaaaaggcactggtgcagagtcaagggatttaccttcagggcatggcataagcaaccttgattgcttaagagattacttagatggaagtgtaaaagttaatttagagagaaaacaccaaaacaaaagaacacaggtgtttccacctggaattgtaaccatgaatgaatattcagtgcctagaactttacaggccagatttgtaaggcagatagattttagaccaaaggcctacctgagaaaatcactaagctgctctgagtatttgctagaaaaaaggattttgcaaagtggtatgactttgcttttgcttttaatctggtttaggccagttgctgactttgcagctgccattcatgagaggattgtgcagtggaaagaaaggctggatttagaaataagcatgtatacattttctactatgaaagctaatgttggtatggggagacccattcttgactttcctagagaggaagattctgaagcagaagactctggacatggatcaagcactgaatcacaatcacaatgcttttcccaggtctcagaagcctctggtgcagacacacaggaaaactgcacttttcacatctgtaaaggctttcaatgtttcaaaaaaccaaagacccctcccccaaaataa

SEQ ID NO: 12768 - DNA, 519 bp, unidentified
  source 1..519: mol_type = other DNA
  misc_feature 1..519: note = Synthetic
atggacaaagtgctgaatagggaggaatccatggagcttatggatttattaggccttgataggtctgcatgggggaacattcctgtcatgagaaaagcttatctgaaaaaatgcaaagaactccaccctgataaaggtggggacgaagacaagatgaagagaatgaattttttatataaaaaaatggaacaaggtgtaaaagttgctcatcagcctgattttggtacatggaatagttcagaggttggttgtgattttcctcctaattctgataccctttattgcaaggaatggcctaactgtgccactaatccttcagtgcattgcccctgtttaatgtgcatgctaaaattaaggcatagaaacagaaaatttttaagaagcagcccacttgtgtggatagattgctattgctttgattgcttcagacaatggtttgggtgtgacttaacccaagaagctcttcattgctgggagaaagttcttggagacaccccctacagggatctaaagctttaa

SEQ ID NO: 12769 - DNA, 21 bp, unidentified
  source 1..21: mol_type = other DNA
  misc_feature 1..21: note = Synthetic
gtgggtgcttcggggacttga

SEQ ID NO: 12770 - DNA, 843 bp, unidentified
  source 1..843: mol_type = other DNA
  misc_feature 1..843: note = Synthetic
acgactccatttactttaaataatttacgagatcaaaataaaatgactctgcgcatcaaactcgagaagctcaagcagatcgtaacctacttctcggagttcagcgaggaggtctcggtgaacgtggacgtcggcgatggactcatgtacatattcgcggcactgggcgggtccgtgaacatctggaccatcgtgccgctcagcgcgagcgtggtatacgacggcgatgtcagccgcgtgttcaacctgcccgtgctcaaggtgaaggcctgtctgtgcagcttccaccccgactcggtggtgagcctggagcccgacctcgaggacaacgtggtgcggctctcgagccaccacgtggtcagcgtggactgcgacaacgagcccgtggcgcaccgcacgaacaccgccatctgcctgggcatcaaccagcgcaagtcctacgtgttcaacttccggcgctacgaggagaagtgctgcggccgcaccatcgtcaacctggacctgctgctggggttcatcaagtgcatccaccagtaccagtacatcacggtctgcttccgcgacaagaagatggtgctgcacacgcccgggaaggtggacaacttcttccgcgagtactccatgaccgagtgggcgcccgacctcgagcgcttctcgttcaagatccccatctcctccgtgaacaaactccgcggcttcaagaagcgcgtggtcatgttcgagtcgcgcgtggtcatggacgccgacgacaacatcatcggcatgctcttcaccgaccgcgtgggcatgtaccgcgtgaacgtgttcatgtcctttcaggaccggtctctttcatgcgactaa

SEQ ID NO: 12771 - DNA, 51 bp, unidentified; identical to SEQ ID NO: 4313
  source 1..51: mol_type = other DNA
  misc_feature 1..51: note = Synthetic

SEQ ID NO: 12772 - DNA, 150 bp, unidentified; identical to SEQ ID NO: 4315
  misc_feature 1..150: note = Synthetic
  source 1..150: mol_type = other DNA

SEQ ID NO: 12773 - DNA, 84 bp, unidentified; identical to SEQ ID NO: 4317
  misc_feature 1..84: note = Synthetic
  source 1..84: mol_type = other DNA

SEQ ID NO: 12774 - DNA, 48 bp, unidentified; identical to SEQ ID NO: 4318
  source 1..48: mol_type = other DNA
  misc_feature 1..48: note = Synthetic

SEQ ID NO: 12775 - DNA, 27 bp, unidentified
  source 1..27: mol_type = other DNA
  misc_feature 1..27: note = Synthetic
atgctgtggtccagcccctacatatag

SEQ ID NO: 12776 - DNA, 27 bp, unidentified
  misc_feature 1..27: note = Synthetic
  source 1..27: mol_type = other DNA
atgctgtggtccagcccctacatatag

SEQ ID NO: 12777 - DNA, 48 bp, unidentified; identical to SEQ ID NO: 4318
  source 1..48: mol_type = other DNA
  misc_feature 1..48: note = Synthetic

SEQ ID NO: 12778 - DNA, 48 bp, unidentified; identical to SEQ ID NO: 4318
  misc_feature 1..48: note = Synthetic
  source 1..48: mol_type = other DNA

SEQ ID NO: 12779 - DNA, 243 bp, unidentified
  source 1..243: mol_type = other DNA
  misc_feature 1..243: note = Synthetic
ctggcgccggtggtgttctaccgctcgggcggcgagggcaaagtcaccttcgcggttaagaagatcaccatgccgcgcgagtgctcgctgaccgtgctcggtctcgagggcgagcagacgtgtgtgcgcatgagcgagactcagcccacattcaccgaggagcaggacgtgcgcggcctgggcgtcgtcgatcctggcacgggcttcgaggacgaggagttggaagcgccgttcaatatctag

SEQ ID NO: 12780 - DNA, 42 bp, unidentified; identical to SEQ ID NO: 4321
  source 1..42: mol_type = other DNA
  misc_feature 1..42: note = Synthetic

SEQ ID NO: 12781 - DNA, 684 bp, unidentified
  source 1..684: mol_type = other DNA
  misc_feature 1..684: note = Synthetic
atgagtaaagagattcccacgccttacatgtggagctatcagccccaaatggggttggcagcaggcgcttcccaggactactccacccgcatgaattggcttagcgccgggccctcaatgatatcacgggttaatgatatacgagcttatcgaaaccagttactcctagaacagtcagctctcaccaccacaccccgtcaacaccttaatccccgaaattggcccgccaccctggtgtaccaggaaaatcccgctcccaccaccgtactacttcctcgagacgcccaggccgaagttcagatgactaacgcaggtgtacagctggcgggcggttccgccctatgtcgtcaccgacctcaacagagtataaaacgcctggtgattagaggccgaggtatccagctcaacgacgagtcggttagctcttcgcttggtctgcgaccagacggagtcttccaaatcgccggctgtgggagatcttccttcactcctcgtcaggctgtgctgactttggagagttcgtcctcgcagccccgctcgggcggcattggaactctccagtttgtggaggagtttactccctctgtctacttcaaccccttctccggctctcctggccagtacccggacgagttcataccaaacttcgacgcaatcagcgagtcagtggatggctatgattga

SEQ ID NO: 12782 - DNA, 1683 bp, unidentified
  misc_feature 1..1683: note = Synthetic
  source 1..1683: mol_type = other DNA
atgaagcggatacaaataaatttaattttaacgatcgcgtgtatacaattatcgactgaatctcaacccacacccgtaagtataactgaattatatacctcggccgctacccgaaagcccgatcccgccgtcgcgcccacctcggccgcttcccgaaagcccgatcccgccgtcgcgcccacctcggccgcttcccgaaagcccgatcccgccgtcgcgcccacctcggccgcttcccgaaagcccgatcccgccgtcgcgcccacctcggccgctacccgaaagcccgatcccgccgtcgcgcccacctcggccgcttcccgaaagcccgatcccgccgtcgcgcccacctcggccgctacccgaaagcccgatcccgccgtcgcgcccacctcggccgcttcccgaaagcccgatcccgcagccaacacccaacattcacaaccaccttttctatatgaaaatatacaatgcgttcacggcggaatacaatccataccctattttcacacatttatcatgccttgttacatgcgtctaacgaccggacaacaggcggcctttaagcagcaacaaaaaacatatgaacaatattctttagatccggaaggttcaaatataacaaggtggaagtcgcttatacgccccgatcttcatattgaagtttggtttacgcgtcaccttatagatccgcaccgtcaactgggcaatgcgttaatacgcatgccagatttaccggttatgttatatagcaacagtgccgatttaaacttaataaacaaccctgagatatttacacacgctaaggaaaattatgtaataccagatgttaaaacaacgtctgatttttctgtaacaattttatctatggatgctaccacggagggaacgtatatttggcgagtcgttaatacaaaaactaagaacgtcatatcggaacacagtattacagttacaacgtattatcgtccaaatattaccgttgtcggcgatccagtcttaaccggacagacatacgcagcctactgtaacgtatcaaagtattatccaccgcactcggtacgtgttcggtggacttcaaggtttggtaacatcggaaaaaattttataaccgatgcaatacaagaatatgccaatggattatttagttatgtttcggcggtacgaattccacagcaaaaacaaatggattacccacccccagccatccaatgtaatgttttatggattcgggatggcgtctctaatatgaaatattctgctgtcgttacccctgacgtctatccatttcccaacgtgtctataggtattattgatggacacatagtatgtacggcaaaatgtgtgccacgtggcgttgtacatttcgtatggtgggttaacgattctcccattaaccacgaaaacagtgagattactggggtgtgtgatcaaaacaaacggtttgtaaacatgcaaagttcttgtccaacatcggaactcgacggacctatcacctattcgtgtcatctagatggttaccctaaaaaattccctccgttttcggccgtttatacctacgatgcatctacctacgccactacattttccgttgtagcagttataattggtgtgatatctatccttgggacattgggtcttatcgcagttatcgcaaccctatgcatccgttgctgttcataa

SEQ ID NO: 12783 - DNA, 57 bp, unidentified; identical to SEQ ID NO: 4327
  misc_feature 1..57: note = Synthetic
  source 1..57: mol_type = other DNA

SEQ ID NO: 12784 - DNA, 66 bp, unidentified
  source 1..66: mol_type = other DNA
  misc_feature 1..66: note = Synthetic
acgttaacgccgaacgacctgtcccatgcttcgtcgtcaacgccgttgtccaccctctcgccctag

SEQ ID NO: 12785 - DNA, 180 bp, unidentified
  misc_feature 1..180: note = Synthetic
  source 1..180: mol_type = other DNA
gtgcggatcgtcgtcgaagggggcctagactcccacctgcttcgtatcttcagccagcgcccgatcctggtccagcgccaacagggcaacaccctcctgaccctttactgcatctgcaaccaccccggcctgcatgaaagtctttgttgtctgctgtgtactgagtataataaaagctga

SEQ ID NO: 12786 - DNA, 39 bp, unidentified; identical to SEQ ID NO: 3769
  source 1..39: mol_type = other DNA
  misc_feature 1..39: note = Synthetic

SEQ ID NO: 12787 - DNA, 99 bp, unidentified; identical to SEQ ID NO: 4335
  source 1..99: mol_type = other DNA
  misc_feature 1..99: note = Synthetic

SEQ ID NO: 12788 - DNA, 561 bp, unidentified
  misc_feature 1..561: note = Synthetic
  source 1..561: mol_type = other DNA
atggcgggctgttgcgtgccggggacgggggactcttgcggcggggacggtggtgaggacggggacaggggcatttcgcggcggggacggggagttgcgggatggcgagctgttgcgtggcggggacgggggactcttgcggcggggacggggacgggggcctttcgcggcggacacggggaacacagacggcacgcacacgcagctcgcctatttaacctccacccactacaacacacacatgccgcacaatcatgccagccacagacacaaacagcacccacaccacgccgcttcacccagaggaccaacacacgttacccttacaccacagcaccacacaacctcatgtccaaacttcggacaaacacgccgacaaacaacaccgcacgcagatggagctcgacgccgcggactacgctgcttgcgcacaggcccgccaacacctctacggtcaaacacaaccccaactacacgcataccccaacgccaacccacaggaaagcgctcattttcgcacagagaatcaacatcaactcacaaatctacttcacaacatag

SEQ ID NO: 12789 - DNA, 192 bp, unidentified
  source 1..192: mol_type = other DNA
  misc_feature 1..192: note = Synthetic
ctgatgcacagtttgcaaagagctctgactggagctggaaccgagggtgagaattacttcgacatgggagctgacttgcagtggcagcctagtcgcagggctctgagcgccgcgacggcaggatgtgagcttccttacatagaagaggcggatgaaggcgaggaggaagagggcgagtacttggaagactga

SEQ ID NO: 12790 - DNA, 1851 bp, unidentified
  misc_feature 1..1851: note = Synthetic
  source 1..1851: mol_type = other DNA
gtgtttggagtgccaggaaagtggggtgggatgtcgctgtgtagattgttgctcatgcttgcaatgtgctgcggggtgtcaaggggctcccaaacgctcccagccggaggcaggcgtggccagcgccgccgtgacaattcagcccagtggagcactcaacaacgccccgagggagccgtcggccccgcccctctcacagacgttgtcaccgcggcaggtactcgcacggtaccagatgtagatcaagccggtgccgtgctggtgcgccagtataatctagtgaccagcccgttaggcctggccacccttggtagcaccaatgccttgctttatgccgcaccggtgtcaccgttaatgccgcttcaggacggcacgacgtctaatatcatgagcacggagtctagcaactatgctcaataccgtgtacagggcctaactgtccgctggcgcccagttgtgccaaatgcggtgggcggcttctctataagcatggcctattggccccagacaacatccacccctacaagcattgacatgaattccatcacgtccactgacgtccgtgtggtgcttcagccgggctctgctggtttgctgactataccacatgagcgtttggcgtataagaacaatggttggcggtccgtcgaaacggtatccgtcccacaggaggatgccacgtccggcatgctcatggtttgtgtccacgggaccccctggaatagttataccaatagtgtttacaccgggccgcttggtatggttgattttgccataaagttacagctaaggaacttgtcgcccggtaatacaaatgccagggtcacccgtgtgaaggtgacggccccacataccatcaaggctgacccatctggtgctaccataacaacagcagctgcggccaggtttatggcggatgtgcgttggggcttgggcactgctgaggatggcgaaattggtcacggcatccttggtgttctgtttaacctggcggacacagttttaggtggcttgccctcgacactgctgcgggcggcgagtggtcagtacatgtacggccggcctgtggggaacgcgaacggcgagcctgaggtgaaactgtatatgtcggttgaggatgccgttaacgataaacctattatggtcccccatgacatcgacctcgggaccagcactgtcacctgccaggactatgggaatcagcatgtggatgaccgcccatccccggccccggcccctaagcgagctttgggcaccctaaggtcaggggatgtgttgcgtattactggctccatgcagtatgtgactaacgccgagttgttaccgcagagtgtgtcacaggggtactttggggccggcagcaccatgatggtgcataatttgatcactggtgtgcgcgcccccgccagttcagtcgactggacgaaggcaacagtggatggggtccaggtgaagactgtcgatgctagttctgggagtaataggtttgcagcgttacctgcatttggaaagccagctgtgtgggggccccagggcgctgggtatttctaccagtataacagcacccaccaggagtggatttattttcttcagaatggtagctccgtggtttggtatgcatatactaatatgttgggccagaagtcagatacatccattctttttgaggtccggccaatccaagctagtgatcagccttggtttttggcacaccacactggcggcgatgactgtaccacctgtctgcctctggggttaagaacatgttgccgccaggcgccagaagaccagtcacctgagacgcgccggctcctagaccggcttagtaggacattcccctcaccaccctaa

SEQ ID NO: 12791 - DNA, 243 bp, unidentified
  source 1..243: mol_type = other DNA
  misc_feature 1..243: note = Synthetic
atggagtacgcgtctgaccagcttctgcctcgtgacatgcaaattttatttcccacgatctattgtagattgaacgccatcaactactgtcagtatttaaaaacctttctcgtccagcgggcacagcctgcagcctgcgatcatactctggtgttggagagcaaggtggacacggtaaggcaggtcctgcgcaagatcgtgagcacggacgccgtattctccgaggcgcgggcacggccctga

SEQ ID NO: 12792 - DNA, 243 bp, unidentified; identical to SEQ ID NO: 12791
  misc_feature 1..243: note = Synthetic
  source 1..243: mol_type = other DNA

SEQ ID NO: 12793 - DNA, 2127 bp, unidentified
  misc_feature 1..2127: note = Synthetic
  source 1..2127: mol_type = other DNA
atggataaagttttaaacagagaggaatctttgcagctaatggaccttctaggtcttgaaaggagtgcctgggggaatattcctctgatgagaaaggcatatttaaaaaaatgcaaggagtttcatcctgataaaggaggagatgaagaaaaaatgaagaaaatgaatactctgtacaagaaaatggaagatggagtaaaatatgctcatcaacctgactttggaggcttctgggatgcaactgagattccaacctatggaactgatgaatgggagcagtggtggaatgcctttaatgaggaaaacctgttttgctcagaagaaatgccatctagtgatgatgaggctactgctgactctcaacattctactcctccaaaaaagaagagaaaggtagaagaccccaaggactttccttcagaattgctaagttttttgagtcatgctgtgtttagtaatagaactcttgcttgctttgctatttacaccacaaaggaaaaagctgcactgctatacaagaaaattatggaaaaatattctgtaacctttataagtaggcataacagttataatcataacatactgttttttcttactccacacaggcatagagtgtctgctattaataactatgctcaaaaattgtgtacctttagctttttaatttgtaaaggggttaataaggaatatttgatgtatagtgccttgactagagatccattttctgttattgaggaaagtttgccaggtgggttaaaggagcatgattttaatccagaagaagcagaggaaactaaacaagtgtcctggaagcttgtaacagagtatgcaatggaaacaaaatgtgatgatgtgttgttattgcttgggatgtacttggaatttcagtacagttttgaaatgtgtttaaaatgtattaaaaaagaacagcccagccactataagtaccatgaaaagcattatgcaaatgctgctatatttgctgacagcaaaaaccaaaaaaccatatgccaacaggctgttgatactgttttagctaaaaagcgggttgatagcctacaattaactagagaacaaatgttaacaaacagatttaatgatcttttggataggatggatataatgtttggttctacaggctctgctgacatagaagaatggatggctggagttgcttggctacactgtttgttgcccaaaatggattcagtggtgtatgactttttaaaatgcatggtgtacaacattcctaaaaaaagatactggctgtttaaaggaccaattgatagtggtaaaactacattagcagctgctttgcttgaattatgtggggggaaagctttaaatgttaatttgcccttggacaggctgaactttgagctaggagtagctattgaccagtttttagtagtttttgaggatgtaaagggcactggaggggagtccagagatttgccttcaggtcagggaattaataacctggacaatttaagggattatttggatggcagtgttaaggtaaacttagaaaagaaacacctaaataaaagaactcaaatatttccccctggaatagtcaccatgaatgagtacagtgtgcctaaaacactgcaggccagatttgtaaaacaaatagattttaggcccaaagattatttaaagcattgcctggaacgcagtgagtttttgttagaaaagagaataattcaaagtggcattgctttgcttcttatgttaatttggtacagacctgtggctgagtttgctcaaagtattcagagcagaattgtggagtggaaagagagattggacaaagagtttagtttgtcagtgtatcaaaaaatgaagtttaatgtggctatgggaattggagttttagattggctaagaaacagtgatgatgatgatgaagacagccaggaaaatgctgataaaaatgaagatggtggggagaagaacatggaagactcagggcatgaaacaggcattgattcacagtcccaaggctcatttcaggcccctcagtcctcacagtctgttcatgatcataatcagccataccacatttgtagaggttttacttgctttaaaaaacctcccacacctccccctgaacctgaaacataa

SEQ ID NO: 12794 - DNA, 525 bp, unidentified
  misc_feature 1..525: note = Synthetic
  source 1..525: mol_type = other DNA
atggataaagttttaaacagagaggaatctttgcagctaatggaccttctaggtcttgaaaggagtgcctgggggaatattcctctgatgagaaaggcatatttaaaaaaatgcaaggagtttcatcctgataaaggaggagatgaagaaaaaatgaagaaaatgaatactctgtacaagaaaatggaagatggagtaaaatatgctcatcaacctgactttggaggcttctgggatgcaactgaggtatttgcttcttccttaaatcctggtgttgatgcaatgtactgcaaacaatggcctgagtgtgcaaagaaaatgtctgctaactgcatatgcttgctgtgcttactgaggatgaagcatgaaaatagaaaattatacaggaaagatccacttgtgtgggttgattgctactgcttcgattgctttagaatgtggtttggacttgatctttgtgaaggaaccttacttctgtggtgtgacataattggacaaactacctacagagatttaaagctctaa

SEQ ID NO: 12795 - DNA, 390 bp, unidentified
  misc_feature 1..390: note = Synthetic
  source 1..390: mol_type = other DNA
atggaagtaattaatatttttttagaatctgacactggaagagttaagctagctatagattcctgtgaaaaagataaaaattttattcctatgtggaaagcagtagatatttttataaaaaagttaagaaaatacattgatgttgaaaaatcatcattttatttagttattaagaataaagatattttttattttaaatacaacaaaggttctgttacacaacttgaaaatgaattttttacatttaacgaaaatagaatttttgtaaacagctataatgaaatcattggtatagaatttataattacagatacaatgcctataagtatatatccgttaaacaatatattaattttagcctcatcaaacaacaagcaattttatgattaa

SEQ ID NO: 12796 - DNA, 39 bp, unidentified; identical to SEQ ID NO: 4345
  misc_feature 1..39: note = Synthetic
  source 1..39: mol_type = other DNA

SEQ ID NO: 12797 - DNA, 1863 bp, unidentified
  source 1..1863: mol_type = other DNA
  misc_feature 1..1863: note = Synthetic
atggcggccgccgcaacacccggcgccaagcgccccgcggaccccgcccgcgaccccgatagtcccccgaagcggccccgacccaacagcctagatctggcgaccgtctttgggccccgccccgccccaccccgccccacgtcaccgggggccccgggttcccattggccccagagccccccacgtgggcaacccgacggcggggccccgggcgaaaaggcccggcccgcgtccccggccctctctgaggcctcatccggcccgccaacccccgacattcccctctcgccggggggcgcacacgccatcgacccggactgcagccccggtcccccggaccccgacccgatgtggtcggcgtcggcgatccccaacgcactgcccccccatatcttggcggaaacgttcgagcgccacctgcgcggcctgctgcgcggcgtccgctcccctctggccatcgggcccctgtgggctcgcctggactatctgtgctccctcgtcgtgtcgctggaggcggccggcatggtggaccgcgggctcggccggcacctctggcgcctgacgcgccgcgcccccccgtccgccgccgaagccgtcgccccccgcccgcttatgggattttacgaggcggcgacgcaaaaccaggccgactgccagctctgggccctgcttcggcggggcctgacgaccgcctccacgctgcggtggggcgcgcagggtccgtgcttctcgtcccagtggctcacccacaacgccagcctgcggctggacgcccagtcgtcggcggtgatgttcgggcgggtgaacgagccgacggcccgaaacctgctgtttcgctactgcgtgggccgcgcggacgcgggcgtcaacgacgacgccgacgccgggcgcttcgtctttcaccaacccggggacctcgccgaggagaacgtgcacgcgtgcggggtcctcatggacggccacacgggcatggtgggggcgtccctggacatcctcgtgtgccccagggaccctcacggctacctggcccccgccccccagacccccctggccttctacgaggttaagtgccgagccaagtacgcgttcgaccccgcggaccccggcgcccccgcggcctccgcgtacgaggacctgatggcgcggcgatcgccggaggcgttccgggcgttcatccggtccatccccaaccccggcgtgcgctacttcgcgcccgggcgcgttccgggcccggaggaggcgctcgtcacccaagaccgggactggctcgattcccgcgccgccggcgaaaaaaggcgatgctccgccccggatcgggcgctggtggagttaaatagcggcgttgtctcggaggtgcttctgtttggcgtccccgaccttgagcgtcgcaccatctctcccgtggcctggagctccggggagctggttcgccgcgagcccatcttcgccaacccccgccacccgaacttcaaacagatcttggtgcagggatacgtcctcgacagccactttcccgactgccccctgcaaccgcacctggtgacgttcctcggcaggcaccgcgcgggcgcggaggagggcgtgacgttccgcctggaggacggccgcggagcgcccgccgggcgtggcggggcccccggacccgccaaggcatcgatcctcccggaccaggccgttccgatcgccctgatcatcacccccgtccgcgtcgagccggggatctaccgggacatccggcgaaacagccgcctggccttcgacgatacgctcgccaagttatgggcctcgcgttctccggggcgcggccctgctgctgccgacacaacgtcatcaccaccgacggcggggaggtcgtctcgctga

SEQ ID NO: 12798 - DNA, 234 bp, unidentified
  misc_feature 1..234: note = Synthetic
  source 1..234: mol_type = other DNA
ataagcgccttccgcgaaagcccaaacacgcgatgctgcagctgctcaagagatttgtcggcgccgccgtcgccgcgggcggcaccgagcgcgcgttcgccgcactgtctacctcagaggccatggagctcgtgctcgccggcgtgcaccccaggcacctcccgcggcggctgtacgcgcgcgtggtcgccgagcaccctacgcacctgcacctcttccgcccgcagcacgtaa

SEQ ID NO: 12799 - DNA, 2178 bp, unidentified
  misc_feature 1..2178: note = Synthetic
  source 1..2178: mol_type = other DNA
atgctgcagctgctcaagagatttgtcggcgccgccgtcgccgcgggcggcaccgagcgcgcgttcgccgcactgtctacctcagaggccatggagctcgtgctcgccggcgtgcaccccaggcacctcccgcggcggctgtacgcgcgcgtggtcgccgagcaccctacgcacctgcacctcttccgcccgcagcacgtaacgcccgaggacctgctcgaagagctctcgcggcggcgctgcggcgcgctcttcgccagacacatcgagttccacacgccctacatcgtgcagttcgcggactacgcgctgctctgccgctgcattccctacatgaacatcacggaggacgacgtccggctcatcgaggagcgattccccgacaacgtggacgacatcatcctgcacgtgaacgcgcgcagcgtgcacaacatcaacgcggccttcacggacgaaatgatcgaggacatcgtcgaggcgcgccccgagatggcctccgcgctgtacaccacgcggccgctggacctctgtttcctcaagcgcatgctcgcggaacacaggatacctccagtgaactcggggctcgcggcggcgacgccggcggacgccgtcgagatgctcgcgcagatgcgcggcgtctacgacgtgcggcgcacactggacgggctgcggcactccgtgctctgctccgagaccatgaaggccttcgcgctcgagcgcatccgcgccggccaggtgcgggagtacctccactacgccagggactacctcagagaccgcgtctccgacaccggcgccttcgggcccatcttcgtggacgccgccacctacctcaacgtggacaacctctcgcacgtggagctttcagtgatcgcggacttccccggcaagttcgacgcggagttcgtgtggcgcaaggcgctcgagggcgggttcggcgacgtgctcggcaagctgctgcgggctatgcccgtggacgccgtcaccgaggacgtctgcgtgtccgtcgtggagtccggccaccgggtgcccgtcaccgacatgtgcgtgcacaccagacgcgtcgccgaggcctgcgtgcgccagaacttccccgacgtcgtggacttcctcgacaccgtacctctatccacactgctcgcggttggcgcagacccctttgcctccgattacgtcttctctacctcgtggataaacgaccgtccggagctcgcggaggagtacgtgcgccggttcgcgttctcgggctcgcggatgacgcggctgctcttcggctacgcgctgaagccgaacgcactcaagcgcgtgcacgacgcactctgcgccacggaggtgctcgcgccggcggcgagggagtcgcttggctgtctggtgtcggagggagaaatgcggctgcgctcggtcgatgacgtgcggcgccctcgcgagtgcgaggatcccgaggagggctacgagcaggagatcttctcttcggagcacagcgcgcgcctggccgtgtgtctgaccgcgtacgcggtgccgggcctgcgcgggtacgcgaccgcagacctcgcgatcacgcggcacgcttccggaaacgtgatcctgcaggcactgcgcgtaaaccgcgcggacagcgccgtgaacaaggtcgtggaccacgccttcgacatcgcgcgcatggccagctacgggctcttcctgatcccggacatgttcacgcccgggtggacgccggtgctggacctcgcgcgcggactgccggcgggcccgccgcccgtgctcaagatggagcggctctccttctcgccctcggagctggtgcagtaccgcggcatcgggcgcttcgcgctgggctgcgagaccgcggtcgggccctgctcggaccaccagatggccatggacgcgctcttccgctgtctcttcgtgcacatcgccatgggcgtgcgcctcgtggagcaggtggacgtggtagtgctcgtgcggcagatcgtcaacgcgttcacggacggactctgcgcagagcgcttcgtggagcccgtggacttcgtcgagcaggaactgatggagctgcgcgcctgggcgccggacgcgcgcacgattgagtcctcgcgcgtgtgcatgcgaaacacgacgctgctgtgccagcaggtctgcgcgcggcttgcgctgtacaataatcgcgggttcagaaaatag

SEQ ID NO: 12800 - DNA, 1332 bp, unidentified
  source 1..1332: mol_type = other DNA
  misc_feature 1..1332: note = Synthetic
ttgctctccccggtgttgggagacatgggaactcaaaagaaggggccgcgttctgaaaaagtctcgccgtacgacaccacgacacccgaggtggaagcgttagatcatcaaatggatacgcttaattggcgaatttggataattcaggtgatgatgttcactttgggtgcggtaatgctcctggctacgttaattgccgcctcttctgaatataccgggatcccttgtttttatgctgccgtagttgattatgagttatttaacgccaccctagatgggggggtatggtccggaaatagaggtggatacagcgccccggttttgtttttggaaccacatagcgttgtggcatttacttactacacggctttaacggcaatggccatggcggtatatacactgatcacggccgcgattatacaccgagaaacgaaaaatcaacgtgtccggcaaagctccggtgttgcatggttagttgtagatcccacaacacttttttggggtcttttgtcattgtggttattaaacgccgttgtgttattattagcttacaagcaaatcggcgtggctgctacattatatcttggacattttgcgacaagtgtaatatttacaacgtatttttgtggacgcggaaaattggacgaaacgaacataaaagcggtcgcaaatttacgacagcagagcgtctttttatatcgccttgcggggcctacgcgcgcagtgttcgtgaatttgatggctgcgttgatggcgatatgtatcctatttgtatcattaatgctggaacttgtggtggcgaatcatctacatacgggactgtggtcatcggtgtccgtggccatgtctacatttagtacattgtcagttgtatatcttatagtatcagaattaattttggcgcattatatacacgtgttaataggaccgtccctgggaacgctcgtggcctgtgctacgttgggaaccgccgcgcactcgtatatggaccgattatatgaccctatatcggttcaatctccacggttaattcccacaactcggggaaccttggcttgcctggccgtgttttccgttgtcatgttgcttctcagattgatgcgtgcatatgtgtatcatcgacagaaacgcagtcggttctacggtgccgtaagaagagtacccgagcgggtacggggatacatacgaaaagtaaaacctgcacatagaaattctcgccgcacaaattacccatcacaaggctacggctacgtctatgaaaatgactcaacatatgaaacggaccgcgaggatgagctgttatacgagcgatcaaacagtgggtgggagtag

SEQ ID NO: 12801 - DNA, 1014 bp, unidentified
  misc_feature 1..1014: note = Synthetic
  source 1..1014: mol_type = other DNA
atggatcccgccgtctcccccgcgagcaccgaccccctagatacccacgcgtcgggggccggggcggccccgattccggtgtgccccacccccgagcggtacttctacacctcccagtgccccgacatcaaccaccttcgctccctcagcatcctgaaccgctggctggagaccgagctcgtgttcgtgggggacgaggaggacgtctccaagctctccgagggcgagctcggcttctaccgctttctgtttgccttcctgtcggccgcggacgacctggtgacggaaaacctgggcggcctctccggcctcttcgaacagaaggacattcttcactactacgtggagcaggaatgcatcgaggtcgtccactcgcgcgtctacaacatcatccagctggtgctctttcacaacaacgaccaggcgcgccgcgcctatgtggcccgcaccatcaaccacccggccattcgcgtcaaggtggactggctggaggcgcgggtgcgggaatgcgactcgatcccggagaagttcatcctcatgatcctcatcgagggcgtcttttttgccgcctcgttcgccgccatcgcgtacctgcgcaccaacaacctcctgcgggtcacctgccagtcgaacgacctcatcagccgcgacgaggccgtgcatacgacagcctcgtgctacatctacaacaactacctcgggggccacgccaagcccgaggcggcgcgcgtgtaccggctgtttcgggaggcggtggatatcgagatcgggttcatccgatcccaggccccgacggacagctctatcctgagtccgggggccctggcggccatcgagaactacgtgcgattcagcgcggatcgcctgctgggcctgatccatatgcagcccctgtattccgcccccgcccccgacgccagctttcccctcagcctcatgtccaccgacaaacacaccaacttcttcgagtgccgcagcacctcgtacgccggggccgtcgtcaacgatctgtga

SEQ ID NO: 12802 - DNA, 1548 bp, unidentified; identical to SEQ ID NO: 12678
  source 1..1548: mol_type = other DNA
  misc_feature 1..1548: note = Synthetic

SEQ ID NO: 12803 - DNA, 366 bp, unidentified
  source 1..366: mol_type = other DNA
  misc_feature 1..366: note = Synthetic
atgaacgctctccaagaagatactccacccggaccatcaacggtgttcaggccaccaacaagttcacggccgttggaaacccctcactgcagagagatccggattggtatcgctggaattacaatcactctatcgctgtgtggctgcgcgaatgctcgcgctcccacgctaagatctgcaactgcggacaattcagaaagcactggtttcaagaatgtgccggacttgaggaccgatcaacccaagcctccctcgaagaagcgatcctgcgacccctccgagtacagggtaagcgagctaaaagaaagcttgattaccactactcccagccgaccccgaaccgcaaaaaggcgtataagactgtaa

SEQ ID NO: 12804 - DNA, 906 bp, unidentified
  source 1..906: mol_type = other DNA
  misc_feature 1..906: note = Synthetic
atccggcggcggggaaacgtggagattcgggtctactacgagtctgtgcggccctctcgatcccgaagccatctgaagccgtccgaccatcaagaattcccagggcaccacgtgtccccagggagccccgggttccccgagagcccagggaaccgcgagttccacgatctcccagagaacccagggtcccgcgcatacccagggacccgcgacccccacgacccccacgggtgcccagggagcctagacccccacgggaaccccgcgcaacccgcgggcttgcctagcccggtcccctacgcccccctcggcagcccggacccctcatcgccgcgccaacgcacgtacgttctgccccgcgtcgggatccataacgcgcccgcgtccgacacccgggccccaaagcgtgccaactcgcggcaccgcgcggaccggcccccggagtcccccggctccgagttgtaccctctcaacgcccaggccctggcgcacctgcagatgctgcccgcggaccaccgggccttttttcggacggtgatcgaggtgtcccgcctgtgtgctctcaacacccacgacccaccgcccccgctggcgggagccagggtcggacaggaggcgcagctggttcatacccaatggcttcgggccaacagggagtcctcgccgctgtggccctggcggacggccgccatgaattttatcgccgcggctgcgccctgcgtccaaacacatcgccatatgcacgacctgctgatggcatgcgccttctggtgctgtttggcgcacgcgtcgacgtgttcctacgcggggttatattcggcacactgccagcatttgtttcgtgcgtttgggtgcggacccccggtcctgaccacgtcccggggacagggtggttggtgtaattaa

SEQ ID NO: 12805 - DNA, 1047 bp, unidentified
  source 1..1047: mol_type = other DNA
  misc_feature 1..1047: note = Synthetic
acgcgtttgtctacaataaacatgtcaacggataaaaccgatgtaaaaatgggcgttttgcgtatttatttggacggggcgtatggaattggaaaaacaaccgccgccgaagaatttttacaccactttgcaataacaccaaaccggatcttactcattggggagcccctgtcgtattggcgtaaccttgcaggggaggacgccatttgcggaatttacggaacacaaactcgccgtcttaatggagacgtttcgcctgaagacgcacaacgcctcacggctcattttcagagcctgttctgttctccgcatgcaattatgcatgcgaaaatctcggcattgatggacacaagtacatcggatctcgtacaagtaaataaggagccgtataaaattatgttatccgaccgacacccaatcgcctcaactatatgttttcccttgtccagatacttagtgggagatatgtccccagcggcgcttcctgggttattgtttacgcttcccgctgaaccccccgggaccaacttggtagtttgtaccgtttcactccccagtcatttatccagagtaagcaaacgggccagaccgggagaaacggttaatctgccgtttgttatggttctgagaaatgtatatataatgcttattaatacaattatatttcttaaaactaacaactggcacgcgggctggaacacactgtcattttgtaatgatgtatttaaacagaaattacaaaaatccgagtgtataaaactacgcgaagtacctgggattgaagacacgttattcgccgtgcttaaacttccggagctttgcggagagtttggaaatattctgccgttatgggcatggggaatggagaccctttcaaactgctcacgaagcatgtctccgttcgtattatcgttagaacagacaccccagcatgcggcacaagaactaaaaactctgctaccccagatgaccccggcaaacatgtcctccggtgcatggaatatattgaaagagcttgttaatgccgttcaggacaacacttcctaa

SEQ ID NO: 12806 - DNA, 15 bp, unidentified
  misc_feature 1..15: note = Synthetic
  source 1..15: mol_type = other DNA
attgtgttctcctag

SEQ ID NO: 12807 - DNA, 2376 bp, unidentified
  source 1..2376: mol_type = other DNA
  misc_feature 1..2376: note = Synthetic
atggagactcagccatcgtcgccaacctcgccatctgcccccaccgccgacaagaagcagcagcagaatgagagcttaaccgccccgccgcccagccccgccacctttgtcgcggccccagacatgcaagagatggaggaatccattcagattgacctgggctatgtgacgcccgcggagcacgaggaggagcttgcagtgcgcttttcaacccaggaagagatacaccaagaacagccagagcaggaagcaaagagcgagcatgactacctccaccagagcgggggggaggacgccctcatcaagcatctggcccggcaggccatcatcgtcaaggacgcgctgcttgaccgcaccgaggtgcccctcagcgtggaggagctcagccgcgcctacgagctcaacctcttctcgccgcgcgtgccccccaagcgccagcccaacggcacctgcgagcccaacccacgcctcaacttctacccggtcttcgcggtgcccgaggccctggccacctaccacatctttttcaagaaccaaaggatccctgtctcctgtcgcgccaaccgcacccgcgccgactcccttttcaacctgggccccggtgcccgcctacctgatatcgcctccttggaagaggttcccaagatcttcgagggtctgggcagcgacgagactcgggccgcaaacgctctgcaaggagaaggaggagatcatgagcaccacagcgccctggtggagttggaaggcgacaacgcgcgtctggcggtgctcaagcgcacgatcgagctgacccatttcgcctacccggcgcttaacctgccccccaaagtcatgagcacggttatggatcaggtgctcatcaagcgcgcgtcgcccatctccaaggagatgcaagaccccgagagctccgaggagggcaagcccgtggtcagcgacgagcagctggcgcggtggctgggaccccaagctagtccccagagcttggaagagcggcgcaagctcataatggccgtggtcctggtgaccgcggagctggagtgtctgcgccgcttcttcgccgacgcagaaattctgcgcaaggtcgaggagaacctgcactacatcttcaggcacgggttcgtacgccaggcctgcaagatctccaacgtggagctgaccaacctggtctcctacatgggcatcttgcacgagaaccgcctggggcagaacgtgctgcacaccaccctgcgcggggaggcccgccgcgactacatccgcgactgcgtttacctctacctctgccacacctggcagacagccatgggcgtgtggcagcagtgtctggaggagcagaacctaaaagagctctgcaagctcctgcagaagaacctcaaggccctgtggaccgggttcgacgagcgcaccaccgcctcggacctggcagacctcattttccccgagcgtctcaggctgacgctgcgcaacggtttgcccgactttatgagtcaaagcatgttgcaaaactttcgctctttcatcctcgaacgctccgggatcctgccggccacctgctccgcgctgccctcggacttcgtgccgctgaccttccgcgagtgccccccgccgctgtggagccactgctacctgctgcgcttggccaactacctggcctaccactcggacgtgatcgaggacgtcagcagcgagggcctgctcgagtgccactgccgctgcaacctctgcacgccgcaccgctccctggcctgcaacccccagctgctgagcgagacccagatcatcggcaccttcgagttgcaagggcccggcgatgagggttctgccgccaaggggggtctgaaactcaccccggggctgtggacctcggcctacttgcgcaagttcgtgcccgaggactaccatcccttcgagatcaggttctacgaggaccaatcccagccgcccaaggccgagctgtcggcctgcgtcatcacccagggggcgatcctggcccaattgcaagctatccagaaatcccgccaagaattcttgctgaaaaagggccgcggggtctaccttgatccccagaccggtgaggagcttaaccccggcttcccccaggatgccccgaggaagcagcaagaagctgaaagtggagctgccgcccgtggaggatttggaggaagactgggagagcagtcaggcagaggaggaggagatggaagactgggacagcactcaggcagaggacagcctgcaagacagtctggaagacgaggaggaggcagaggaggtggaagaagtagccgccgccgccagaccgtcgtcctcggcggagaaagcaagcagcacggataccatctccgctccgggtcggggtcccgctcgaccccacagtag

SEQ ID NO: 12808 - DNA, 45 bp, unidentified; identical to SEQ ID NO: 4370
  misc_feature 1..45: note = Synthetic
  source 1..45: mol_type = other DNA

SEQ ID NO: 12809 - DNA, 249 bp, unidentified
  source 1..249: mol_type = other DNA
  misc_feature 1..249: note = Synthetic
atgcggcggctgcgtgcggagggcgccgtgcgcctcgcgtgcgagtgcatgggatacccgcgccagaacgcggtggagctcataaataatatgcgctttcaaataacggaagaaggcgcggtggcgaactttgagctggcgaacgcgagctgtctcggcaacccgaccgcggagtccatcttcgcgagcttcgcgcagtttgtgccgatattcaacgtgctctcggcgatcgcgcgcgcgcagccatga

SEQ ID NO: 12810 - DNA, 81 bp, unidentified; identical to SEQ ID NO: 4372
  misc_feature 1..81: note = Synthetic
  source 1..81: mol_type = other DNA

SEQ ID NO: 12811 - DNA, 249 bp, unidentified
  source 1..249: mol_type = other DNA
  misc_feature 1..249: note = Synthetic
acgcacatcaacgggcgcaagctagacgcggtgctggtcatcgtcaaggacgccttcatggcgggcgtgaccatggacggcgtcttccagaaggaaaacctggtctggcgcggcaagtacacgtaccgcgtgacgaagtcaagcttcgaggtcccagagttccgcgggaaggccggcggacacccgcccgacggacgcgtgttggccagccgggagttcgtgacgcggtcgctctatactgtactataa

SEQ ID NO: 12812 - DNA, 192 bp, unidentified
  misc_feature 1..192: note = Synthetic
  source 1..192: mol_type = other DNA
ttggcaaccacggggagaacctcagcgtcgataatgttagaattttcttcctccgcgctaatgaggctaaacagaaactgcgtaagagctctgcgaagatcgctatgcttaaatttggcagttggaaggtcgaggttgttaataatcattaccccggaaatgcatcaaacccggttgcagataatagtctaa

SEQ ID NO: 12813 - DNA, 192 bp, unidentified; identical to SEQ ID NO: 12812
  source 1..192: mol_type = other DNA
  misc_feature 1..192: note = Synthetic

SEQ ID NO: 12814 - DNA, 375 bp, unidentified
  misc_feature 1..375: note = Synthetic
  source 1..375: mol_type = other DNA
atgcagaccccccgctctcgccgacaagcaacaactactcggtcagaactattaacggcatacgagcatccaacaagttcgtgtccgccagcagaaacgacctcgatagagatccaaattggtatcgggtcaactataattactctatcgctacctggctacgccagtgtgcgcgttctcacgacgagatctgcacctgcggacgatggaggagtcactggttccaggaggctagcggactcgtcacacaggagacccagacggaccagctcgccagagatctacgtcggcttcagcgcaaaggagaggcggcaaaaagaaaacttgattaccttaagagaagagggaccccccataaaaaaactaagactgtga

SEQ ID NO: 12815 - DNA, 141 bp, unidentified; identical to SEQ ID NO: 4379
  source 1..141: mol_type = other DNA
  misc_feature 1..141: note = Synthetic

SEQ ID NO: 12816 - DNA, 120 bp, unidentified
  source 1..120: mol_type = other DNA
  misc_feature 1..120: note = Synthetic
acggacgcgcccgaccgcttcatgaagacctggtccgtgaactgcgcgctgaagctgggcgtggagccggactccgcgcgcgcgccggcgctgctgcaggagttctacccgcagccataa

SEQ ID NO: 12817 - DNA, 2409 bp, unidentified
  misc_feature 1..2409: note = Synthetic
  source 1..2409: mol_type = other DNA
atggagactcagccatcgccaacctcgccatctgcccccaccgccggcgacgagaagcagcagcagcagaatgaaagcttaaccgccccgccgcccagccccgcctccgacgcagccgcggtcccagacatgcaagagatggaggaatccatcgagattgacctgggctatgtgacgcccgcggagcatgaggaggagctggcagtgcgctttcaatcgtcaagccaggaagataaagaacagccagagcaggaagcagagaacgagcagagtcaggctgggctcgagcatggcgactacctccacctgagcggggaggaggacgcgctcatcaagcatctggcccggcaggccaccatcgtcaaggacgcgctgctcgaccgcaccgaggtgcccctcagcgtggaggagctcagccgcgcctacgagctcaacctcttctcgccgcgcgtgccccccaagcgccagcccaacggcacctgcgagcccaacccccgcctcaacttctacccggtcttcgcggtgcccgaggccctggccacctaccacatctttttcaagaaccaaaagatccccgtctcctgccgcgccaaccgcacccgcgccgacgccctcttcaacctgggtcccggcgcccgcctacctgatatcgcctccttggaagaggttcccaagatcttcgagggtctgggcagcgacgagactcgggccgcgaacgctctgcaaggagaaggaggaggagagcatgagcaccacagcgccctggtcgagttggaaggcgacaacgcgcggctggcggtgctcaaacgcacggtcgagctgacccatttcgcctacccggctctgaacctgcccccgaaagtcatgagcgcggtcatggaccaggtgctcatcaagcgcgcgtcgcccatctccgaggacgagggcatgcaagactccgaggagggcaagcccgtggtcagcgacgagcagctggcccggtggctgggtcctaatgctacccctcaaagtttggaagagcggcgcaagctcatgatggccgtggtcctggtgaccgtggagctggagtgcctgcgccgcttcttcgccgacgcggagaccctgcgcaaggtcgaggagaacctgcactacctcttcaggcacgggttcgtgcgccaggcctgcaagatctccaacgtggagctgaccaacctggtctcctacatgggcatcttgcacgagaaccgcctggggcagaacgtgctgcacaccaccctgcgcggggaggcccgccgcgactacatccgcgactgcgtctacctctacctctgccacacctggcagacgggcatgggcgtgtggcagcagtgtctggaggagcagaacctgaaagagctctgcaagctcctgcaaaagaacctcaagggtctgtggaccgggttcgacgagcggaccaccgcctcggacctggccgacctcatcttccccgagcgcctcaggctgacgctgcgcaacggcctgcccgactttatgagccaaagcatgttgcaaaactttcgctctttcatcctcgaacgctccggaatcctgcccgccacctgctccgcgctgccctcggacttcgtgccgctgaccttccgcgagtgccccccgccgctgtggagccactgctacctgctgcgcctggccaactacctggcctaccactcggacgtgatcgaggacgtcagcggcgagggcctgctcgagtgccactgccgctgcaacctctgcacgccgcaccgctccctggcctgcaacccccagctgctgagcgagacccagatcatcggcaccttcgagttgcaagggcccagcgagggcgagggagccaaggggggtctgaaactcaccccggggctgtggacctcggcctacttgcgcaagttcgtgcccgaggattaccatcccttcgagatcaggttctacgaggaccaatcccagccgcccaaggccgagctgtcggcctgcgtcatcacccagggggcgatcctggcccaattgcaagccatccagaaatcccgccaagaattcttgctgaaaaagggccgcggggtctacctcgacccccagaccggtgaggagctcaaccccggcttcccccaggatgccccgaggaaacaagaagctgaaagtggagctgccgcccgtggaggatttggaggaagactgggagaacagcagtcaggcagaggagatggaggaagactgggacagcactcaggcagaggaggacagcctgcaagacagtctggaggaagacgaggaggaggcagaggaggaggtggaagaagcagccgccgccagaccgtcgtcctcggcgggggagaaagcaagcagcacggataccatctccgctccgggtcggggtcccgctcggccccacagtag

SEQ ID NO: 12818 - DNA, 3870 bp, unidentified
  source 1..3870: mol_type = other DNA
  misc_feature 1..3870: note = Synthetic
atggccgtgatcgcgcgcgtgagctacagcctctacacgcagaacgagatcaacgccaacgacatcctcattaaccacgtgaagaacgacgacgatgtgggcaccgtcaaggacagcaggctgggcgccatggacggcgttctgtgccgcacgtgcgggcgcacggaactggagtgcttcgggcactggggaaaggtgcgtctctacgagacgcacatcgtgaagcccgagtacatccacgaggtgatccgcatcttcaaccacatctgctcgcgctgcgggctgctgcgctcgcgcgagccctacaccgtgcctgagctgggcacgctgtccgcgcacgcgctgaagaagctcaaggacaagatctcgtcgaagaagaagtcgtgctggaacaacaagtgcatgcagccttaccagaagatcgcgttctcgaagaagaaggtgtgcttcgtcaacaagatcgacgacgtggcgattccgaatgcactcctgtaccagaagatcacgtccatccaccgcagcttctggccgctgctggagatcttccaggaccccgcgaacctcttctacaagggctacttccccatcccgccgctgatcatccgcccggccatcagcttctggatcgacagcatccccaaggagaccaacgagctcacctacctgctgggcatgatcgtgaagtacagcaacatgaacgccgaggagcaggtgttgcagaaggcggtcatcgagtacgacaacatcaagatcatcgtgaacaataacacctccagtatcaacctgtcctacattacgtctggcaagaacaacatgatccgcagttacatggtggcgcgccgcaaagaccagacggcgcgctccgtgctgggccccgaccccgagctgtcaattaccgaggtgggcatccccgactacgtgcgcaacacgctcaccgagaaggtcttcgtgaacgccttcacggtgcccgccgtggaggagctcttccgcaggaacgaggtcaagttctacttcaacaagcggctgggccagctcactcgcatcaagcccaacaagtttgtcaagaacaaaatccacctgctgcccggggactgggtggagacgcgcgtgcgcgagttcaccagcatcatcttcgggcgccagccttcgctgcacaagtacaacgtaatctcctcgtccgtgcgcgccacgagcggggacacgatcaagatcccgcccggcattgccaactcgcagaacgcggacttcgacggcgacgaggagtggatgatcctggagcagaaccccaagagcgtgctggagcagagcatcctcatgtaccccgcgacgctgctcaagcacgacgtgcacggcatgcctgtctacggcgccatccaagacgagatcctggcggcctacgcgctcttccgccagcgcgacctcagcctggcggccgtgcgcaacatcctgggcaagtacggcgcgggctttgcgggcgcacccggcgcgcgcttctcgggccgcgacatcttccgcttcctggtgggccaggacatttactaccccggcatcctggaagcgggcgagatcgtggcggaggacatcgacagcagctttgtcgttgccatgaagcaccgctcgctggccgggctcatcgccgactaccgctccagcctggaaggcattgccttcatcgaccgctcgtcctacgtctttaagcgctacctgcgcatctacggctttagcgtgaccttccgcaacctgtgccccgacttccgcttcgtgaaccgcctgcacgcgctgaacgtggagaagatcaacctggtcaaggccgcgtaccggcagtacctggccgacgtagccagcggcgccgtgctgccgctgtcgccgggcgacgaggcggaggcggtggacgccatgctgtcggggctcaccaacatgaacgtgcgcgagatcgaggcctacatgcggcgcacgctgcgcgaggacccggacaacagcctgctgcgcatgtcctgcgccggctacaaggtgaaccccaccgagctcatgtacatcctgggcacctacgggcagcagcgcgtggacggcgaggcggtggagccgcgcgtgctgggccgagtgctgccctacttcccgcccgactcgcgcgaccccgagggccgaggctacatcctgaactcgctcatgcagggcctcaccggctcgcagtactactttgccatgctcatcgcgcgctcgcagtccacggacatcgtctgcgagacctcgcgcaccggcacgctggcgcgcaagatcatcaagaagatggaggacatggtggtcaacggctacgggcaggtggtctacggcagcacgctcatcaagtacgccgcgaactacgccaaggtgctgggctccgtgtgcaagccggtggagctcatctacccgcacgagggcctggagtggttcctggagatcagcgccatctgggagcgcatcaagcacggcttcatctacagccagcgccagaagctggcgcgagtgatcctggcacccttcaacttccaggtcttcgtgcggcccgccgcgccgcgcgacgccatgccgtccaaggcgctctacgacctcatccaagcggtggtagaggacgtgcgcgagaactacttcttcggcgtctcggacatcgacttcatcgagtacgtcttcctcacgcacctgaaccccgcgcgcgtgcgtatcagccgcgccaccgccacgctcatcttcgcgaagctctacgagaagctgaactacacgctgggcggcgggctgcccatcggcatcatctcggcgcaggtgctcagcgagaagttcacgcagcaggcgctgtccagcttccacaccaccgagaagagcggcggcgtcaagcgcaagctgggcttcaacgagtttaacaacctcaccaacctcagcaagaacaagacggagatcgtgacgctgatctcggacgacgcgcgccgcctacagaccgtgaaaatcaacttcgagttcgtgtgcctgggcgagctcatgccgcgcatctccgtgcgccgcgccgagggcgcagcgcaccacaccatcgacatcctggtgaaccgcctctacgtgaagcggcacgcgctcaccgagctggtggtggagcacatgatcgagaagttcgtggccttcagcgtgctggtcaaggactgggggctggagacgaccgtggaggacgcgtacaacatccgcttcaccgtgctggccagcttcgtcgagccgcaggagctgaacaagaacaagttcatgctcatgctgcccggcgccgccaacaagggcaagatcagcaagtacaagatccccatttccgagtaccaggcctatgacgacttccacagcacgcggcgcatgttccgcatgaccgtggagctcatgagcctcaaggagctgggcatcttcaacctgctgggcgtgaacgtcatcccgggcatctggaacacgtacgagatcttcggcatcgaggcggccaagagcttcctgtgcgaggcgctgctgggcacctacggcgagggcctggactacctctaccagccgtgcgacctgctggccagcctgctctgcatgaactacgagccagagtccataaacaagttcaagtttggcgcggccagcgcgctcaagcgcgccaccttcggcgacaacaaggcgctgatcaacgccgcgctgcacaagcgcaccgagcccgtggcggacaacagcagctgccacttcttcagcaaggtcccgcgcatcggcaccggctactaccgctacttcgtgaacctggagctgctgctgcgcatggagaagacgctcaccgagcaggtggtggagaagaaggtggaggacattgctacgcacgtggaggacttttag

SEQ ID NO: 12819 - DNA, 222 bp, unidentified
  source 1..222: mol_type = other DNA
  misc_feature 1..222: note = Synthetic
atgtttcgaaagttcgtcgtcgactctttcggaagaagtgcgcctgctgcgctccggctgctattgctgcgtgctcatgtaatcgccgcgagctcgcgtcatcgctgcacgcgaatgtccggcgctggagaaagaagtgtgcctgctgcgcttctattgccgcgtgctcgtgttgttgcatcttcttgctttttttttttcgttgcctgcactgagaagtga

SEQ ID NO: 12820 - DNA, 45 bp, unidentified; identical to SEQ ID NO: 4387
  misc_feature 1..45: note = Synthetic
  source 1..45: mol_type = other DNA

SEQ ID NO: 12821 - DNA, 45 bp, unidentified; identical to SEQ ID NO: 4388
  misc_feature 1..45: note = Synthetic
  source 1..45: mol_type = other DNA

SEQ ID NO: 12822 - DNA, 894 bp, unidentified
  source 1..894: mol_type = other DNA
  misc_feature 1..894: note = Synthetic
atgagcaagatctttgtcaatcctagtgctattagagccggtctggccgatcttgagatggctgaagaaactgttgatctgatcaatagaaatatcgaagacaatcaggctcatctccaaggggaacccatagaagtggacaatctccctgaggatatggggcgacttcacctggatgatggaaaatcgcccaaccctggtgagatggccaaggtgggagaaggcaagtatcgagaggactttcagatggatgaaggagaggatcctagcctcctgttccagtcatacctggacaatgttggagtccaaatagtcagacaaataaggtcaggagagagatttctcaagatatggtcacagaccgtagaagagattatatcctatgtcgcggtcaactttcccaaccctccaggaaagtcttcagaggataaatcaacccagactaccggccgagagctcaagaaggagacaacacccactccttctcagagagaaagccaatcctcgaaagccaggatggcggctcaaactgcttctggccctccagcccttgaatggtcggccaccaatgaagaggatgatctatcagtggaggctgagatcgctcaccagattgcagaaagtttctccaaaaaatataagtttccctctcgatcctcagggatactcttgtataattttgagcaattgaaaatgaaccttgatgatatagttaaagaggcaaaaaatgtaccaggtgtgacccgtttagcccgtgacgggtccaaactccccctaagatgtgtactgggatgggtcgccttggccaactctaagaaattccagttgttagtcgaatccaacaagctgagtaaaatcatgcaagatgacttgaatcgctatacatcttgctaa

SEQ ID NO: 12823 - DNA, 87 bp, unidentified
  misc_feature 1..87: note = Synthetic
  source 1..87: mol_type = other DNA
atgtttcccacgtgcaccagctcagcgatgccgacaaggacttttatagatttttgtttacgtttttgggaatggccgaacgcctag

SEQ ID NO: 12824 - DNA, 87 bp, unidentified; identical to SEQ ID NO: 12823
  source 1..87: mol_type = other DNA
  misc_feature 1..87: note = Synthetic

SEQ ID NO: 12825 - DNA, 1374 bp, unidentified
  misc_feature 1..1374: note = Synthetic
  source 1..1374: mol_type = other DNA
aaggacatggtacaagcaatgatagacatggacattatgaagggcatcctagaggactctgtgtcctcctctgagtttgacgaatcgagggacgacgagacggacgcaccgacactggaagacgagcaattgtccgaacccgccgagcctccggcagacgagcgcatccgtggtacccagtcggcccagggaatcccaccccccctgggccgcatcccaaaaaaatctcaaggtcgttctcaactgcgcagtgagatccagttttgctccccactgtctcgacccaggtccccctcaccagtaaacaggtacggtaaaaaaatcaagtttggaaccgccggtcaaaacacacgtcctccccctgaaaagcgtcctcggcgcagaccacgcgaccgcctacaatacggcagaacaacacggggcggacagtgtcgcgctgcaccgaagcgagcgacccgccgtccgcaggtcaattgccagcggcaggatgacgacgtcagacagggtgtgtctgacgccgtaaagaaactcagactccctgcgagcatgataattgacggtgagagcccccgcttcgacgactcgatcatcccccgccaccatggcgcatgtttcaatgtcttcattcccgccccaccatcccacgtcccggaggtgtttacggacagggatatcaccgctctcataagagcagggggcaaagacgacgaactcataaacaaaaaaatcagcgcaaaaaagattgaccacctccacagacagatgctgtcttttgtgaccagccgccacaatcaagcgtactgggtgagttgccgtcgagaaaccgcagccgccggaggcctgcaaacgcttggggctttcgtggaggaacaaatgacgtgggcccagacggttgtgcgccacggggggtggtttgatgagaaggacatagatataattttggacaccgcaatatttgtctgcaatgcgtttgttaccagatttagattacttcatctttcctgcgtttttgacaagcagagcgagctagcactgatcaaacaggtggcatatttggtagcgatgggaaaccgcttagtagaggcatgtaaccttcttggcgaggtcaagcttaacttcaggggagggctgctcttggcctttgtcctaactatcccaggcatgcagagtcgcagaagtatttctgcgcgcggacaggagctgtttagaacacttctggaatactacaggccaggggatgtgatggggctactaaacgtgatagtaatggaacatcacagcttgtgcagaaacagtgaatgtgcagcggcaacccgggccgcaatggggtcggccaaatttaacaagggtttattcttttatccactttcttaa

SEQ ID NO: 12826 - DNA, 1374 bp, unidentified
  source 1..1374: mol_type = other DNA
  misc_feature 1..1374: note = Synthetic
aaggacatggtacaagcaatgatagacatggacattatgaagggcatcctagaggactctgtgtcctcctctgagtttgacgaatcgagggacgacgagacggacgcaccgacactggaagacgagcaattgtccgaacccgccgagcctccggcagacgagcgcatccgtggtacccagtcggcccagggaatcccaccccccctgggccgcatcccaaaaaaatctcaaggtcgttctcaactgcgcagtgagatccagttttgctccccactgtctcgacccaggtccccctcaccagtaaacaggtacggtaaaaaaatcaagtttggaaccgccggtcaaaacacacgtcctccccctgaaaagcgtcctcggcgcagaccacgcgaccgcctacaatacggcagaacaacacggggcggacagtgtcgcgctgcaccgaagcgagcgacccgccgtccgcaggtcaattgccagcggcaggatgacgacgtcagacagggtgtgtctgacgccgtaaagaaactcagactccctgcgagcatgataattgacggtgagagcccccgcttcgacgactcgatcatcccccgccaccatggcgcatgtttcaatgtcttcattcccgccccaccatcccacgtcccggaggtgtttacggacagggatatcaccgctctcataagagcagggggcaaagacgacgaactcataaacaaaaaaatcagcgcaaaaaagattgaccacctccacagacagatgctgtcttttgtgaccagccgccataatcaagcgtactgggtgagttgccgtcgagaaaccgcagccgccggaggcctgcaaacgcttggggctttcgtggaggaacaaatgacgtgggcccagacggttgtgcgccacggggggtggtttgatgagaaggacatagatataattttggacaccgcaatatttgtctgcaatgcgtttgttaccagatttagattacttcatctttcctgcgtttttgacaagcagagcgagctagcactgatcaaacaggtggcatatttggtagcgatgggaaaccgcttagtagaggcatgtaaccttcttggcgaggtcaagcttaacttcaggggagggctgctcttggcctttgtcctaactatcccaggcatgcagagtcgcagaagtatttctgcgcgcggacaggagctgtttagaacacttctggaatactacaggccaggggatgtgatggggctactaaacgtgatagtaatggaacatcacagcttgtgcagaaacagtgaatgtgcagcggcaacccgggccgcaatggggtcggccaaatttaacaagggtttattcttttatccactttcttaa

SEQ ID NO: 12827 - DNA, 33 bp, unidentified; identical to SEQ ID NO: 4398
  misc_feature 1..33: note = Synthetic
  source 1..33: mol_type = other DNA

SEQ ID NO: 12828 - DNA, 15 bp, unidentified
  source 1..15: mol_type = other DNA
  misc_feature 1..15: note = Synthetic
atggtttatatttaa

SEQ ID NO: 12829 - DNA, 24 bp, unidentified
  misc_feature 1..24: note = Synthetic
  source 1..24: mol_type = other DNA
atgttcactgggacttctacatag

SEQ ID NO: 12830 - DNA, 2430 bp, unidentified
  source 1..2430: mol_type = other DNA
  misc_feature 1..2430: note = Synthetic
aagagcaactccatcgcatttggaggggaggaccaaagaagtgtgatggctagcaagtccaacaagcaggtaactgttgaggtcagtaacaatggccgcaacaggagtaaatcaagggcccgctcacaatctagagggcgggacagagcagttaaaatcacagttaattcaaaaaacaggactagaagacagcccggacgcggcaaacatcaatcttctcaacgtgtccgtaacattgtcaataagcaactcaggaaacaaggtgtcacaggaccaaaacctgcaatatgtcagagggcaacagcaacccttgggacggtcgggtcaaacaccagcggcaccactgagattgaggcgtgtattctcctcaaccctgtccttgttaaggacgctactgggagcactcagtttggccccgtgcaggcgttaggtgcacagtattccatgtggaagctgaagtacctgaacgttaagctaacctctatggttggtgcatctgctgtcaatggtactgtcctcagagtttcacttaaccccacatctacaccatcgtccactagctggtcaggattgggtgcacgtaagcaccttgatgttacggtcggtaagaatgcaacatttaaactgaaaccttccgctattggtggtgatcaattacttctacaaggtggacatcaccctgaccttggattgagtttctacaccaaccttttcaaacaactaaaggaactttacccaacccttaggcttctctccttagggccaccagaaattgcgcacgtagcaaaactggaaggcatgagccaccttgaagtctggacggccattcaagaagctggattggattccctgccgggggctggtgcagaaatattgaacgaccgtgtccgtatattgatctctatgggtaaatgtggtggtcaagaatggttggatgtgatgcgtgctgcccacaaaatcaatcttccaacttcggcaaccatgatgtttggacatatgggaaacaatcgaagaacgtttcgagcacttggtatggcttcgcgaagtacaaagcgaaaaaccagccgatgcttatggattcatcgcctttatcccttggcctttccaagaggatggtggtttgtgaaactcattgctggaagaactagaactggcacccgtagcttttatgtatatcccagctaccaagatgcattgtccaacaaaccagcactttgcactggcagcactccaggaggcatgaggacccggaatcctgtgacaacaaccctacagttcacacaaatgaaccaacctagtctaggacatggtgaagcgccagctgcatttgggagatccattccaacacccggggaggagtttaaagttattctcacatttggagccccaatgagccctaacgcaaacaacaaacaaaactgggttaataagccccttgatgcgccttcgggccattacaatgttaaaattgccaaggatgttgatcactatctaaccatgcagggttttacctctatagcatctgttgactggtacaccacagatttccaaccatccgaggcgcctgcccccatacaaggcctgcaggtacttgtgaatagctctaagaaagctgatgtgtatgcagtcaaacaatttgttacagcgcagacaaacaacaagcaccaggttacaaccctgttcctagtaaaggtaacaactggattccaggtgaacaactacctgagttactttcatagggcgtctcccagtggagatgctacaactaacttgttggttagaggtgatacatatacagcagggataagcttcacccagggtggatggtatttgttgacaaatacatccattgttgatggggcgttgccacctggttggatctggaataacgtggagctcaaaactaacacagcataccacatggacaaaggcctgatccacctaataatgcctttgcctgagtctacacaaatgtgctatgaaatgttgacatctattccacgctccagggcggctggctatggctatgatagtgacaacactgaatacttggatgccccagactttgctgaccagctcagagaagacatagagacagacacagacatcgagagtacagaggacgaagacgatgaagcggacaggtttgacatcatagacacttctgacgaagaagatgaaaatgagacagaccgtgtaaccctcctctcaactctcgtaaaccaaggaatgacaatgacgcgtgccacaaggatagcaaggcgcgcattccccacgcttacagataagatcaagcgtggagtatacatggacctgcttgtttcgggggcaagccctaacagtgcatggtcccatgcgtgtgaagaagcacgcaaagcagcaggggaaatcaatccctgcacatctggaagccgcgaccacgccgagtag

SEQ ID NO: 12831 - DNA, 90 bp, unidentified; identical to SEQ ID NO: 4404
  misc_feature 1..90: note = Synthetic
  source 1..90: mol_type = other DNA

SEQ ID NO: 12832 - DNA, 651 bp, unidentified
  source 1..651: mol_type = other DNA
  misc_feature 1..651: note = Synthetic
atggagttgccgcgaaaatacgacagggtaacgggcaggatattgacacataagaataaccagatgtgtacaaccgaatgttctcagatgtataatttacacaatcctatcacgtttgagttgggacttggaaacgtgtttgtctgtatgcggtgtttgacggttcaccactgtgatatgcaaactgactgtaccattgtcaacacgcatgaggggtatgtctgtgcaaaaacgggtttattttatagcggttggatgcctgcatatgcagactgcttcttagaaccgatctgtgagccgaatattgaaacggttaatgtcgtggtggtcttgttatcttatgtatatagttttttgatggaaaacaaggaacgatatgctgccattattgatagcattattaaagatgggaaatttataaaaaacgtggaagacgctgtgttttatacttttaacgcggtttttactaactcaactttcaataagattcctctgacgacgataagtcgtctttttgttcagttgattataggaggacacgctaaaggaacgatttatgacagtaatgtaattcgcgtcagtcgtcggaaacgagaagacagtttactaaaaaagatgagattggagtatggaaacgcacttatactatga

SEQ ID NO: 12833 - DNA, 33 bp, unidentified; identical to SEQ ID NO: 4407
  source 1..33: mol_type = other DNA
  misc_feature 1..33: note = Synthetic

SEQ ID NO: 12834 - DNA, 156 bp, unidentified; identical to SEQ ID NO: 4412
  source 1..156: mol_type = other DNA
  misc_feature 1..156: note = Synthetic

SEQ ID NO: 12835 - DNA, 117 bp, unidentified
  source 1..117: mol_type = other DNA
  misc_feature 1..117: note = Synthetic
atgggacttcttcttccatgttgtcatccagggccgggggacccggcctgtccttgtccattttgtctgcaacaaaagtgtgactcaccaacaccgcaccccccttgtacctattaa

SEQ ID NO: 12836 - DNA, 117 bp, unidentified
  source 1..117: mol_type = other DNA
  misc_feature 1..117: note = Synthetic
ttgcactcgaccgtcttcactccgcacagcttcacgtacttgagcaccaagaagcggccctgcacggtgtccacgatgaacggctccttgagaatcatttatagtctgggaaaataa

SEQ ID NO: 12837 - DNA, 102 bp, unidentified; identical to SEQ ID NO: 4417
  misc_feature 1..102: note = Synthetic
  source 1..102: mol_type = other DNA

SEQ ID NO: 12838 - DNA, 102 bp, unidentified; identical to SEQ ID NO: 4417
  misc_feature 1..102: note = Synthetic
  source 1..102: mol_type = other DNA

SEQ ID NO: 12839 - DNA, 102 bp, unidentified; identical to SEQ ID NO: 4417
  misc_feature 1..102: note = Synthetic
  source 1..102: mol_type = other DNA

SEQ ID NO: 12840 - DNA, 657 bp, unidentified
  source 1..657: mol_type = other DNA
  misc_feature 1..657: note = Synthetic
atggagatggcgttgccgcgaaaatacgacagggtaacgggcagaatattgacacataagaataaccagatgtgcacaaccgaatgttctcagatgtataatttacacaatcctatcacgtttgagttgggacttggaaacgtgtttgtctgtatgcggtgtttgacggttcaccactgtgatatgcaaactgactgtaccattgtcaacacgcatgaggggtatgtctgtgcgaaaacgggtttattttatagcggttggatgcctacatatgccgactgtttcttagaaccaatctgtgagccgaatatcgaaacggttaatgtcgtggtggtcttgttatcttatgtatatagttttctgatggaaaacaaggaacgatatgctgccattattgatagcattattaaagatggaaaatttataaaaaacgtggaagacgctgtgttttatacttttaatgcggtttttacgaactcaactttcaataagattcctttgacgacgataagtcggctttttgttcagttgattataggaggacacgctaaaggaacgatttatgacagcaatgtaattcgcgtcagtcgtcggaaacgagaagacagtttactaaaaaagatgagattggagtatggaaacgcacttatactatga

SEQ ID NO: 12841 - DNA, 1065 bp, unidentified
  source 1..1065: mol_type = other DNA
  misc_feature 1..1065: note = Synthetic
atgtttttaatccaatgtttgatatcggccgttatattttacatacaagtgaccaacgctttgatcttcaagggcgaccacgtgagcttgcaagttaacagcagtctcacgtctatccttattcccatgcaaaatgataattatacagagataaaaggacagcttgtctttattggagagcaactacctaccgggacaaactatagcggaacactggaactgttatacgcggatacggtggcgttttgtttccggtcagtacaagtaataagatacgacggatgtccccggattagaacgagcgcttttatttcgtgtaggtacaaacattcgtggcattatggtaactcaacggatcggatatcaacagagccggatgctggtgtaatgttgaaaattaccaaaccgggaataaatgatgctggtgtgtatgtacttcttgttcggttagaccatagcagatccaccgatggtttcattcttggtgtaaatgtatatacagcgggctcgcatcacaacattcacggggttatctacacttctccgtctctacagaatggatattctacaagagccctttttcaacaagctcgtttgtgtgatttacccgcgacacccaaagggtccggtacctccctgtttcaacatatgcttgatcttcgtgccggtaaatcgttagaggataacccttggttacatgaggacgttgttacgacagaaactaagtccgttgttaaggaggggatagaaaatcacgtatatccaacggatatgtccacgttacccgaaaagtcccttaatgatcctccagaaaatctacttataattattcctatagtagcgtctgtcatgatcctcaccgccatggttattgttattgtaataagcgttaagcgacgtagaattaaaaaacatccaatttatcgcccaaatacaaaaacaagaaggggcatacaaaatgcgacaccagaatccgatgtgatgttggaggccgccattgcacaactagcaacgattcgcgaagaatcccccccacattccgttgtaaacccgtttgttaaatag

SEQ ID NO: 12842 - DNA, 96 bp, unidentified
  source 1..96: mol_type = other DNA
  misc_feature 1..96: note = Synthetic
acgccctcgactgacttgaccaaggacccaccgtccactcacattccactgccagacaacagactcaagctttttctgcatctacctcaccgataa

SEQ ID NO: 12843 - DNA, 1245 bp, unidentified
  misc_feature 1..1245: note = Synthetic
  source 1..1245: mol_type = other DNA
atggcagacatccccccggacccgcccgcgctcaacacgacgcctgcgaatcatgctcccccatccccacccccgggttcacggaagcgcagacgccccgtcctccccagctcgtcggaatctgagggtaagcccgacacagaatcggaatcctcctcgaccgagtcgtccgaggatgaggcgggagacctacgcggcgggcgccgtcgctccccgcgggagctcggggggaggtattttttggatctgtcggcagaatcgaccacggggacggaatcggagggaacggggccgtcggacgacgatgatgatgatgcgtcagacggctggttggttgacacacccccccgcaaatccaagcgaccccgaatcaacctgcgattaacgagctcccccgaccggcgtgcgggtgtggttttccccgaggtgtggagaagcgacagacctatccgcgcggcgcaaccccaggccccggcccagtcttccggggatcgcgcagccgcaccgcggcgctctgctcgccaggcccagatgcggagcggagccgcctggacgcttgatctgcattacatacgccagtgcgtcaaccagctctttcggatcctgcgtgccgccccgaacccgcccggcagcgccaaccgcctgcgccacctggtgcgagactgctacctcatgggctactgccggacccgcctggggccgcgcacgtggggccgcctgctgcagatctcgggcggaacctgggacgtgcgcctgcgaaacgcaatccgggaggtcgaggcgcattttgaacccgccgccgagcccgtgtgcgagctgccctgtctgaacgccaggcgttacggccccgagtgtgatgttggcaatctcgagaccaacggcggctcgacgagcgatgatgagatatcggatgcgacggactcggacgataccctcgcgtcccattccgacacggagggggggccctccccggccggccgggagaacccggaatccgcgtccggcggggctatcgcggctcggctggagtgtgagtttgggacgtttgactggacgtccgaggagggctcccagccctggctgtccgcggtggtcgccgataccagctccgccgaacgctctggcctacccgccccgggcgcgtgtcgcgcaacggaagccccagaacgcgaggacgggtgccgaaaaatgcgcttccccgccgcctgcccctatccctgcggccacacatttctccggccatga

SEQ ID NO: 12844 - DNA, 90 bp, unidentified
  misc_feature 1..90: note = Synthetic
  source 1..90: mol_type = other DNA
ctgtgttgcgcgcgcctgctctccgcgggaagaggacgccggcaagccgagccaaggatgcctgccagcagagctgcccgccagaagtga

SEQ ID NO: 12845 - DNA, 108 bp, unidentified; identical to SEQ ID NO: 4428
  misc_feature 1..108: note = Synthetic
  source 1..108: mol_type = other DNA

SEQ ID NO: 12846 - DNA, 1692 bp, unidentified
  source 1..1692: mol_type = other DNA
  misc_feature 1..1692: note = Synthetic
gtgatttgttcgccaggtctcaggatggcgcagtgcaatctcttttatcaatacccaattacaccaattttagaagggcatgtcagaaacatactgatttgtacagaaaaagatgtcgaaaagctccaaagtcagtcctcactaagacttcgggagaaaatagatcaagggcatcgcgacaagttgctaagaatgcgcctaaaaaccgaattagacgcactgcaaaaaaagatgcaaaaagacagtgacgttttgaattctcatttgaaagcgatagaggatgctttgctgtttacgaatgatggggaggtaaacgtcgaaacgaaagctgatgcgcaactgataccgaaatctcctgagaagctggaaaaattcaatcaggtcgctataaccccactcgacccctttataagatttacagacgattttagaggagaaatgatcaatacatttttcaataatgcccagatgtggaattttacgttcgggtcttggttctataagctcaagagggttttttacaatgagcccggtttaagaagggctttaaaacttactaatgtggattctctgactatttcaaaagagttactagcagttaccgtcaatgcgttggagcaagcgacggtgtatcctatattcggaagtgaaatgtcagacctggaagcagccttgtgtatcctggcagctttttattccacttatgagaattcacagatcgacgaacgtacaaccctagtagatgttataaccctcctgcctgtgatattcagattactcggcagtgaaattacagcattgaaaaatgtctctccttctggcacctattttggatttaatgatccttcttgtatgaaattttttgttcccatgagaaaaggcaagcattatgcagaaaacacattcgggaatcatgtgcttataaagatgttgctaggtagaggggtaatgcaaaaaattcccggtgagaaaattagccaaaattttgatgttgaagctcgtttacacggggccattaagaatgatgttttggtgtattggacatatcagctaatgaggccaaaattgggaaataatgttccaatcttcatacacgatcaacattatttacggtctggcttggttgcaattgaaagtctttttttattgtggcggatcctgaactcagaaagtttgtttaacaagagagttgggaagtttctcttaacttcgatttttccacagttggagaatgtcgatttcgccgaaaataactttgaagctggaaacattcaaaattttgaatacttaatgcaccattacgttgtgcctatgtacaacctgcagaatgacatatcaatttcgactctttttcccggtctcgtggccgtgtgtgtaaatgagagtgtgagattgggatgggaacataagtgtgcgggggctccgtccgatgccgttcaggttcaatctaaggaaaatccgttcgtggagtatatccgcgctcaaatggaacaacaagcggatgtggcgatacttgaaaagcatgactgcattctctttcatcttgaaaacggtttaaacatcactctatcttttacattaccgagacagagattgtttgcaatggcttcttcattatttaatgtaaatgatacttatgatttcatctattttctagttttgggttttctgccaataccggccgttatataa

SEQ ID NO: 12847 - DNA, 18 bp, unidentified
  source 1..18: mol_type = other DNA
  misc_feature 1..18: note = Synthetic
atgtcagaaacatactga

SEQ ID NO: 12848 - DNA, 1668 bp, unidentified
  source 1..1668: mol_type = other DNA
  misc_feature 1..1668: note = Synthetic
atggcgcagtgcaatctcttttatcaatacccaattacaccaattttagaagggcatgtcagaaacatactgatttgtacagaagaagatatcagaaggcttcaaagtcagtcctcactaagacttcgggagaaaatagatcaagggcatcgcgacaagttgctaagaatgcgcctaaaaaccgaattagacgcactgcaaagaaagatgcaaaaagacagtgacgttttgaattctcatttaaaagcgatagaggatgctttgctgtttacgaatgatggggaggtaaacgtcgaaacgaaagctgatacacaactgttaccgaaatctcctgagaggctggaaaaatttaatcaagttgccataaccccactcgacccctttataagatttacagacgattttagaggagaaatgatcaatacttttttcaataatgctcagatgtggaattttacgttcgggtcttggttttataagctcaagagggttttttacaatgagcctggcttaagaagggctttaaaaattactaatgtggattctttgactatttcgaaagagttattaacagttaccgtcaatgcgttggagcaagcgacggtgtatcctatattcggaagtgagatgtcagacctggaagcagccttgtgtatcctggcagctttttattccacttatgagaattcacagatcgacgaacgtacaaccctagtagatattataacccttctgcccgtgatatttagattactcggtagtgaaattacagcattgaaaaatgtctctccttctggcacctattttggatttaatgatccttcttgtatgaaattttttgttcccatgagaaaaggcaagcattatgcagaaaacacatttgggaatcatgtgcttgtaaagatgttgctaggtagaggagtgatgcaaaaaattcccggtgagaaagacagccaaaattttgatgttgaagctcgcttacacggagccattaagaatgatgttctggtgtattggacgtatcagctaatgagaccaaaattgggaaataatgttccaatctttatacacgatcaacattatttacggtctggcttggttgcaattgaaagtctctttttattgtggcggatcttgaactcagaaagtttgtttaacaagagagttgggaagtttctcctgacttcgatttttccacagctggagaatgttgatttcgccgaaaataactttgaagctggaaatattcaaaattttgaatacttaatgcaccattacgttgtgcctatgtacaacctgcagaatgacatatcaatttcgactctttttcccggtctcgtggccgtgtgtgtaaatgagagtgtgagattgggatgggaacataagtgtgcaggggctccgtccgatgccgttcaggttcaatctaaagaaaatccgttcgtggagtatatccgcgcacaaatggaacaacaggcggatgtggctatacttgaaaagcatgactgcattctctttcattttgaaaacggtttaaacattactctatcttttacattaccgagacagagattgtttgcaatggcctcttcattatttaatgtaaatgatacttatgatttcatctattttctagttttaggttttctgccaataccggccattatataa

SEQ ID NO: 12849 - DNA, 33 bp, unidentified; identical to SEQ ID NO: 4433
  source 1..33: mol_type = other DNA
  misc_feature 1..33: note = Synthetic

SEQ ID NO: 12850 - DNA, 60 bp, unidentified; identical to SEQ ID NO: 4434
  source 1..60: mol_type = other DNA
  misc_feature 1..60: note = Synthetic

SEQ ID NO: 12851 - DNA, 72 bp, unidentified
  misc_feature 1..72: note = Synthetic
  source 1..72: mol_type = other DNA
atggcactgttggggtatttggtagatatcgtagagcagtttctttcgcctttccatatgatcgcttcatag

SEQ ID NO: 12852 - DNA, 69 bp, unidentified; identical to SEQ ID NO: 4437
  misc_feature 1..69: note = Synthetic
  source 1..69: mol_type = other DNA

SEQ ID NO: 12853 - DNA, 456 bp, unidentified
  source 1..456: mol_type = other DNA
  misc_feature 1..456: note = Synthetic
atggcatccggggtttccccggcccacccccaaaccccggttggggcgggcagccgagacctttccttaaaaggcaccccatccgacggcatgcagcccagaggagcggacacgcttgaagggcactcgcttccgaccgacgggcccccgcaccggggcggcgaccatgatccggcggcggggaaacgtggagattcgggtctactacgagtctgtgcggccctctcgatcccgaagccatctgaagccgtccgaccatcaagaattcccagggcaccacgtgtccccagggagccccgggttccccgagagcccagggaaccgcgagttccacgatctcccagagaacccagggtcccgcgcatacccagggacccgcgacccccacgacccccacgggtgcccagggagcctagacccccacgggaaccccgcgcaacccgcgggcttgcctag

SEQ ID NO: 12854 - DNA, 1881 bp, unidentified
  misc_feature 1..1881: note = Synthetic
  source 1..1881: mol_type = other DNA
atcctcctgactatacgcctcacggaggcgtctgaggtcatgttcaacatgaacgtggacgagagcgcctctggcgccctcggctcctcggccattcctgttcaccccacgccggcctcggtccgactttttgagatcctgcagggaaagtacgcctacgtccagggacagaccatctacgccaacctccgcaaccccggagtcttctcgaggcaggtgtttacccatttgtttaaacgagccatctctcattgcacgtacgatgacgtgctacatgactggaacaagttcgaggcctgcatccagaagcgatggccgagcgatgactcgtgtgcgagccggtttcgtgagtccaccttcgagtcgtggtccacgaccatgaagctgaccgtgcgtgacctgctgaccaccaacatctaccgagtgctacacagccgctccgtgctctcctatgagcgttatgtggactggatctgcgccaccggcatggtgcccgccgttaagaagcccataacccaagagctccactccaagataaagagcctgagggacaggtgcgtctgtcgggaattggggcacgagaggaccatcaggagtatcgggacggaattatatgaggcaacgaaggaaataatagagtcgctcaactccacgttcatcccccagtttacggaggtgaccatcgagtaccttccgaggagcgacgagtatgtggcctactactgtggccgccgcatcaggctgcatgtgctcttccccccggccatctttgccggaacggtgaccttcgacagcccggtgcagcgcctctaccagaacattttcatgtgctaccgcacgctggagcatgccaagatctgccagctcctgaacacggcccctctcaaggccatcgtgggccacggggggcgagacatgtacaaggacatcctggcccatctggagcagaactcacagcgcaaggaccccaagaaggagctgctgaacctgctggtcaagctctcggagaacaagaccatcagcggggtcacggacgtggtggaggagttcataacggatgcctccaacaacctggtggaccgcaaccgtctatttggccagcccggggagacagctgcacagggcctaaagaaaaaggtctccaacacggtggtcaagtgtctgactgatcagataaacgagcaatttgaccagattaatggcctagagaaggagagggagctctatctaaagaagatccgctccatggagtctcagctgcaggcctccctgggtcccggcggcaacaacccagcggcgtcagcccccgccgcagttgcggcagaagccgcgtctgtagatatactgacgggcagcaccgcctccgcaatcgaaaagctgttcaactccccgtccgccagcctgggtgccagggtgtctggtcacaatgaaagcatcctaaacagtttcgtttctcaatacatccccccttcgcgggaaatgactaaggatctgactgaactttgggaaagcgagctgtttaacaccttcaagttaacacccgtggttgataatcaggggcagcgtctctacgtcagatactcgtcagacacgatctctatattattgggccccttcacctatctggtggcagagctttcaccggtggaactcgtgacagatgtctacgccaccctaggcatcgtggagatcatcgacgagctctaccggagcagtcgcctggccatctacatcgaggacctcggtcgaaaatactgccccgcgagcgcgaccgggggagatcatggcatccggcaagcaccatcagcccggggggacacggagcctgaccatgcaaaaagtaagcctgcgcgtgaccccccgcctggtgctggaagttaa

SEQ ID NO: 12855 - DNA, 792 bp, unidentified
  misc_feature 1..792: note = Synthetic
  source 1..792: mol_type = other DNA
atgtacccgcaccgcagcaaggacgaggagcgcaagctgtcgctgggcttcttcctgcagcggctggacttcctcacgtcgcgcgaggtcaacctgcagttccggtcgctggacgcgctgcgcaccgagaacgtcatgaagaagaacaacgtgctcgtggcgccgtacatcctcatcgcgacgctcgcggggcgcggcttccgcatgacggagaccatggtcgagctctacttccccgagctgtaccgcgagaccagcaagcgcttccgcttctgcgcgcagataaaggtcatccaggacttcctggggttcgcccacgacagctaccacacttacgacttcgagacgtacttcgcgttcgtggcgctggtgctgcgaggcgcggactctgtggccgaggccttcgacgtccgcgccgagagcgggctcgtgcgcagcctcaccgagatcacgtaccggctctacgtgatgcagctgcgctccgacgccgcgcagtggagcgtgagcaccggcgccgtagtttcgcaggcggtgaacaccgtgctgtcggtcgtcggcgaccttgccgcgcgcgcggaggccgagcggctcacgcccgtgtgcgacctcgcgcgcgagaacccgctctcgctcgatgacctgcgcaagtacggcccgcggctgcgctcgctgctcacgaccatggcgcgcgcgcgatccttcaagacgaaccggcgggacaaggacacactgtcccggttctgccgactgacggcgggccctagcccgtctgcgtgccgcgcgtcgccatag

SEQ ID NO: 12856 - DNA, 240 bp, unidentified
  misc_feature 1..240: note = Synthetic
  source 1..240: mol_type = other DNA
ttgcgccgccccgactgcagccgcccgacctccgaaggtctgtaccgctacccgccgggcgtgtacctcacgtacaactccgactgtccgctggtggccatcgtcgagagcggccccgacggctgcatcggaccccgctcggtcgtggtttacgaccgagacgttttttccatcctctactcggtcctgcagcacctcgcccccagactagcgggcggcgggagcgacgcgcccccgtag

SEQ ID NO: 12857 - DNA, 93 bp, unidentified
  misc_feature 1..93: note = Synthetic
  source 1..93: mol_type = other DNA
acggctgcatcggaccccgctcggtcgtggtttacgaccgagacgttttttccatcctctactcggtcctgcagcacctcgcccccagactag

SEQ ID NO: 12858 - DNA, 339 bp, unidentified; identical to SEQ ID NO: 12730
  source 1..339: mol_type = other DNA
  misc_feature 1..339: note = Synthetic

SEQ ID NO: 12859 - DNA, 1881 bp, unidentified
  misc_feature 1..1881: note = Synthetic
  source 1..1881: mol_type = other DNA
atcctcctgactatacgcctcacggaggcgtctgaggtcatgttcaacatgaacgtggacgagagcgcctctggcgctctcggctcctcggccattcctgtgcaccccacgccggcctcggtccgactttttgagatcctgcagggaaagtacgcctacgtccagggacagaccatctacgccaacctccgtaaccccggagtcttctcgaggcaggtgtttacccatttgtttaaacgagccatctctcattgcacgtacgatgacgtgctacatgactggaacaagttcgaggcctgcatccagaagcgatggccgagcgatgactcgtgtgcgagccggtttcgtgagtccaccttcgagtcgtggtccacgaccatgaagctgaccgtgcgtgacctgctgaccaccaacatctaccgagtgctacacagccgctccgtgctctcctatgagcgttatgtggactggatctgcgccaccggcatggtgcccgccgttaagaagcccataacccaagagctccactccaagataaagagcctgagggacaggtgcgtctgtcgggaattggggcatgagaggaccatcaggagtatcgggacggaattatatgaggcaacgagggaaataatagagtcgctcaactccacgttcatcccccagtttacggaggtgaccatcgagtaccttccggggagcgacgagtatgtggcctactactgtggccgccgcatcaggctgcatgtgctcttccccccggccatctttgccggaacggtgaccttcgacagcccggtgcagcgcctataccagaacattttcatgtgctaccgcacgctggagcatgccaagatctgccagctcctgaacacggcccctctcaaggccatcgtgggccacggggggcgagacatgtacaaggacatcctggcccatctggagcagaactcacagcgcaaggaccccaagaaggagctgctgaacctgctggtcaagctctcggagaacaagaccatcagcggggtcacggacgtggtggaggagttcataacggatgcctccaacaacctggtggaccgcaaccgtctatttggccagcccggggagacggctgcgcagggcctaaagaaaaaggtctccaacacggtggtcaagtgtctgactgatcagataaacgagcaatttgaccagattaatggcctagagaaggagagggagctctatctaaagaagatccgctccatggagtctcagctgcaggcctccctgggtcccggcggcaacaacccagcggcgtcagcccccgccgcagttgcggcagaagccgcgtctgtagatatactgacgggcagcaccgcctccgcaatcgaaaagctgttcaactccccgtccgccagcctgggtgccagggtgtctggtcacaatgaaagcatcctaaacagtttcgtttctcaatacatccccccttcgcgggaaatgactaaggatctgactgaactttgggaaagcgagctgtttaacaccttcaagttaacacccgtggttgataatcaggggcagcgtctctacgtcagatactcgtcagacacgatctctatattattgggccccttcacctatctggtggcagagctttcaccggtggaactcgtgacagatgtctacgccaccctaggcatcgtggagatcatcgacgagctctaccggagcagtcgcctggccatctacatcgaggacctcggtcgaaaatactgccccgcgagcgcgaccgggggagatcatggcatccggcaagcaccatcagcccggggggacgcggagcctgaccatgcaaaaagtaagcctgcgcgtgaccccccgcctggtgctggaagttaa

SEQ ID NO: 12860 - DNA, 1881 bp, unidentified
  source 1..1881: mol_type = other DNA
  misc_feature 1..1881: note = Synthetic
atcctcctgactatacgcctcacggaggcgtctgaggtcatgtttaacatgaacgtggacgagagcgcctctggcgccctcggctcctcggccattcctgtgcaccccacaccggcctcggtccgactttttgagatcctgcagggaaagtacgcctacgtccagggacagaccatctacgccaacctccgtaaccccggagtcttctcgaggcaggtgtttacccatttgtttaaacgagccatctctcattgcacgtacgatgacgtgctacatgactggaacaagttcgaggcctgcatccagaagcgatggccgagcgatgactcgtgtgcgagccggtttcgtgagtccaccttcgagtcgtggtccacgaccatgaagctgaccgtgcgtgacctgctgaccaccaacatctaccgagtgctacacagccgctccgtgctctcctatgagcgttatgtggactggatctgcgccaccggcatggtgcccgccgttaagaagcccataacccaagagctccactccaagataaagagcctgagggacaggtgcgtctgtcgggaattggggcacgagaggaccattaggagtatcgggacggaattatatgaggcaacgagggaaataatagagtcgctcaactccacgttcatcccccagtttacggaggtgaccatcgagtaccttccgaggagcgacgagtacgtggcctactacggtggccgccgcatcaggctgcatgtgctcttccccccggccatctttgccggaacggtgaccttcgacagcccggtgcagcgcctctaccagaacattttcatgtgctaccgcacgctggagcatgccaagatctgccagctcctgaacacggcccctctcaaggccatcgtgggccacggggggcgagacatgtacaaggacatcctggcccatctggagcagaactcgcagcgcaaggaccccaagaaggagctgctgaacctgctggtcaagctctcggagaacaagaccatcagcggggtcacggacgtggtggaggaattcataacggatgcctccaacaacctggtggaccgcaaccgtctatttggccagcccggggagacggctgcgcagggcctaaagaaaaaggtctccaacacggtggtcaagtgtctgactgatcagataaacgagcaatttgaccagattaatggcctagagaaggagagggagctctatctaaagaagatccgctccatggagtctcagctgcaggcctccctgggtcccggcggcaacaacccagcggcgtcagcccccgccgcagttgcggcagaagccgcgtctgtagatatactgacgggcagcaccgcctccgcaatcgaaaagctgttcaactccccgtccgccagcctgggtgccagggtgtctggtcacaatgaaagcatcctaaacagtttcgtttctcagtacatccccccttcgcgggaaatgactaaggatctgactgaactttgggaaagcgagctgtttaacaccttcaagttaacacccgtggttgataatcaggggcagcgtctctacgtcagatactcgtcagacacgatctctatattattgggccccttcacctatctggtggcagagctttcaccggtggaactcgtgacagatgtctacgccaccctaggcatcgtggagatcatcgacgagctctaccggagcagtcgcctggccatctacatcgaggacctcggtcgaaaatactgccccgcaagcgcgaccgggggagatcatggcatccggcaagcaccatcagcccggggggacgcggagcctgaccatgcaaaaagtaagcctgcgcgtgaccccccgcctggtgctggaagttaa

SEQ ID NO: 12861 - DNA, 453 bp, unidentified
  misc_feature 1..453: note = Synthetic
  source 1..453: mol_type = other DNA
ataggtgctagggttcacttttatcatgatataagtcctattgcaccttccccagaatatattgaactgcagcctttagtatctgccacggaggacaatgacttgtttgatatatatgcagatgacatggaccctgcagtgcctgtaccatcgcgttctactacctcctttgcattttttaaatattcgcccactatatcttctgcctcttcctatagtaatgtaacggtccctttaacctcctcttgggatgtgcctgtatacacgggtcctgatattacattaccatctactacctctgtatggcccattgtatcacccacggcccctgcctctacacagtatattggtatacatggtacacattattatttgtggccattatattattttattcctaagaaacgtaaacgtgttccctatttttttgcagatggctttgtggcggcctag

SEQ ID NO: 12862 - DNA, 129 bp, unidentified
  misc_feature 1..129: note = Synthetic
  source 1..129: mol_type = other DNA
atgacttgtttgatatatatgcagatgacatggaccctgcagtgcctgtaccatcgcgttctactacctcctttgcattttttaaatattcgcccactatatcttctgcctcttcctatagtaatgtaa

SEQ ID NO: 12863 - DNA, 60 bp, unidentified; identical to SEQ ID NO: 4455
  source 1..60: mol_type = other DNA
  misc_feature 1..60: note = Synthetic

SEQ ID NO: 12864 - DNA, 48 bp, unidentified; identical to SEQ ID NO: 4456
  misc_feature 1..48: note = Synthetic
  source 1..48: mol_type = other DNA

SEQ ID NO: 12865 - DNA, 48 bp, unidentified; identical to SEQ ID NO: 4456
  source 1..48: mol_type = other DNA
  misc_feature 1..48: note = Synthetic

SEQ ID NO: 12866 - DNA, 141 bp, unidentified; identical to SEQ ID NO: 4458
  source 1..141: mol_type = other DNA
  misc_feature 1..141: note = Synthetic

SEQ ID NO: 12867 - DNA, 234 bp, unidentified
  misc_feature 1..234: note = Synthetic
  source 1..234: mol_type = other DNA
atgggaaaacggtaccgctcccgatggagagcccggggtatgctgaaattcttcttaaaattacgtaaacgacgtcgtccagtcgttgtgccgcgattcgtacggttcatcgtctacgtcgttttgttcaccgtcgctgtgcaacgcgtgaaacaagagcgtgatgcgcaccttcggcggtatgaagaacgattgcagaaaaaccgtgcacggcgtcggcagagttttccgtga

SEQ ID NO: 12868 - DNA, 921 bp, unidentified
  source 1..921: mol_type = other DNA
  misc_feature 1..921: note = Synthetic
atggcggccatggaggccaacatcttctgcactttcgaccacaagctcagcatcgccgacgtaggcaaactgaccaaactagtagcggccgttgtgcccattccgcagcgtctacatctcatcaagcactaccagctgggcctacaccagttcgtagatcacacccgcggctacgtacgactgcgcggcctgctgcgcaatatgacgctgacgttgatgcggcgcgtagaaggcaaccagatcctcctacacgtaccgacgcacggactgctctacaccgtcctcaacacgggacccgtgacttgggagaagggcgacgcgctatgcgtgctgccgccgctcttccacggaccgctggcgcgcgagaacctgctgacgctgggccagtgggagctggtgctgccctggatcgtacccatgccactggcgctggaaatcaaccagcgactactcatcatgggcctcttctcgctcgaccgttcgtacgaggaggtaaaggctgccgtgcagcagctgcagaccattacttttcgcgacgccaccttcaccatccccgatccggtcatcgaccagcacctgctgatcgacatgaagaccgcctgcctctccatgtccatggtggctaacctagcctcggagctgaccatgacctacgtgcgcaagttagcgctagaggacagctccatgctgctcgtcaagtgccaggagctgctgatgcggctggaccgcgagcgcagcgtcggcgagccgcgcacgcccgcgcggccgcagcacgtgtcgcccgacgacgagatcgcgcggctgtcggcgcttttcgtcatgctgcgacagctggatgacctcatccgcgaacaggtcgtcttcacggtgtgtgacgtttcacccgataacaaatccgcgacctgcatatttaaaggctga

SEQ ID NO: 12869 - DNA, 15 bp, unidentified
  source 1..15: mol_type = other DNA
  misc_feature 1..15: note = Synthetic
atgaaaaggtactag

SEQ ID NO: 12870 - DNA, 24 bp, unidentified
  misc_feature 1..24: note = Synthetic
  source 1..24: mol_type = other DNA
atcacaatgattgggaaccagtaa

SEQ ID NO: 12871 - DNA, 42 bp, unidentified; identical to SEQ ID NO: 4466
  misc_feature 1..42: note = Synthetic
  source 1..42: mol_type = other DNA

SEQ ID NO: 12872 - DNA, 123 bp, unidentified
  source 1..123: mol_type = other DNA
  misc_feature 1..123: note = Synthetic
atctgcatcggtgccgtaaccttcgctgctttacttaaaaagcctgtgatttcatttaccaccccagcacttggattacatgaagatctgtgttcttttttgtgtgctaagtttaacaagtag

SEQ ID NO: 12873 - DNA, 3498 bp, unidentified
  source 1..3498: mol_type = other DNA
  misc_feature 1..3498: note = Synthetic
atgaaaaattatcgcgtacataaaatggaccagaaactgggcttcaagttcctggagcccgaccccaagaagaacgtcttctaccgcccgctgcacttccagtatgaatcctacgcaaacttcatcctctaccgcctgcgggagatcctggcggtgcggcgcacgctgctgtccttcaagaacgacacggagcggatcgtgctggagatcgacaagatcaaggtcacgccgcccgagtattcgcccatcatcgccagcatcaagggcaagggctacgacgcgctggtgaccttcaccatcaacatctacaaggaggtcatgaccaaggagggagttactctgaccaagatcagcagctacgagggcaacgactcgcagctgatcaagattccgctgctcatcgcctacggcaacaagaacccgctggaccccgcgaagtttgtctcgcccaacatcattggcggcgtttttatcaacaagcagtccatcgagaaggtgggcatcaacatcgtggagaagatcaccacctggcccaagttcaaggtcgtgaagccgaacgccttcaccttctccttctcgtccgtgtcgccggtgaatgtgctgcccaccaagtaccggcactacaagatcacgctggacctggcgcagctggagcactgcaccatctcgtcctccaagaccttcatcacggtgaacgtgctgctgctggtgcagtttctggccaacgtggggctggacttcattcgcaacagcctggcctacgacatgccgccagaggccgtgtacctggtcaacgcgctggtggagagcacgcgccgcctggcggcagccgaggacgactttgacgtggcggagtacgtggccgagctcatcgaggcggagcacgccaagcagcgttcgcccgccaagctggaggacttccgctacgacatgctgcagaacttcctgccgcacatgctgcacagcggcaaccagctcaaggggctttacctgctcagcctgcttcgcaagttcctcttctgcaccttcttcccgagtcgctaccccgaccgcgactccatgatctgccaccgcatcctcacctacggcaagtacttcgagacgctggccaacgacgagctggagaactacatcaacaacatcaagacggacctcttcaacaaccacaaaaaccgcggcacttgcaccgtgaacatccacgtgctgaccacgcccggcttcaaccacgccttctcggggctgctcagcggcaagttcaagaagacggacggcagctaccgcacgcacccgcactactcctggatgcagaacatctccatcccgcgcagcgtgggctactaccccgaccaggtcaagatctcaaagatgttctcagtgcgcaagtaccaccccagccagtacgtgtacttctgcccgtccgacgtgcccgagcgcggcccgcaggtggggctggtctcgcagctgtccgtgctgtcctacgtgaccaacatccgcacggacgagtacctggcgctcgagcagcgcatccgcgagtacgtctactcctacccgcaggtcaacatcagcttcttcgagaccggcttcccgctcaccatcgagaacgcgctggtggccgtgctcaacccgcacctggtcgacgacttcgtggcggacttcaagacgcgcaagcggctcaacttcttcgagaacatggagctgggcatcacgctggtcaaggaccacatgaacgaggtgcgcgtgaacatcggcagcgggcgcctagtgcgcccgttcctggtagtgcaccagggcgttctggtcatggacaccgtcggtgccgagcttgacgcgcgcatggaaaccatgaccttctccgacatccagcgcgagtatccgcacgtgctggagctggtcgatgtggagcagttcacctttagcaacgtctgcgagtcggccgcgcgcttccgcgcgctgcccgaggcggagcgcaggctctacgactacgtggacttccccgccgagtttcgcgacggctacgtggcgtccacactggtgggcgtgaaccacaactcgggcccgcgcgccatcctgggctgcgcgcaggccaagcaggccatctcgtgcctgagctccgacctgcgcaacaagattgacaacggcatccacctgctcttccccgagcgccccatcgtgctcagcaaggcggtagagacctccaagatcgccgtgaactgcttcgggcagcacgtgctcattgcgctcatgtcctacaagggcatcaaccaggaggacggcatcatcctcaagcgcgagttcgtgcagcgcggagggctggacatcgtcacggccaagaagcaccaggtggagatcccgctggagaacttcaacaataaggagcgcgtgaagtccacggcgtactccaagctggacagcaacgggctggtgaagctgaacgccttcctggagccgggcgacgcggtagcgcgcaacatttcctcgcgcacgctggaggacgagtttgtggacgacaaccagatcagctttgacatcgccgagcgctacaccgacatgtacccctcgcgcgtggagcgcgtgcaagtggacctcacagacaaggtcaaggtgcgcgtgcttaccatcaaggagcgcaggcccgtgctgggcgacaagttcaccagccgcaccagccagaagggcacggtggcataccttgcagacgaggccgagctgccctacgacgacgacgggctcacgcccgacatcatcgtgaactcaacgtcgatctactcgcgcaagaccatctccatgctggtcgagatcatgctcacagccgcgtacgccgccaagccctacaacaaccaggaccagaaccgccccatatgcttccccagcagcaacgagaccagcatcgagacctacctggccttcgcgcgcaagtgctacgagagcgtgttcccagagctgcgcgagaccgagctgcaggcgcgcctgttctgcgagaagacgctgtacgaccccgagacggacgagccctacgcggccgccgtcttcatgggccccatctactacctgcggctgcggcacctcacgcaggacaaggccacggtgcgctgccgcggcaagaagaccaagctgatccggcaggccaacgagggccgcaagcgaggcggcggcatcaagttcggcgagatggagcgcgactgcctcatcgcgcacggcgcggccaacaccattaccgagatcctgaaggactcggaggaggactcgcaggacgtgcacgtgtgcgagcactgcggcgacatcgccacgcgcaagaacaacgtgctgttctgcatccgctgcaccaagctcaacctctcgcccgtgctcacgcgcgtggacaccacgcacgtgtccaaggtcttcctcacgcaaatgaacgcgcgcggcgtcaaggtgcgcctggagttcgagaagcaggaaccgctcttctacagcccgctcaagcccgtagacctgcgcccgcgcgtgctgggctag

SEQ ID NO: 12874 - DNA, 615 bp, unidentified
  source 1..615: mol_type = other DNA
  misc_feature 1..615: note = Synthetic
atgagccggtacacgcccatgccgagcacgttcaccgcaccgtccttggagaagagcgagaggatgttcacgcacttcagctccatctcgccctcgaggcgcgcgagcatgcgccgggtgacctcgcatactgaacaaagaggcttacctagtaagataagcgttagcttagccgcggtcggtgacgcgtcggaggccatttatggggatcaaaaacttaaaggcgttgctgctcagccacggcgcgctgaccccgcacgagcctggcggcgacgagcgcttccccgccgtgtttgtggacggcttcagcgtcatgatgaccatggcgtactcgtgcgcggacgaagacgagttccgtgcggccgtcgaggagcgcgtgcagcactggatgagcgtgtccgagagcgggcggatcgcggtcttcatcgaccgcggcgagattccgatcaagcagccgctgcgcgaccagcgccgcaaagccacgcgcgaccgcgccgcgcgccaccgcgagttcatcgccgctgcggaggcagacgcggcggcagaggcggtcggcgcccgcgaggacaagcaggaggacgagcacgcggagttcgccgaggagatccgcgctga

SEQ ID NO: 12875 - DNA, 8961 bp, unidentified
  source 1..8961: mol_type = other DNA
  misc_feature 1..8961: note = Synthetic
gtgaccccgggtggcattccctcccttagcagcatgagtgtggtggtagctgcaaccatggagttgctactgctcttggtgttgttggcccctgcgggggccatcctttttccgtcccggcatgcgtgccgggtaggagaccattactacttgtccaattgttgctccgaggacgaagtgtacttctgcttcggagatggatgtcttgtggcttatggttgtactgtgtgtacacagtcttgctggactctctacagacctggagttgctacgcggcctggctcccagcccggagagcttcttgggaagtttggcggagccttaggcccggtggcctcagctgcttacacagcaggggtcttgggcctgggtgaaccattctccctcgctttctgtgcgggactcctcacctcgagggtggggaggatgccggctcttaactgctctttgcgctgcaacttcgactacagttatcctggcatttctgtggactttgattgggcttttacaactctgattcacctccctggaaaattgtggcgggggtttaccaacgcctcaatgttggctgtcctggtgatcataatgttggtgttggagcaacgcctcctaatggctttcctactacttttagtggtgggcgaggcacagggtggcatcttcgacaactgccattgtgcttactggggcggtcgaccgcctcctaggctggacatcaactaccgtggtaatgggacggtggtttgtgagtgtgattttggcaagatgcattgggccccgaagctctgcagtgggttgctgtggcgtgacggtgcccgagagggaactgtgtggactctgcctagagtctgcccccgagaggttcttggcacagtgtcggccgtttgccagtggggctccgcgtactgggtgtggaggtttggcgactgggtgccattgtatgatgagctgcccaggagtgctctttgcaccttctatgcggggaccggcaggtatccggctgatgttgatgtcttgaatccctccggtcctccatgtgctagttgtgtcgtggaccagagaccacggaaatgtggtgactgtgtccgcgactgcttcgagactggtggacctggcttcgaggagtgcggcgtgggggtgagggtaacctcactccttacggccgtcctcgtcgatgggggggtggaaagcaaggtgagtacgcctgttggtgaaaggccaaaatacctgggtcagcatggtcagggcaccttttatggtgcagttaagaagcttggggtcaacatgactgtgagccagataggaggttattggcacgcccttcagtgtccatgtgattttacacctggtccgctaccagagcggattcccggaatcccagtgaatgcttgcatcaccggaaaggccgcgcacccattctctgcgtgggcgccggggggtttttacgccccsgtgttcactaagtgtaattggccaacagtgccyggcgtggacgtctgcaatggattcgcttttgacttcccgggagatcacaatggatttatccatgtcaaaaagggccgccagcaaatcttcagtggtcagcgtcggtcttcgcccacttggttgttgagtgacatggttcttgccatgttggtcatgatgaagttggctgaggctagagttgttcctctgttctgtctggccatgtggtggtatgtgaacggggctctgaccgcttcgatcaccatcatccatgttaatgtcactcaggtcacccatccatcatggggttggaccgtccccactgtcaagcctttgccctgcccgaactcgaccacgggcttgggtgattcagtcagtaacgccgcctgcttcgctggttccgacttgtggctcggggtcggtggtgcttggtcggccctttctggcgccacgtccgctgtcgccagttgggtcggctcggcctaccggaccttgcacaatgtgggtctcggcgtgagatggttggcatcggtgggctcttacctaccgaccgtggaggccgcgctggctcctgagctggtgtgtgctcccgtggttggttggggggcacaggagtcttggttcgtggggttcctagcagtgtgttgtgtggtcgcttaccttggggttctcggcactgccagatgctgcgtgctggtggcgatgcacttcgcaagaggtgcgctgcccctagtcatgctagtgttggcaggggtgtcgcgagagcggcattccgtcttgggtctcgaggtttgcttcaacttggagggcactggttgggactggagtgactactggtggtgtgtggctggggtggtgtcttgggcccttgtcaccatgggtctcttgacccacggtggcaaggaggtgaagcttaggtggtatcgcacctggtgcgtgttctaccaaaaggttcgcctgcgcctgttggacactcccataggcaaccgcccccgccggcctttgtgcaaactgtggctggtggcggcttggttttggcctgacattgctgctgaagtgtgtgtgttccttatcctgatttttggctttctggatgttgtggatttctgtttggaggtgagtttggtatcatcacccaacttagtgcggttggctcagatgtttgattcccttgtgatggctggtgagcggttgggtgccacacacctggccgagcgcctacgtcgcaggggggtattcctgtttgagcacgctggacatgtcacacggccagcggcagagcggttgcgggaatggggttttgccctagagcccgtcgctgtgaagccagaggactgtgccatagttcgggatgccgcacgagtgttgggttgtggtcagagagtgaatggtgtgcctgtggtcgcccgtaggggagacgaagtgctcatagggtgcttgtccagcaggttcgacctcccacccgggttcgtgccgacggctcctgtcgtcgtgcaccaccaggggaaggggttttttggggtcgtcaagacctcaatgaccggccgcgacgagaccgaccactgcggcaacgtggtggtcttgggtacgagtaccactaggtccatgggcacttgtgtgaatggtgtgatgtatgctacttatcatggcactaacgggaggacaatggctggtccaatgggtcccgtgaaygccaggtggtggtcaaccagtgatgatgtgtgtgtatacccattgccaatgggggctacctgcttggaaccttgcaaatgctcaccgcagggcgtttgggtcgtgagaaacgacggagcgctctgccatggcactctcgggaagactgttgagctggacctaccagctgagctgtgtgacttccgggggtcgtctggctctccgatcttgtgtgacgagggccacgctgtgggcatgctagttagcgtattgcatcgtggcaatcgggtcactgggatacgctataccaagccttgggagaccctccctagggaggctcagaccaagacagaggcgcccccggtgccgggtaaaaccggctatcgtgaggctcctctgtatctccccactggttctggaaaatccacgcgcatacccgctgagtacgccaaggctggtcacaaggttttggtgttgaatccatcaattgcgacggtgcgcgctatgggcccatacatggagaagctgacgggtcagcacccctctgtgtactgtggtcatgacactactgcttattctaggactactcaatctaacctgacttactgtacttatggaagattcatggcaaatcccagaaagtacctccgcggccatgacgtggtgatctgcgacgagtgtcactcgactgacggcgttagtgttctgggcatgggacgtgcccggttgctggcgaaagaatgtcgggttcgcttgttgctgtttgccactgcgacccctccgggggccccaatggccgcacatgacaatattactgaggagccccttgacaccgaaggggagatcaccttttatggacacaggttgccagttgcaagatacgccactgggagacacctgcttttctgccactcaaaggttgagtgcgagaggacgtgcgcagcgctctcggcgctgggtgtgtcggcagtgacttactacaggggcagggaaacagaaattccagccggtgatgtgtgcgtttgtgccacagacgcgctttccaccggatactctggcaactttgactcagttactgattgtggcttgatggtggaggaggtggtcgaggtcaccttggaccccaccataacaatttcactgcggacagtgccagcaccagcagagttgaggatgcaacgcagggggcggtgtggacgtggtaggaccggacactactactccgcgctggctgctgcagcgccggcaggtaccgtgcgctctggagctctctgggcagctgttgaggctggtgtcacgtggtacaaccttgaacctgacttgaccggggacatcttgagggcttacgactcatgcccctatacagctgctatcacggcgtctgtgggtgaagccattacgttcttctctgggctcgtacctatgcggaactatccgcaggtggtgtgggctaagcagaagggacatwactggcctttgctcgtgggtgtccagcggcagatgtgtgaggaggctgggtgtgggcccccagctgatggtcctgagtggaatggtatcaaaggaaaggggccggtacccttattactcaggtgggggggccaactaccggaacatgtggccccccatcactgggtggatgacctgcaggcgcggcttggtgtgrccgagggttayaccccttgcttggcggggcctgtcttrttggtgggcctcgctatggcggggggggctctcttggcccattggaccgggtctatagttgtggttacgacctgggaggttaatggggggggcaaccccctgttgtaccagacccggcgaggagtcccaactagtggttctccagttgtagtggtycccccctgtgaggggggggagcgctacccctgtgatgtgaagccggtggcggaagctgtcggtatcctggagactgagtgtggctggggccccatggctgctagctacgcctacrcaaaagcctgtgaggtgggctcgcaggtcggtactaagtgtgatgcactgtggaaagcttggaccgcgggggtgctggtgcccccggcaccagccctcgccgacaatgcccctggcttgctggccaccctagacaccatgttcacccagacgtgggaggccattttcaccaatggtcgctcgctactggtggggtycacagctgcctatggggctaagaggaatccacctctcggggtggcggcctctttcctgctgggaatgtcagccggcagggcggtgcatgttcgrctagcggctgctctgctcctaggtgtgggaggcaccatgctgggacaggcctcaacgggtctggccatggcgggtgcttacttcgccggggggtcgataaccagctcttggttgagcatcatcataaccctgcttggtggttgggagggcgccgttaacgcggcctctctcacttttgacctcctttctggcaaggcagaggccaaggacgcctggtgcatcatctcctgcctggcctcaccaggggcctcggtggcgggtgtcgcgctcggcgttctactctggagtgtcaagaagggggtcggtcacgactgggtcaaccgtctgctgactgtgcttccgcgaagttcggtgatgcccgacgactttttcgtgaaagacgaatacgttaaccgcgtgtcgtcagtcttacggaagatgtcgttgtcacggtggatcctgactcttgtggataaacgggaggcggaaatggaaaccccagcctcagaagtactgtgggacctccttgactggtgcgtccgccttggtcgctacctgttgaggaagatcaaaacaaccttcccgcgcctcaaaatccctctgatggggtgcagcaaaggatgggccggaccctgggaagggaacggacatgttgaggcgcgctgtacttgtggatgtgtcatcactggagaaatctatgatggtgagctgcacgacatggtctactccaccttcttctgctcacactacctgaggaagactgttccagtgggggtcatggggtccggggggggggctacaccagtggtccctcctcggggtcccaagacttaccagcttggttgcgcagactggattgaggcgttggtggtctctggcacggttacggtgacggcgtctagcgcctacgacctgaccgctgccgaggtgaggcgggctgttaaagccagtccctgcttcgccggtgatttgcctgtctcttgggaggccccaatctgtaggccagcaatggtctataggggaggccagactatccagctggatggagtgcgccgtacgttgccttgtggcttgccacttggagcgcgcccccctcctcggcaggagcaacccacccatgtgagcaactggagcaaggaggaggaagctgagcttcagtgtgcgaaggctgctgctattgaggctatagggtctgcactgcatctccctagccaagaggctgcggaagcagccttgcaggctctggaggatgctgctgtgtccctactgccccatgtgcctgtcataatgggtgacgactgttcttgccgagatgaagaggcgtttcaaggccatttcattccagaacctaacgtgactgaggtacccattgcaacactaccggacattgaggcccwtagggctcgagccaaagctttgacagacaggttggtagacttagaggctgtcgtggaggcgcgtgcggaatcaatcaacgatctgcgcgcgcccctcgcgagcttcgacagcatgccaagccttgaaacgtcagactccatgccatcattggagtccagctctggatccagctttgaggttgtctcgttgaccgagtctgaaccagaaactgtgatcgagggaggtttgaccctcgaataccagctagagagtccgcctgcagttcgtggcagccccagcgccaagagggtggtccggatcaagcaatcatgttgctgtgaccgctccaccctcaaggsgttgccgttgtcattytctgtaggtgaggcactctttgtgaccaggtatgacccagaagaccacctcatccgtgatgaggtgagggaaatccaggttaccacccccctgacagacacagtgggggacattgagctggtgtgcaggagagaagagactcagacctcatactcatacgtctggtcggggcaacccttaggttgtgggagggtcatacctcccccaatcaccagacctgtgggaactcacctgacttgtgacacaaccaaggtttatgcaacagaccctgatcgcgctgcagagcgtgccgagaaggttacgatctggcgcggtcaacgcaaatatgacaaggagtactactcggtggtggacgaggccctgaagaaggccagggccacgaaatcaccgggttggacttatgaacaggctatttccaaggtgcgccgccgtgcggctgcaggttggggtagcaaggtgacagcaagcaccctcgacaagggctggccccatgtcaaggaaatgcttgataagatagcctttcataaggaagttccatttacttttgtgactaagcsggaggtcttcttctctaagaccacgagaaagcccccgcgtttcatagtattyccaccattggacttcaggatagctgaaaagatgattctgggcgacccaggcatagtcgctaaggctgtgctgggcagcgcttatctgttccaatatacaccaaaccagcgtgtaaaagcgctggtggctgcctgggaggggaagaaacatccggctgcgataactgtggatgccacttgctttgattcgtcaatcgacgaacatgacatgcaggtggaagctgcaatcttcgcggccgctagtgacgaccccgtccgggtgcatgctttgtgcaggtactatgtcgagggccccatggtgtcaccggatggcgtgatgttaggtcatcgcgcttgccgttcatcaggggtgctcacgactagttctgccaacagtwtcacctgttacataaagktcarggcggcttscrggagggccggggtgaaggagccgacstttytcatagctggtgacgattgtcttatcatctatgagaacgacggcactgatccctgtgcccgccttaaggctgctttggctgactatggttacaggtgtgaccctgtcaagcatgcaagtttggatacagctgagtgttgctcggcctacttggctgaatgtgttgctggggggaaaaagcgctggtggttgagtacggatatgcggaagccgctcgcgagggcgtcgtccgagtacacggacccaattggcagtgctctcgggaccatcttgatgtatccctggcacccagtggtgagatacgtgctgattccgcacgtgttgatcatggcataccgaagtggttcatcaccggatgagttggtgatgtgccaggtccaaggcaatcactactcattcccgctgaagctcttgcctcgcgtcttggtctcattacatgggccatggtgcattcaagtgacaactgatagcaccaagaccaggatggaggcrggggccgctctgcgggatctcggtatgaagagcctcgcttggcacaggcggcgggcggggaacgtccgtacgcgcttgctaagaggagggaaggagtgggggcatttggccagggcgctgttatggcatcccggcctgaaggagcaccccccacccattacatcattacccggcttcaccatggccactccgtatgaacactccgaggaggttctcctttcygtgaaggagaaacccccttggataaagtggacactcggttggatcttggctttagtcgcggtgatgctgtga

SEQ ID NO: 12876 - DNA, 261 bp, unidentified
  source 1..261: mol_type = other DNA
  misc_feature 1..261: note = Synthetic
acggggaaacccgcaagactgggccgctgggtggtgctgttgttcgtcgcgctcgtcgcgggcgtgcccggggagccgccgaacgcggcaggcgcacgcggcgttatcggggacgcgcaatgccggggcgacagcgccggtgtggtgtccgtcccgggggtcctggtgcccttttatctaggcatgacctcgatgggcgtatgtatgatcgcgcacgtgtatcagatatgtcagcgggcactggccgccgggtcagcctga

SEQ ID NO: 12877 - DNA, 30 bp, unidentified; identical to SEQ ID NO: 4481
  source 1..30: mol_type = other DNA
  misc_feature 1..30: note = Synthetic

SEQ ID NO: 12878 - DNA, 24 bp, unidentified
  source 1..24: mol_type = other DNA
  misc_feature 1..24: note = Synthetic
ttggtgctaggacttcgttcttga

SEQ ID NO: 12879 - DNA, 15 bp, unidentified
  misc_feature 1..15: note = Synthetic
  source 1..15: mol_type = other DNA
atggcatcattgtga

SEQ ID NO: 12880 - DNA, 129 bp, unidentified; identical to SEQ ID NO: 4485
  misc_feature 1..129: note = Synthetic
  source 1..129: mol_type = other DNA

SEQ ID NO: 12881 - DNA, 129 bp, unidentified; identical to SEQ ID NO: 4486
  misc_feature 1..129: note = Synthetic
  source 1..129: mol_type = other DNA

SEQ ID NO: 12882 - DNA, 120 bp, unidentified; identical to SEQ ID NO: 4487
  misc_feature 1..120: note = Synthetic
  source 1..120: mol_type = other DNA

SEQ ID NO: 12883 - DNA, 156 bp, unidentified; identical to SEQ ID NO: 4488
  misc_feature 1..156: note = Synthetic
  source 1..156: mol_type = other DNA

SEQ ID NO: 12884 - DNA, 462 bp, unidentified
  misc_feature 1..462: note = Synthetic
  source 1..462: mol_type = other DNA
ttgtcacgacaaaggggttcgtatatcaattatatagtaacgaacatgctgtggatattagttttatttgcacttgccgcatcggcgagtgaaaccactacaggtaccagctctaattccagtcaatctacttctgctggtaccactaacacgactacaccatcgacagcatgtattaatgcttctaacggcagtgatttgggggcgccacagctcgcgctacttgccgctagcggctggacattatctggactccttctcatatttacttgctgcctttgctgtttttggctagtacgtaaagtctgcagctgctgcggcaactcctccgagtcagagagcaaagccactcacgcgtacaccaatgccgcattcacttcttccgatgcaacgttacccatgggcactacagggtcgtacactcccccacaggacggctcatttccacctccgcctcggtga

SEQ ID NO: 12885 - DNA, 195 bp, unidentified
  source 1..195: mol_type = other DNA
  misc_feature 1..195: note = Synthetic
ttgatagcgttaactatcaaacaaactgctgaagtggtaggtcatactccatcaatttcaaaaagagcttatatggcaacgactattttagaaatggtaaaggataaaaattttttagacgtagtatctaaaactacgttcgatgaattcctatctatagtcgtagatcacgttaaatcatctacggatggatga

SEQ ID NO: 12886 - DNA, 2847 bp, unidentified
  misc_feature 1..2847: note = Synthetic
  source 1..2847: mol_type = other DNA
atggccaccccatcgatgctgccccaatgggcatacatgcacatcgccggacaggatgcttcggagtacctgagtccgggtctggtgcagttcgcccgcgccacagacacctacttcaatctgggaaataagtttagaaatcccaccgtagcgccgacccacgatgtgaccaccgaccgtagccagcggctcatgttgcgcttcgtgcccgttgaccgggaggacaatacatactcttacaaagtgcggtacaccctggccgtgggcgacaacagagtgctggatatggccagcacgttctttgacattaggggtgtgttggacagaggtcccagtttcaaaccctattctggtacggcttacaactccctggctcctaaaggcgctccaaatacatctcagtggattgcagaaggtgtaaaaaatacaactggtgaggaacacgtaacagaagaggaaaccaatactactacttacacttttggcaatgctcctgtaaaagctgaagctgaaattacaaaagaaggactcccagtaggtttggaagtttcagatgaagaaagtaaaccgatttatgctgataaaacatatcagccagaacctcagctgggagatgaaacttggactgaccttgatggaaaaaccgaaaagtatggaggcagggctctcaaacccgatactaagatgaaaccatgctacgggtcctttgccaaacctactaatgtgaaaggcggtcaggcaaaacaaaaaacaacggagcagccaaatcagaaagtcgaatatgatatcgacatggagttttttgatgcggcatcgcagaaaacaaacttaagtcctaaaattgtcatgtatgcagaaaatgtaaatttggaaactccagacactcatgtagtgtacaaacctggaacagaagacacaagttccgaagctaatttgggacaacaatctatgcccaacagacccaactacattggcttcagagataactttattggacttatgtactataacagtactggtaacatgggggtgctggctggtcaagcgtctcagttaaatgcagtggttgacttgcaggacagaaacacagaactttcttaccaactcttgcttgactctctgggcgacagaaccagatactttagcatgtggaatcaggctgtggacagttatgatcctgatgtacgtgttattgaaaatcatggtgtggaagatgaacttcccaactactgttttccactggacggcataggtgttccaacaaccagttacaaatcaatagttccaaatggagacaatgcgcctaattggaaggaacctgaagtaaatggaacaagtgagatcggacagggtaatttgtttgccatggaaattaaccttcaagccaatctatggcgaagtttcctttattccaatgtggctctatatctcccagactcgtacaaatacaccccgtccaatgtcactcttccagaaaacaaaaacacctacgactacatgaacgggcgggtggtgccgccatctctagtagacacctatgtgaacattggtgccaggtggtctctggatgccatggacaatgtcaacccattcaaccaccaccgtaacgctggcttgcgttaccgatccatgcttctgggtaacggacgttatgtgcctttccacatacaagtgcctcaaaaattcttcgctgttaaaaacctgctgcttctcccaggctcctacacttatgagtggaactttaggaaggatgtgaacatggttctacagagttccctcggtaacgacctgcgggtagatggcgccagcatcagtttcacgagcatcaacctctatgctacttttttccccatggctcacaacaccgcttccacccttgaagccatgctgcggaatgacaccaatgatcagtcattcaacgactacctatctgcagctaacatgctctaccccattcctgccaatgcaaccaatattcccatttccattccttctcgcaactgggcggctttcagaggctggtcatttaccagactgaaaaccaaagaaactccctctttggggtctggatttgacccctactttgtctattctggttctattccctacctggatggtaccttctacctgaaccacacttttaagaaggtttccatcatgtttgactcttcagtgagctggcctggaaatgacaggttactatctcctaacgaatttgaaataaagcgcactgtggatggcgaaggctacaacgtagcccaatgcaacatgaccaaagactggttcttggtacagatgctcgccaactacaacatcggctatcagggcttctacattccagaaggatacaaagatcgcatgtattcatttttcagaaacttccagcccatgagcaggcaggtggttgatgaggtcaattacaaagacttcaaggccgtcgccataccctaccaacacaacaactctggctttgtgggttacatggctccgaccatgcgccaaggtcaaccctatcccgctaactatccctatccactcattggaacaactgccgtaaatagtgttacgcagaaaaagttcttgtgtgacagaaccatgtggcgcataccgttctcgagcaacttcatgtctatgggggcccttacagacttgggacagaatatgctctatgccaactcagctcatgctctggacatgacctttgaggtggatcccatggatgagcccaccctgctttatcttctcttcgaagttttcgacgtggtcagagtgcatcagccacaccgcggcatcatcgaggcagtctacctgcgtacaccgttctcggccggtaacgctaccacgtaa

SEQ ID NO: 12887 - DNA, 1050 bp, unidentified; identical to SEQ ID NO: 11431
  source 1..1050: mol_type = other DNA
  misc_feature 1..1050: note = Synthetic

SEQ ID NO: 12888 - DNA, 1077 bp, unidentified
  source 1..1077: mol_type = other DNA
  misc_feature 1..1077: note = Synthetic
ctgggtcatttttataataatactagaatgaccctcaggctgcaaaataaaaatttgtatctgacgtacttggacacagaagaacgaatatttagcgaattaattttaataacagaactggcagaacgattagacaaatatggagtaaaatatgctattgcctgtaaagaagtagccccatcaacgggtactgttcactaccattgtttaatttgctgtgagaatgtaatatcaacaagaaatggaaaagaattactgactattgagaatataatgccacatgttggaaggatacaaaacaatttagtaaatatcgttaattatattaaaaaagatggaagtttcgcagaagtaaacaaagagaacgcaccaaaaaagaaagagatggaaaaaagagagaaagcagagcttatgataaacggaaatttaagagaattatttatggaaggcgtattaggagctatagacataatccgtgcagagaaattgagaaacatattccaagtccaagcccccgctgacaaataccaaaagaaattgatcctctggtttaaaggagaaacaggggaaggaaagacaaagacagctgtagatatagcagaaagattttttaatggagaatactggatgtcaaatgaaacacttaaatggttcgacggctatagaggtcaaccagttgcaatcattgacgacttcaggaaatcgatgcttacagaatggagcttcctcctcaggttacttgatggctataacctgatcgtacaagtgaaaggaggatttgtaaaatggcaaccgaaagtgataatagttacaagtccagcatctcctagtgaagctttccaatgggtaaacaaggaaggagaaattatagaatgggataagcaagtacaattaacgagacgcttgacatatgaagacgaagagcagatatacaattttccattgtggaatcaagatcagctaaagctagaaaatacaataagaaagtatctgggattagcaccaatggaagaagaaagcatgttcccagaagaatggagcgtaattgaaccagaaggattcataacccctggttaa

SEQ ID NO: 12889 - DNA, 24 bp, unidentified
  misc_feature 1..24: note = Synthetic
  source 1..24: mol_type = other DNA
atgctattgcctgtaaagaagtag

SEQ ID NO: 12890 - DNA, 1224 bp, unidentified
  source 1..1224: mol_type = other DNA
  misc_feature 1..1224: note = Synthetic
atggcgcaggagtcagagcagtgctcccgtgcgtttgcagtatgcagtagtaaacgacagctcgggcgcggcgagcccgtatgggattccgtcattcaccctagccacatcgtcatctctaatcgagtacccctcttactaagagaacagaacatatgtctcccttcgtgccccagcgtcggccagatcctccacagagcctaccccaactttacattcgacaacacgcaccgcaagcagcaaacggagacctacactgcattctacgcttttggggaccaaaataacaaggttaggatcttgcccactgttgtggaaagctcctcgagcgtgctgatttttagactacgcgcgtcggtctctgcgaacatcgccgtgggagggctcaaaataataatacttgctctcaccctggtgcatgcccaaggagtgtacctgcgttgcggtaaggacctttctacaccacactgcgcaccggctattgttcagcgtgaggtgctgagcagcgggtttgagccgcagtttaccgtaactggcattccagtgacatcctcgaacttaaaccaatgctactttctggtaagaaagccaaaaagccggctggcaaagccgtttgcacgcctgtccgcggagacgactgaggagtgtcgcgtcaggtctatccgcctcgggaagacacacctgcggatatcggtgactgcgcctgcgcaggaaacgcccgtctgggggctcgtgaccacgagcttcagccttacccccaccgcaccgctggcctttgatcgtaacccgtacaatcacgagacatttgcctgtaacgccaggcactacatcccagtaatctacagcggaccaaaaattacgctggccccgcgcggccgccaggtagtctggcacaacaacagctacacgtcctccctgccatgcaaagtcacagccatcgtgtcaaaccactgctgtaactgtgacatatttttagaggactcggaatggcgcccaaacaagccagcacccctgaaactggtgaacacgagtgatcatcccgtcatattggagccggacacacacattggaaacgccctcttcatcatcgcacccaaggcccgaggtttacgcagactgactcgcttaaccacaaaaaccattgaacttcctggcggggtaaagatagacagcaggaaattacaaacattcagaaaaatgtatgttgccaccggacgcagttag

SEQ ID NO: 12891 - DNA, 1224 bp, unidentified
  source 1..1224: mol_type = other DNA
  misc_feature 1..1224: note = Synthetic
atggcgcaggagtcagagcagtgctcccgtgcgtttgcagtgtgcagtagtaaacgacagctcgggcgcggcgagcccgtgtgggattccgtcattcacccgagccacatcgtcatctctaatcgagtacccctcttactaagagaacagcacatatgtctcccttcgtgccccagcgtcggccagatcctccacagagcctaccccaactttacatttgacaacacgcaccgcaagcagcaaacggagacctacactgcattctacgcttttggggaccaaaataacaaggttaggatcttgcccactgttgtggaaagctcctcgagcgtgctgatttttagactgcgtgcatcggtctctgcgaacatcgccgtgggagggctcaaaataataatacttgctctcaccctggtgcatgcccaaggagtgtacctgcgttgcggtaaggacctttctacaccacactgcgcaccggctattgttcagcgtgaggtgctgagcagcgggtttgagccgcagtttaccgtaactggcattccagtgacatcctcgaacttaaaccaatgctactttctggtaagaaagccaaaaagccggctggcaaagccgtttgcacgcctgtccgcggagacgactgaggagtgtcgcgtcaggtctatccgcctcgggaagacacacctgcggatatcggtgactgcgcctgcgcaggaaacgcccgtctgggggctcgtgaccacgagcttcagccttacccccaccgcaccgctggcctttgatcgtaacccgtacaatcacgagacatttgcctgtaacgccaggcactacatcccagtaatctacagcggaccaaaaattacgctggccccgcgcggccgccaggtagtctggcacaacaacagctacacgtcctccctgccatgcaaagtcacagccatcgtgtcaaaccactgctgtaactgtgacatatttttagaggactcggaatggcgcccaaacaagccagcacccctgaaactggtgaacacgagtgatcatcccgtcatattggagccggacacacacattggaaacgccctcttcatcatcgcacccaaggcccgaggtttacgcagactgactcgcttaaccacaaaaaccattgaacttcctggcggggtaaagatagacagcaggaaattacaaacattcagaaaaatgtatgttgccaccggacgcagttag

SEQ ID NO: 12892 - DNA, 27 bp, unidentified
  misc_feature 1..27: note = Synthetic
  source 1..27: mol_type = other DNA
atgctccaaacatacgtaaacatttag

SEQ ID NO: 12893 - DNA, 759 bp, unidentified
  source 1..759: mol_type = other DNA
  misc_feature 1..759: note = Synthetic
atttttactttggactataaactgcgactgaacgttatgaacccaccccaagcccgcgtctcggaacagacaaaggacttgcttagcgttatggttaaccagcaccccgaagaggacgcaaaagtgtgtaaatccagtgataattcaccgctttataacaccatggttatgttatcgtatgggggtgatacggacttactattaagctctgcatgtacccgcacatctaccgtaaacaggtcggcgtttacgcaacactccgtgttttatattatatccacggtgttgattcaaccaatatgttgtatcttcttttttttttactataaagcgacacgctgtatgctcttattcacagccgggttacttctgacgattctacatcactttcgacttattattatgttattgtgtgtctacagaaatatacgatcagacctgctacccttatctacatcccagcaactgctgcttggaattattgttgtgactcgaacaatgctattttgtattacggcgtattatactctttttatagacacccgggtgttctttttgattaccggacacttgcaaagtgaggttatttttccagatagcgtttcaaaaatacttcctgtgtcgtggggtccaagtccagccgtgttactggtaatggcggcagttatttacgctatggactgtttggtggacacggtatcctttattgggccaagggtgtgggtccgtgttatgttaaaaacatctatttcgttttag

SEQ ID NO: 12894 - DNA, 630 bp, unidentified
  misc_feature 1..630: note = Synthetic
  source 1..630: mol_type = other DNA
atgagcggctccagcgaacgagagctcgcggccatcgtgcgcgacctgggctgcgggccctactttttgggcacccacgacaagcgcttcccgggcttcctcgccggcgacaagctggcctgcgccattgtcaacacggccggccgcgagaccggaggcgtgcactggctcgccttcggctggaacccgcgctcgcgcacctgctacatgttcgacccatttgggttctcggaccgccggctcaagcagatttacagcttcgagtacgaggctatgttgcgccgaagcgccctggcttcctcgcccgaccgctgtctcagcctcgagcagtccacccagaccgtgcaggggcccgactccgccgcctgcggacttttctgttgcatgttcttgcatgccttcgtgcactggcccgaccgacccatggacgggaaccccaccatgaacttgctgacgggggtgcccaacggcatgctacaatcgccacaggtgctgcccaccctccggcgcaaccaggaggagctctaccgcttcctcgcgcgccactccccttactttcgctcccaccgcgccgccatcgaacacgccaccgcttttgacaaaatgaaacaactgcgtgtatctcaataa

SEQ ID NO: 12895 - DNA, 15 bp, unidentified
  misc_feature 1..15: note = Synthetic
  source 1..15: mol_type = other DNA
atgaaaaggtactag

SEQ ID NO: 12896 - DNA, 591 bp, unidentified
  misc_feature 1..591: note = Synthetic
  source 1..591: mol_type = other DNA
atgagtcaattggtagagttttataacgaagtagccagttggctgctacgagacgagacgtcgcctattcctgataagttctttatacagttgaaacaaccgcttagaaataaacgagtatgtgtgtgcggtatagatccgtatccgaaagatggaactggtgtaccgttcgaatcaccaaattttacaaaaaaatcaattaaggagatagcttcatctatatctagattaaccggagtaattgattataaaggttataaccttaatataatagacggggttataccctggaattattacttaagttgtaaattaggagaaacaaaaagtcacgcgatctactgggataagatttccaagttactgctgcagcatataactaaacacgttagtgttctttattgtttgggtaaaacagatttctcgaatatacgggccaagttagaatccccggtaactaccatagtcggatatcatccagcggctagagaccgccaattcgagaaagatagatcatttgaaattatcaacgttttactggaattagacaacaaggcacctataaattgggctcaagggtttatttattaa

SEQ ID NO: 12897 - DNA, 18 bp, unidentified
  source 1..18: mol_type = other DNA
  misc_feature 1..18: note = Synthetic
atgattgggaaccagtaa

SEQ ID NO: 12898 - DNA, 15 bp, unidentified
  misc_feature 1..15: note = Synthetic
  source 1..15: mol_type = other DNA
atgaaaaggtactag

SEQ ID NO: 12899 - DNA, 660 bp, unidentified
  source 1..660: mol_type = other DNA
  misc_feature 1..660: note = Synthetic
ataatgaattcagtgactatatcacacgcaccatatactattacttatcacgatgattgggaaccagtaatgagtcaattggtagagttttataacgaagtagccagttggctgctacgagacgagacgtcgcctattcctgataagttctttatacaattgaaacagccgcttagaaataaacgagtatgtgtgtgtggtatagatccgtatccaaaagatggaactggtgtaccgttcgaatcaccaaattttacaaaaaaatcaattaaggagatagcttcatctatatctagattaaccggagtaattgattataaaggttataaccttaatataatagacggggttataccctggaattattacttaagttgtaaattaggagaaacaaaaagtcacgcgatttactgggataagatttccaagttactgctgcagcatataactaaacacgttagtgttctttattgtttgggtaaaacagatttctcgaatatacgggcaaagttagaatccccggtaactaccatagtgggatatcatccagcggccagagaccaccaattcgagaaagatcgatcatttgaaattatcaacgttttactggaattagacaacaagacacctataaattgggctcaagggtttatttattaa

SEQ ID NO: 12900 - DNA, 21 bp, unidentified
  misc_feature 1..21: note = Synthetic
  source 1..21: mol_type = other DNA
acgatgattgggaaccagtaa

SEQ ID NO: 12901 - DNA, 15 bp, unidentified
  misc_feature 1..15: note = Synthetic
  source 1..15: mol_type = other DNA
atgaaaaagtactag

SEQ ID NO: 12902 - DNA, 657 bp, unidentified
  misc_feature 1..657: note = Synthetic
  source 1..657: mol_type = other DNA
atgaattcagtgactgtatcacacgcaccatatactattacttatcacgatgattgggaaccagtcatgaatcaattagtagagttttataacgaagtagccagttggctgctacgagacgagacgtcgcctattcctgataagttctttatacagttgaaacaaccgcttagaaataagcgcgtatgtgtgtgtggtatagatccgtatccgaaagatggaactggtgtaccgttcgagtcaccaaattttacaaaaaaatcaattaaggagatagcatcttctatatctagattaaccggagtaattgattataaaggttataaccttaatataatagacggggttataccctggaattattacttaagttgtaaattaggagaaacaaaaagtcacgcgatttactgggataagatttctaagttactgctgcatcatataactaaacacgttaggtttctttattgtttgggtaaaacagatttctcgaatatacgggccaagttagaatctccagtaactaccatagtgggatatcatccagcagctagagaccgtcaattcgagaaagatagatcatttgaaattatcaacgttttactggaattagacaacaaggcacctataaattgggctcaagggtttatttattaa

SEQ ID NO: 12903 - DNA, 3813 bp, unidentified
  misc_feature 1..3813: note = Synthetic
  source 1..3813: mol_type = other DNA
attggtgcgttaatacacagaattctgattatagcgcactattatagcaccatgaattacatccctacgcaaacgttttacggccgccggtggcgcccgcgcccggcggcccgtccttggccgttgcaggccactccggtggctcccgtcgtccccgacttccaggcccagcagatgcagcaactcatcagcgccgtaaatgcgctgacaatgagacagaacgcaattgctcctgctaggcctcccaaaccaaagaagaagaagacaaccaaaccaaagccgaaaacgcagcccaagaagatcaacggaaaaacgcagcagcaaaagaagaaagacaagcaagccgacaagaagaagaagaaacccggaaaaagagaaagaatgtgcatgaagattgaaaatgactgtatcttcgaagtcaaacacgaaggaaaggtcactgggtacgcctgcctggtgggcgacaaagtcatgaaacctgcccacgtgaaaggagtcatcgacaacgcggacctggcaaagctagctttcaagaaatcgagcaagtatgaccttgagtgtgcccagataccagttcacatgaggtcggatgcctcaaagtacacgcatgagaagcccgagggacactataactggcaccacggggctgttcagtacagcggaggtaggttcactataccgacaggagcgggcaaaccgggagacagtggccggcccatctttgacaacaaggggagggtagtcgctatcgtcctgggcggggccaacgagggctcacgcacagcactgtcggtggtcacctggaacaaagatatggtgactagagtgacccccgaggggtccgaagagtggtccgccccgctgattactgccatgtgtgtccttgccaatgctaccttcccgtgcttccagcccccgtgtgtaccttgctgctatgaaaacaacgcagaggccacactacggatgctcgaggataacgtggataggccagggtactacgacctccttcaggcagccttgacgtgccgaaacggaacaagacaccggcgcagcgtgtcgcaacacttcaacgtgtataaggctacacgcccttacatcgcgtactgcgccgactgcggagcagggcactcgtgtcatagccccgtagcaattgaagcggtcaggtccgaagctaccgacgggatgctgaagattcagttctcggcacaaattggcatagataagagtgacaatcatgactacacgaagataaggtacgcagacgggcacgccattgagaatgccgtccggtcatctttgaaggtagccacctccggagactgtttcgtccatggcacaatgggacatttcatactggcaaagtgcccaccgggtgaattcctgcaggtctcgatccaggacaccagaaacgcggtccgtgcctgcagaatacaatatcatcatgaccctcaaccggtgggtagagaaaaatttacaattagaccacactatggaaaagagatcccttgcaccacttatcaacagaccacagcggagaccgtggaggaaatcgacatgcatatgccgccagatacgccggacaggacgttgctatcacagcaatctggcaatgtaaagatcacagtcggaggaaagaaggtgaaatacaactgcacctgtggaaccggaaacgttggcactactaattcggacatgacgatcaacacgtgtctaatagagcagtgccacgtctcagtgacggaccataagaaatggcagttcaactcacctttcgtcccgagagccgacgaaccggctagaaaaggcaaagtccatatcccattcccgttggacaacatcacatgcagagttccaatggcgcgcgaaccaaccgtcatccacggcaaaagagaagtgacactgcaccttcacccagatcatcccacgctcttttcctaccgcacactgggtgaggacccgcagtatcacgaggaatgggtgacagcggcggtggaacggaccatacccgtaccagtggacgggatggagtaccactggggaaacaacgacccagtgaggctttggtctcaactcaccactgaagggaaaccgcacggctggccgcatcagatcgtacagtactactatgggctttacccggccgctacagtatccgcggtcgtcgggatgagcttactggcgttgatatcgatcttcgcgtcgtgctacatgctggttgcggcccgcagtaagtgcttgaccccttatgctttaacaccaggagctgcagttccgtggacgctggggatactctgctgcgccccgcgggcgcacgcagctagtgtggcagagactatggcctacttgtgggaccaaaaccaagcgttgttctggttggagtttgcggcccctgttgcctgcatcctcatcatcacgtattgcctcagaaacgtgctgtgttgctgtaagagcctttcttttttagtgctactgagcctcggggcaaccgccagagcttacgaacattcgacagtaatgccgaacgtggtggggttcccgtataaggctcacattgaaaggccaggatatagccccctcactttgcagatgcaggttgttgaaaccagcctcgaaccaacccttaatttggaatacataacctgtgagtacaagacggtcgtcccgtcgccgtacgtgaagtgctgcggcgcctcagagtgctccactaaagagaagcctgactaccaatgcaaggtttacacaggcgtgtacccgttcatgtggggaggggcatattgcttctgcgactcagaaaacacgcaactcagcgaggcgtacgtcgatcgatcggacgtatgcaggcatgatcacgcatctgcttacaaagcccatacagcatcgctgaaggccaaagtgagggttatgtacggcaacgtaaaccagactgtggatgtttacgtgaacggagaccatgccgtcacgatagggggtactcagttcatattcgggccgctgtcatcggcctggaccccgttcgacaacaagatagtcgtgtacaaagacgaagtgttcaatcaggacttcccgccgtacggatctgggcaaccagggcgcttcggcgacatccaaagcagaacagtggagagtaacgacctgtacgcgaacacggcactgaagctggcacgcccttcacccggcatggtccatgtaccgtacacacagacaccttcagggttcaaatattggctaaaggaaaaagggacagccctaaatacgaaggctccttttggctgccaaatcaaaacgaaccctgtcagggccatgaactgcgccgtgggaaacatccctgtctccatgaatttgcctgacagcgcctttacccgcattgtcgaggcgccgaccatcattgacctgacttgcacagtggctacctgtacgcactcctcggatttcggcggcgtcttgacactgacgtacaagaccaacaagaacggggactgctctgtacactcgcactctaacgtagctactctacaggaggccacagcaaaagtgaagacagcaggtaaggtgaccttacacttctccacggcaagcgcatcaccttcttttgtggtgtcgctatgcagtgctagggccacctgttcagcgtcgtgtgagcccccgaaagaccacatagtcccatatgcggctagccacagtaacgtagtgtttccagacatgtcgggcaccgcactatcatgggtgcagaaaatctcgggtggtctgggggccttcgcaatcggcgctatcctggtgctggttgtggtcacttgcattgggctccgcagataa

SEQ ID NO: 12904 - DNA, 2544 bp, unidentified
  source 1..2544: mol_type = other DNA
  misc_feature 1..2544: note = Synthetic
attggtgcgttaatacacagaattctgattatagcgcactattatagcaccatgaattacatccctacgcaaacgttttacggccgccggtggcgcccgcgcccggcggcccgtccttggccgttgcaggccactccggtggctcccgtcgtccccgacttccaggcccagcagatgcagcaactcatcagcgccgtaaatgcgctgacaatgagacagaacgcaattgctcctgctaggcctcccaaaccaaagaagaagaagacaaccaaaccaaagccgaaaacgcagcccaagaagatcaacggaaaaacgcagcagcaaaagaagaaagacaagcaagccgacaagaagaagaagaaacccggaaaaagagaaagaatgtgcatgaagattgaaaatgactgtatcttcgaagtcaaacacgaaggaaaggtcactgggtacgcctgcctggtgggcgacaaagtcatgaaacctgcccacgtgaaaggagtcatcgacaacgcggacctggcaaagctagctttcaagaaatcgagcaagtatgaccttgagtgtgcccagataccagttcacatgaggtcggatgcctcaaagtacacgcatgagaagcccgagggacactataactggcaccacggggctgttcagtacagcggaggtaggttcactataccgacaggagcgggcaaaccgggagacagtggccggcccatctttgacaacaaggggagggtagtcgctatcgtcctgggcggggccaacgagggctcacgcacagcactgtcggtggtcacctggaacaaagatatggtgactagagtgacccccgaggggtccgaagagtggtccgccccgctgattactgccatgtgtgtccttgccaatgctaccttcccgtgcttccagcccccgtgtgtaccttgctgctatgaaaacaacgcagaggccacactacggatgctcgaggataacgtggataggccagggtactacgacctccttcaggcagccttgacgtgccgaaacggaacaagacaccggcgcagcgtgtcgcaacacttcaacgtgtataaggctacacgcccttacatcgcgtactgcgccgactgcggagcagggcactcgtgtcatagccccgtagcaattgaagcggtcaggtccgaagctaccgacgggatgctgaagattcagttctcggcacaaattggcatagataagagtgacaatcatgactacacgaagataaggtacgcagacgggcacgccattgagaatgccgtccggtcatctttgaaggtagccacctccggagactgtttcgtccatggcacaatgggacatttcatactggcaaagtgcccaccgggtgaattcctgcaggtctcgatccaggacaccagaaacgcggtccgtgcctgcagaatacaatatcatcatgaccctcaaccggtgggtagagaaaaatttacaattagaccacactatggaaaagagatcccttgcaccacttatcaacagaccacagcggagaccgtggaggaaatcgacatgcatatgccgccagatacgccggacaggacgttgctatcacagcaatctggcaatgtaaagatcacagtcggaggaaagaaggtgaaatacaactgcacctgtggaaccggaaacgttggcactactaattcggacatgacgatcaacacgtgtctaatagagcagtgccacgtctcagtgacggaccataagaaatggcagttcaactcacctttcgtcccgagagccgacgaaccggctagaaaaggcaaagtccatatcccattcccgttggacaacatcacatgcagagttccaatggcgcgcgaaccaaccgtcatccacggcaaaagagaagtgacactgcaccttcacccagatcatcccacgctcttttcctaccgcacactgggtgaggacccgcagtatcacgaggaatgggtgacagcggcggtggaacggaccatacccgtaccagtggacgggatggagtaccactggggaaacaacgacccagtgaggctttggtctcaactcaccactgaagggaaaccgcacggctggccgcatcagatcgtacagtactactatgggctttacccggccgctacagtatccgcggtcgtcgggatgagcttactggcgttgatatcgatcttcgcgtcgtgctacatgctggttgcggcccgcagtaagtgcttgaccccttatgctttaacaccaggagctgcagttccgtggacgctggggatactctgctgcgccccgcgggcgcacgcagctagtgtggcagagactatggcctacttgtgggaccaaaaccaagcgttgttctggttggagtttgcggcccctgttgcctgcatcctcatcatcacgtattgcctcagaaacgtgctgtgttgctgtaagagcctttcttttttaagtgctactgagcctcggggcaaccgccagagcttacgaacattcgacagtaatgccgaacgtggtggggttcccgtataa

SEQ ID NO: 12905 - DNA, 36 bp, unidentified; identical to SEQ ID NO: 4515
  source 1..36: mol_type = other DNA
  misc_feature 1..36: note = Synthetic

SEQ ID NO: 12906 - DNA, 1077 bp, unidentified
  misc_feature 1..1077: note = Synthetic
  source 1..1077: mol_type = other DNA
ctgggtcatttttataataatactagaatgaccctcaggctgcaaaataaaaatttgtatctgacgtacttggatacagaagaacgaatatttagtgaattaattttaataacagaactggcagaacgattagacaaatatggagtaaaatatgctattgcctgtaaagaagtagccccatcaacgggtactgttcactaccattgtttaatttgctgtgagaatgtaatatcaacaagaaatggaaaagaattactgactattgagaatataatgccacatgttggaaggatacaaaacaatttagtaaatatcgttaattatattaaaaaagatggaagtttcgcagaagtaaacaaagagaacgcaccaaaaaagaaagagatggaaaaaagagagaaagcagagcttatgataaacggaaatttaagagaattatttatggaaggcgtattaggagctatagacataatccgtgcagagaaattgagaaacatattccaagtccaagcccccgctgacaaataccaaaagaaattgatcctctggtttaaaggagaaacaggggaaggaaagacaaagacagctgtagatatagcagaaagatattttaatggagaatactggatgtcaaatgaaacacttaaatggttcgacggctatagaggtcaaccagttgcaatcattgacgacttcaggaaatcgatgcttacagaatggagcttcctcctcaggttacttgatggctataacctgatcgtacaagtgaaaggaggatttgtaaaatggcaaccgaaagtgataatagttacaagtccagcatctcctagtgaagctttccaatgggtgaacaaggaaggagaaattatagaatgggataagcaagtacaattaacgagacgcttgacatatgaagacgaagagcagatatacaattttccattgtggaatcaagatcagctaaagctagaaaatacaataagaaagtatctgggattagcaccaatggaagaagaaagcatgttcccagaagaatggagcgtaattgaaccagaaggattcataacccctggttaa

SEQ ID NO: 12907 - DNA, 24 bp, unidentified
  misc_feature 1..24: note = Synthetic
  source 1..24: mol_type = other DNA
atgctattgcctgtaaagaagtag

SEQ ID NO: 12908 - DNA, 768 bp, unidentified
  source 1..768: mol_type = other DNA
  misc_feature 1..768: note = Synthetic
atggccctactacagtggatgttagatcacgttcaggatgaagaaaaaaactgtgaaaacctttcaatagatgatcagcattcactcttcggcataaacagagactggttgagtttcctgcaactctccaagttagaaattacacaccttaaacatgtatataaattggtggacaacgatagggctcatctaatggtccacccctcttcggataacgtccacgcttggagttttttatgcaaacccgacaatgtaaaagttgtgattttgggacaagatccgtatcccgacggcagaggttgcggcttggccttcggtacagtgaaagagtgctcgattccagaatctctaaagaatatatttaaagaactggaaagaagcgtgccgaatttttccccccctgacaacggctgtttaaactcctggtgtagtgaaggagtcctattgctaaactcgatattcactgtagttcatggattaccaatgtctcacgaggcatttggctggcaaacactgagctataagattatcagcaaactatcggtagaaatggactctctcgttttcttattgtggggaaaccatgcccggaaactctcttatctaatagacgcacggaaacatctcgtcttagaaagtgcacatccatcgcccaaagtgaagtctgcaaggatgccatttattggttgcaatcatttcgtgcgagcaaatttatttcttacggagcacgggaaagacccaatcaattggaacattctgaacgaataa

SEQ ID NO: 12909 - DNA, 84 bp, unidentified; identical to SEQ ID NO: 4520
  source 1..84: mol_type = other DNA
  misc_feature 1..84: note = Synthetic

SEQ ID NO: 12910 - DNA, 768 bp, unidentified
  misc_feature 1..768: note = Synthetic
  source 1..768: mol_type = other DNA
atggccctactacagtggatgttagatcacgttcaggatgaagaaaaaaactatgaaaacctttcaatagatgatcagcattcactcttcggcataaacagagactggttgagtttcctgcaactctccaagttagaaattacacatcttaagcatgtttataaattggtggacaacgatagagttcatctaaccgtccacccctcttcggataacgtccacgcctggagttttttgtgcaaacccaccgatgttaaagttgtgattctgggacaggatccgtatcccgacggcagaggttgcggtttggccttcggtacagtgaaagagtgctcgattccagaatctctaaagaatatatttaaagaactggaaagaagcatcccgaatttttccccccctgacaacggctgtttaaactcctggtgtagagaaggagtcctactgctaaactcgatattcactgtagttcatggattaccaatgtcccacgaggcatttggttggcaaacactgagctacaagattatcagcagactatcggaacaaatgaactctctcgttttcttgttgtggggaaaacatgcccggaaactctcttatctaatagacgcacagaaacatctcgtcttagaaagtgcacatccatcacccaaagtgaaatctgcaagaatgccatttattggttgcaatcattttgtgcgaacaaatttatttcttactgagcacgggaaagacccaatcaattggaacattctgaacgaatag

SEQ ID NO: 12911 - DNA, 1098 bp, unidentified
  misc_feature 1..1098: note = Synthetic
  source 1..1098: mol_type = other DNA
aagatactgagcagtctccgatgttgtgtcccagcggcgaggatgtccaagcgcaaatacaaggaagaaatgctgcaggttatcgcacctgaagtctacggccaaccgttgaaggatgaaaaaaaaccccgcaaaatcaagcgggttaaaaaggacaaaaaagaagaggaagatggcgatgatgggctggcggagtttgtgcgcgagtttgccccacggcgacgcgtgcaatggcgtgggcgcaaagttcgacatgtgttgagacctggaacttcggtggtctttacacccggcgagcgttcaagcgctacttttaagcgttcctatgatgaggtgtacggggatgatgatattcttgagcaggcggctgaccgattaggcgagtttgcttatggcaagcgtagtagaataacttccaaggatgagacagtgtcgatacccttggatcatggaaatcccacccctagtcttaaaccggtcactttgcagcaagtgttacccgtaactccgcgaacaggtgttaaacgcgaaggtgaagatttgtatcccactatgcaactgatggtacccaaacgccagaagttggaggacgttttggagaaagtaaaagtggatccagatattcaacctgaggttaaagtgagacccattaagcaggtagcgcctggtctgggggtacaaactgtagacattaagattcccactgaaagtatggaagtgcaaactgaacccgcaaagcctactgccacctccactgaagtgcaaacggatccatggatgcccatgcctattacaactgacgccgccggtcccactcgaagatcccgacgaaagtacggtccagcaagtctgttgatgcccaattatgttgtacacccatctattattcctactcctggttaccgaggcactcgctactatcgcagccgaaacagtacctcccgccgtcgccgcaagacacctgcaaatcgcagtcgtcgccgtagacgcacaagcaaaccgactcccggcgccctggtgcggcaagtgtaccgcaatggtagtgcggaacctttgacactgccgcgtgcgcgttaccatccgagtatcatcacttaa

SEQ ID NO: 12912 - DNA, 57 bp, unidentified; identical to SEQ ID NO: 4528
  source 1..57: mol_type = other DNA
  misc_feature 1..57: note = Synthetic

SEQ ID NO: 12913 - DNA, 2622 bp, unidentified
  source 1..2622: mol_type = other DNA
  misc_feature 1..2622: note = Synthetic
atgaccgctcagccgccgctgcaccaccgccaccacccgtacaccctgttcgggaccagctgtcatctcagctggtacggccttctagaggcctcggtgcctatcgtacaatgtctgtttttggatctgggtggcggccgtgccgagccgcggcttcacacgttcgtggtgcgcggtgaccgtctgccgccggctgaggtgcgtgctgtgcatcgcgccagctacgctgcgctggcctcggccgtgactacggacgccgatgagcgtcggcgcggcctagagcagcgtagcgccgtgttggcgcgcgtgttgctagaaggcagcgcgttaatccgcgtgttggcgcgcaccttcacgccggtgcagattcagacggacgctagtggcgtggagattttggaggccgcaccggcactgggcgtggaaaccacagcgctgtcgaacgcgcttagtcttttccacgtagccaagctagtggtcatcggctcgtatcccgaagtgcacgagccgcgtgtggtcacgcatgccgcggaacgcgtctctgaagagtatggcacccacgcgcataaaaaattgcgtcgcggttactacgcctacgatttggccatgtcgtttcgcgtcggcactcacaagtatgtgctggagcgcgacgacgaggccgtcctggcacgcctctttgaggtgcgcgaggtgtgttttttgcgcacctgtctgcgtctggtcacgcctgtcggtttcgtggccgtggcagtgaccgacgagcagtgttgtttattgctgcagtcggcctggactcacctttacgacgtgcttttccgtggtttcgctgggcagccgccgctacgcgactacctggggccggacctctttgagacgggcgccgcccgttctttcttttttcccggtttcccgcccgtgcccgtctacgcggtccacggtctgcacacgttaatgcgcgagacggcgttggacgcggcggctgaggtgctctcgtggtgcggcctgcccgacatcgtgggctcggccggcaagctggaggtggaaccctgcgcgctctcgctcggcgtgcccgaggatgagtggcaggtcttcggtaccgaggccggcggcggcgccgtgcgtctcaatgccacggcttttcgcgagcgaccggccggcggcgatcgtcgctggctgttgccgccgctgccgcgtgacgacggcgacggtgaaaacaacgtcgtggaagtcagcagcagcaccggcggtgcgcacccgccgagcgacgacgctactttcaccgtgcacgttcgcgacgccacgctacatcgagtgctcatcgtggatttggtcgagcgcgtgctggccaagtgtgtacgcgcgcgcgacttcaatccctacgtgcgttatagtcatcgactccacacttatgcggtttgtgaaaagtttattgaaaatctgcgttttcgctcgcgacgcgccttctggcagatccagagtctgctgggttacatctccgagcacgttacgtcagcctgcgcttcggccggccttttgtgggttctgtcgcgtggccaccgcgagttttatgtctacgacggctattcgggtcacggacccgtctcggccgaagtgtgcgtgcggactgtggtcgactgttattggcgcaaactttttggcggcgacgatccgggtcccacctgtcgtgttcaagagagcgcgcccggcgtgctgttggtctggggcgacgagcggttggtgggtcccttcaacttcttctacggcaacggcggcgccggtggtagtccgctccacggggtggtgggtggtttcgcggcgggacattgcggtggcgcttgttgcgcgggctgcgtcgtcactcaccgccattctagcggcggcggtggtagtggcgtgggcgacgcggaccacgcgagtggcggcggtctagatgccgctgccgggagtggtcataacggcggtagtgatcgggtttctccctccacgccgcccgcggcgttaggtggctgttgctgcgcggccggtggcgactggctctcggccgtgggtcatgtcctgggccggctgccggcgctgttacgggagcgcgtgagcgtgtccgagctggaagccgtgtatcgcgagatcctctttcgcttcgtggctcgccgcaacgacgtggacttttggttactgcgcttccagcccggtgaaaacgaagtaaggccgcacgctggggtgattgattgcgcgcccttccacggcgtgtgggccgagcagggccagatcatcgtacagtcacgcgatacggcgttggcggccgatatcggctacggcgtctatgtggacaaggcctttgccatgctcacggcttgcgtggaggtctgggcgcgagagttattgtcgtcctccaccgcttccaccaccacttgttcttcttcttccgttctctcctccgccttgccgtccgtcacttcgtcctcttcgggcacggcgacggtgtctcctccgtcttgttcttcttcgtcggcaacttggctcgaggagcgcgacgagtgggtgcgctcgctggcggttgacgcgcaacacgctgctaagcgggtggcttccgagggcctgcggtttttccggctcaacgcttaa

SEQ ID NO: 12914 - DNA, 69 bp, unidentified
  source 1..69: mol_type = other DNA
  misc_feature 1..69: note = Synthetic
atgtctgtttttggatctgggtggcggccgtgccgagccgcggcttcacacgttcgtggtgcgcggtga

SEQ ID NO: 12915 - DNA, 42 bp, unidentified; identical to SEQ ID NO: 4532
  source 1..42: mol_type = other DNA
  misc_feature 1..42: note = Synthetic

SEQ ID NO: 12916 - DNA, 57 bp, unidentified; identical to SEQ ID NO: 4533
  misc_feature 1..57: note = Synthetic
  source 1..57: mol_type = other DNA

SEQ ID NO: 12917 - DNA, 177 bp, unidentified
  misc_feature 1..177: note = Synthetic
  source 1..177: mol_type = other DNA
aagatggggtctgatccgacatgtaccatttttacgctactcaggcgcggacgcggaattggcgtcaggcatggcatggcgcgctcgcgtgctaggagagacgctcagaacgtggtcaagatccaagcgcaacacggccttctcctcgctctgctcttgatgctgaacgatctctga

SEQ ID NO: 12918 - DNA, 1992 bp, unidentified
  misc_feature 1..1992: note = Synthetic
  source 1..1992: mol_type = other DNA
ttgactaccgggaagagggaaaaaacagacaaagggacggacgctgttgctatggctctgagcgtacaagattgcgcccgtctgactggtcaaagcgtgcccgccatggaacgcttctccccgttgcgtaacatctggaaccgcgttcgcgaatacgcccgcgccgccactaccgccgccggcatcacctggctctctcgatatgtttaccactaccatcgccttatgctggaggacctggcccccggtacgcccgccacacttcgctggcccctttaccgcgagccgccgccccacttccttgttggctaccagtacttggttcgcacctgcaacgactacgtttttgaatccagagcctactcgcgccttaggtataccgagattacacagcccgggatgcaagtagtcaactggtccgtcatggccaactgcacgtacaccatcaacaccggttcctaccaccgctttgtggacttggatgatttccaaaacactttaactcagatacagcaggctgtgctcgccgaacgcgtagttgccgacttggccctgctgcagcccctgcgcgggtttggttccacacgcatggccgaccgaggggaattggaaatacccgtagaaagtctcatgcaagattattacaaggacctgcgccgatgtcagaacgaagcttggggcatggcagaccgcctgcgaattcaacaggccggaccaaaagacgtcactctccttgccaccatccgccgtttgaagaccgcctacttcaatttcctcatcagcagcatcacctcctctgctgcctcccttagaatccctcatgccaccgtccttagcttaccttgcgactgcgattggctggaagctttcctcgaaaaattctctgatcccgtccaactggactcgctcaatgaggcttggcagtctctacctatgcaacagatgataagatgcacagttagcgccctgtcgctgcctcaggggccccacctacttcctcccctctccggctcgggcatgcaaggcggcgtctttgaacttcgcccccgagaaaacgggcgcgccgtcaccgaaaccatgcgtcgccgtcgcggagaaatgattcaacgtttcattgaccggctgcccgtccggcgccgtcgtcgacgacaacccgtcccagcgccggtcagccccgagggtcccgctgtggaggaagaggagtttatggaaatcgaggaaacgccggcagccttcgaacaagaggtgcgcgaaactgtagccgaggcaattcggctcctgcaagaggagttgacgtttgcggcgcgcaactcccagttcttcaacttcgcggttgacttctacgaggcaatggaccgcttggaagccctcggagatattaacgaaatgacgcttcggcgctgggtcatgtacttctttgtttgcgagcacattgccaccacgctcaactacctcttccagcgtctacgcaactacgccgtctttgcaagacacgtagaactgaacattgcacaagtggtgatgcgcgcccgaaacactgttggcgacgtggtctacagccgcgtgtggaacgaaaacggtcttaacgctttctcccagctcatgaggcgcatctctaatgaccttgcagccacggtggagcgcgcaggacacggagaactccaggacgaagagattgaccagtttatgtcggagattgcctaccaagacaactctggcgacgtgcaggagattctgcgacaagccgcggtcaacgatgccgatattgattctgttgaactctctttcaggttccgagtccgagggccggtggttttctcccagcggagacacattcaggacctcaaccgccgcgtcgtcgcgtacgccagtcaactgcgggcgcagcaccaaccgctacccgagctccacgccgacgtgccgctaccgcctctccaggcgaacccccatccaccactgcctccggacgcccgcccgcagcgaacaatgtaa

SEQ ID NO: 12919 - DNA, 612 bp, unidentified
  source 1..612: mol_type = other DNA
  misc_feature 1..612: note = Synthetic
ttggagtcgcgacctgtcccgcaagacgaacctaccgatatgggtgccgaactctgcaaacgaatatgttgtgagttcggtaccacgtccggtgagcccctgaaagatgctctgggtcgccaggtgtctctacgctcctacgacaacatccctccgacttcctcctcggacgaaggggaggacgatgacgacggggaggatgacgataacgaggagcggcaacagaagctgcggctctgcggtagtggctgcgggggaaacgacagtagtagcggcagccaccgcgaggccacccacgacggccccaagaaaaacgcggtgcgctcgacgtttcgcgaggacaaggctccgaaaccgagcaagcagtcaaaaaagaaaaagaaaccctcaaaacatcaccaccatcagcaaagctccattatgcaggagacggacgacttagacgaagaggacacctcaatttacctgtccccgcccccggtcccccccgtccaggtggtggctaagcgactgccgcggcccgacacacccaggactccgcgccaaaagaagatttcacaacgtccacccacccccgggacaaaaaagcccgccgcctccttgcccttttaa

SEQ ID NO: 12920 - DNA, 90 bp, unidentified; identical to SEQ ID NO: 4540
  source 1..90: mol_type = other DNA
  misc_feature 1..90: note = Synthetic

SEQ ID NO: 12921 - DNA, 1005 bp, unidentified
  source 1..1005: mol_type = other DNA
  misc_feature 1..1005: note = Synthetic
atgtcaaagcgcaaaatcaaggaggagatgctccaggtcgtcgccccggagatttacggaccaccccaggcggaccagaaaccccgcaaaatcaagcgggttaaaaaaaaggatgaggtggacgagggggcagtagagtttgtgcgcgagttcgctccgcggcggcgcgtaaattggaaggggcgcagggtgcagcgcgtgttgcggcccggcacggcggtggtgttcacgcccggcgagcggtcctcagtcaggagcaagcgtagctatgacgaggtgtacggcgacgacgacatcctggaccaggcggcggagcgggcgggcgagttcgcctacgggaagcggtcgcgcgaagaggagctgatctcgctgccgctggacgaaagcaaccccacgccgagcctgaagcccgtgaccctgcagcaggtgctgccccaggcggtgctgctgccgagccgcggggtcaagcgcgagggcgagagcatgtacccgaccatgcagatcatggtgcccaagcgccggcgcgtggaggacgtgctggacaccgtgaaaatggatgtggagcccgaggtcaaggtgcgccccatcaagcaggtggcgccgggcctgggcgtgcagaccgtggacattcagatccccaccgacatggatgtcgacaaaaaaccctcgaccagcatcgaggtgcagaccgacccctggctcccagcctccactgctaccgtctccacttctaccgccgccacggctaccgagcctcccaggaggcgaagatggggcgccgccagccggctgatgcccaactacgtggtgcatccttccatcatcccgacgccgggctaccgcggcacccggtactacgccagccgccggcgcccagccagcaaacgccgccgccgcaccgccacccgccgccgtctggcccccgcccgcgtgcgccgcgtgaccacgcgccggggccgctcgctcgttctgcccaccgtgcgctaccaccccagcatcctttaa

SEQ ID NO: 12922 - DNA, 414 bp, unidentified
  misc_feature 1..414: note = Synthetic
  source 1..414: mol_type = other DNA
atggcctccgacgcgtcaccgaccgcggctaagctaacgcttatcttactaggtaagcctctttgttcagtatgcgaggtcacccggcgcatgctcgcgcgcctcgagggcgagatggagctgaagtgcgtgaacatcctctcgctcttctccaaggacggtgcggtgaacgtgctcggcatgggcgtgtaccggctcatcaccgaagtcaccgagcacttcggcaacgagtacgtgctgctcctcaagtacgacccggtggccaaggccatggctgctgttgacattcgcagttttgtggtcgtggcgcagatagacgagaaaaaggtggacatagatcagctgcgcgacgccatactgtccgcgaagcctggcgtctggcccgtgggacagccgtcctcgtcgaggcggtag

SEQ ID NO: 12923 - DNA, 111 bp, unidentified
  source 1..111: mol_type = other DNA
  misc_feature 1..111: note = Synthetic
atgggaccgactactttgggtgtccgtgtttcactttttcctttattaattgcttatggtgacaatatatatattgatatatattggcatcatgggcgcccaggtatctag

SEQ ID NO: 12924 - DNA, 39 bp, unidentified; identical to SEQ ID NO: 4546
  source 1..39: mol_type = other DNA
  misc_feature 1..39: note = Synthetic

SEQ ID NO: 12925 - DNA, 78 bp, unidentified
  source 1..78: mol_type = other DNA
  misc_feature 1..78: note = Synthetic
atgtgtacgctaataaacataaaacataaaaattatacaatggtttatgtcagctactttgtgtccgtagtgatataa

SEQ ID NO: 12926 - DNA, 846 bp, unidentified
  misc_feature 1..846: note = Synthetic
  source 1..846: mol_type = other DNA
atagcaagaaatccacgtcgccacgtctcgagaatgccggccccgcggggtccccttcgcgcaacattcctggccctggtcgcgttcgggttgctgcttcagatagacctcagcgacgttacgaatgtgaccagcagcacaaaagtccctactagcaccagcaacagaaatagcgtcgacaacgccacgagtagcggacccacgaccgggatcaacatgaccaccacccacgagtcttccgttcacaacgtgcgcaataacgagatcatgaaagtgctggctatcctcttctacatcgtgacaggcacctccattttcagcttcatagcggtactggtcgcggtagtttactcctcgtgttgcaagcacccgggtcgctttcgtttcgccgacgaagaagccgtcaacctgttggacgacacggacgacagtggcggcagcagcccgtttggcagcggttcccgacgaggttctcagatccccgccggattttgttcctcgagcccttatcagcggttggaaactcgggactgggacgaggaggaggaggcgtccgcggcccgcgagcgcatgaaacatgatcctgagaacgtcatctatttcagaaaggatggcaacttggacacgtcgttcgtgaatcccaattatgggagaggctcgcctttgaccatcgaatctcacctctcggacaatgaggaggaccccatcaggtactacgtttcggtgtacgatgaactgaccgcctcggaaatggaagaaccttcgaacagcaccagctggcagattcccaaactaatgaaagttgccatgcaacccgtctcgctcagagatcccgagtacgactag

SEQ ID NO: 12927 - DNA, 126 bp, unidentified
  source 1..126: mol_type = other DNA
  misc_feature 1..126: note = Synthetic
gtgccactccccgcggcaaacaaggcagcgaacagtatcgtaagcagcgccacgagcggcaccgcgcaccgtgcggtgagatctccccgcggcgacatgatgcggccgctccacgtgtggcgatag

SEQ ID NO: 12928 - DNA, 201 bp, unidentified
  source 1..201: mol_type = other DNA
  misc_feature 1..201: note = Synthetic
atgcatcgcctcgacgcccaaaaagcaccgaggttgagccacccgccgcgcacgcgcttaggacgactctataaaaacccacgtccactcagacacgcaacttttggccgccacacctgtcaccgctgctatatttgcgacagttgccggaacccttcccgacctcccacgaagacccgttcacctttgcgcatcccctga

SEQ ID NO: 12929 - DNA, 381 bp, unidentified
  source 1..381: mol_type = other DNA
  misc_feature 1..381: note = Synthetic
acgtcggtcaacaaacagctcttaaaggacgtgatgcgcgtcgaccttgagcgacagcagcatcagtttctgcggcgtacctacggaccgcagcaccggctcaccacgcagcaggctttgacggtgatgcgtgtggccgctcgggaacagacccgatacagtcagcgaacgacgcagtgcgtggccgcacacctgttggagcaacgggcggccgtgcagcaagagttgcaacgcgcccgacagctgcaatccggtaacgtggacgacgcgctggactctttaaccgagctgaaggacacggtagacgacgtgagagccaccttggtggactcggtttcggcgacgtgcgatttggacctggaggttgacgacgccgtctaa

SEQ ID NO: 12930 - DNA, 588 bp, unidentified
  misc_feature 1..588: note = Synthetic
  source 1..588: mol_type = other DNA
atggccttgcgagcgctgcctgtgctacgcgagcactgcgcgcgcggcgcagtgctctttagtacaacgcgctacgtactctccaactatttcaacccctcggaggaaaagcacgcggccatttacttcggacgcgaactgcccgagttcctgttgcgcgagcgcgtgctctttccctgccccgacgggcttcgcgacgacgagcactacgtgctcgagttcaacacgcaaggcatgcgcgcagtgccgctgagagacttcttgcacgctcggcactcgctcaaagtgtactattacaccgatgcagcagtaccggacacggaaaccatggcgcgcgcagcaggctttgcctttgacgacatggagaaagactacggcttcgggccggacatgtcctactgtttcaagacagtcgcgcgctgttacgcgcgcgtaggcgttcgcgtgcgcgcgctctcgcttctgggtcgcggtgtcgttctgagccagtcttttacgcgcgatccgcgctggctctgcgtgtacgactcggagcgcgggacgacaatgctaccctggagcggaaacttcctggagtggaagctctag

SEQ ID NO: 12931 - DNA, 180 bp, unidentified
  misc_feature 1..180: note = Synthetic
  source 1..180: mol_type = other DNA
acgtactctccaactatttcaacccctcggaggaaaagcacgcggccatttacttcggacgcgaactgcccgagttcctgttgcgcgagcgcgtgctctttccctgccccgacgggcttcgcgacgacgagcactacgtgctcgagttcaacacgcaaggcatgcgcgcagtgccgctga

SEQ ID NO: 12932 - DNA, 459 bp, unidentified
  misc_feature 1..459: note = Synthetic
  source 1..459: mol_type = other DNA
atgccggtgacgttggagccgcacgagctggggctggaagtgcgcgagcacctgcgcgccgcggtcatgcggcgctacctgcacaaggagtccacaggcatcatgcccaaggagatccgcgtgtgcgaggacgtggcgctgccgctgggcgagatcgtgaacaatcaggtcgtggtgcgcgtgccgtgccaggtcacgtacaagtactaccgcgttggcgacactgtgcgcggcacgctgcacatcacggacgagtcggacatctcggtggcgtgcggggacctgctgtgccgcctgcggcgcgactcgggcaccgtctccttcaacgacggcaagtactgcttcatgcgcaacgggcaggtctacgaggacggcagcgaggtgaccgtgacgctgaaggaggcgcagacgggaaccgagtcgatgttcgtgttcctcgcgagcataagtgaaaaataa

SEQ ID NO: 12933 - DNA, 150 bp, unidentified; identical to SEQ ID NO: 4559
  misc_feature 1..150: note = Synthetic
  source 1..150: mol_type = other DNA

SEQ ID NO: 12934 - DNA, 96 bp, unidentified
  misc_feature 1..96: note = Synthetic
  source 1..96: mol_type = other DNA
ataacaatcattatgcagtctgcgcgtccatgtgccttagctgccagttctggtgtttggagtgccaggaaagtggggtgggatgtcgctgtgtag

SEQ ID NO: 12935 - DNA, 447 bp, unidentified; identical to SEQ ID NO: 10586
  source 1..447: mol_type = other DNA
  misc_feature 1..447: note = Synthetic

SEQ ID NO: 12936 - DNA, 84 bp, unidentified
  source 1..84: mol_type = other DNA
  misc_feature 1..84: note = Synthetic
atgaagattaagaaaaacctacctcggctgagagagtgttttttcattaaccttcatcttgtaaacgttgagcaaaattgttaa

SEQ ID NO: 12937 - DNA, 222 bp, unidentified
  source 1..222: mol_type = other DNA
  misc_feature 1..222: note = Synthetic
atgaaacaccgagtgtattctgaagaattgggtattaatactgatttaaactcgataatcagtcaacaatctacaatggatatggatatggaaatagacgaagatgaaatcatggaacttcttaatatattaactgagttaggttgtgatgttgactttgatgaaaattttagcgatatagccgatgatattctagaatcgttgatagaacaggatgtataa

SEQ ID NO: 12938 - DNA, 348 bp, unidentified
  misc_feature 1..348: note = Synthetic
  source 1..348: mol_type = other DNA
ctggggtctaagatattatgtcgatacaataaaaatattggtgttgtgtttgtggacaatgatactacgtgtaatgtttcctttccgagcggtgtgcagttacaattactaaatcaatcggtgatggagtcaattagaactaaaacgtatgtagtggattacgctaggaaaactacagagagaggtgattgcttcatttctgtagcattctgccgaaaagaaagaagacgctttttaccccgctatgagcgcttcgtttactactgcatctcggtttacctttttgctgttgccgttttttgttcttgctggtttgctttggatcctttgtttaatatgtgggcgtaa

SEQ ID NO: 12939 - DNA, 15 bp, unidentified
  misc_feature 1..15: note = Synthetic
  source 1..15: mol_type = other DNA
atgtcgatacaataa

SEQ ID NO: 12940 - DNA, 39 bp, unidentified; identical to SEQ ID NO: 4569
  misc_feature 1..39: note = Synthetic
  source 1..39: mol_type = other DNA

SEQ ID NO: 12941 - DNA, 39 bp, unidentified; identical to SEQ ID NO: 4569
  source 1..39: mol_type = other DNA
  misc_feature 1..39: note = Synthetic

SEQ ID NO: 12942 - DNA, 1947 bp, unidentified
  misc_feature 1..1947: note = Synthetic
  source 1..1947: mol_type = other DNA
atggataaaactttgtccagaaatgaagcaaaagaacttatgcagctgctgggtcttgatatgacctgctggggaaatttaccactaatgagaacaaaataccttagcaaatgcaaagaatttcatcctgacaaagggggaaatgaggaaaaaatgaaaaagcttaattctttatatttaaaactgcaagagtgtgttagtacagtgcaccaactaaatgaagaagaagatgaagtgtggagctcttcacagatacccacatatggtaccccagactgggattactggtggtctcagtttaattcctactgggaagaagaactaagatgtaatgaggaaatgcctaaatctcctggagaaacccctacaaagcgtactagagaagatgatgaggaaccacaatgttcacaggcaacaccacctaaaaaaaaaaaggacaatgctacagatgcatctttatcatttcctaaagaattggaagaatttgtgtctcaagctgtatttagtaatagaactttaactgcatttgtaatacataccaccaaagaaaaggcagaaaccctatataaaaaacttttaagtaagtttaaatgtaattttgcaagtagacattcttattataatactgcacttgtgtttattttaacaccttttagacatagagttagtgctgttaataacttttgtaagggatactgtactattagctttttattttgtaaaggtgttaataatgcatatggtttatatagtagaatgactagagatccatttactttatgtgaagaaaatattcctggtggcttaaaagaaaatgattttaaagctgaggatttatatggggagtttaaagatcaattaaattggaaggctttgtcagaatttgctttagaattaggaattgatgatgtgtacttattacttggattatatttacaactatctattaaggtagaagagtgtgaaaaatgcaatagtaatgaagatgcaactcataatagacttcatatggaacatcaaaaaaatgctttactattttcagacagtaaaagtcaaaaaaatgtgtgtcaacaggctattgatgtggttattgcaaaaagaagggtagatagtttaaatatgtccagagaagatttattagctagaagatttgaaaaaatactggacaaaatggataaaactattaaaggtgagcaagatgttttattatatatggctggtgtagcctggtatttaggcctaaatggtaaaatagatgagcttgtatacaggtacctaaaagttatagttgaaaatgtacctaaaaaaaggtattgggtttttaaggggcctataaacagtggtaaaacaactgttgctgctgctttacttgacctttgtggaggaaaggccttaaatattaatattccagctgatagattaaactttgagttaggagttgcaatagatcaatttacagtagtatttgaagatgtaaaaggtcaagtaggagataataaactgttaccatctggaaatggaatgagtaacttagataatttaagagactatttagatggaagtgttaaagttaatttagaaaaaaaacatttaaataaaaggtcacaaatttttcctccaggtattgtaacaatgaatgaatatttagtccctgctactttggctcctagatttcataaaactgtactttttacacccaaaagacacttaaaagaaagtctggataaaactccagaactaatggtaaaaagagttttacaaagtggaatgtgtattttaattatgttaatatggtgcaggcctgttagtgattttcacccatgtatacaagctaaagttgtgtattggaaagaactgttagacaaatatataggccttactgaatttgctgacatgcaaatgaatgtaacaaatggatgcaacatacttgaaaaacacaatgcttaa

SEQ ID NO: 12943 - DNA, 585 bp, unidentified
  source 1..585: mol_type = other DNA
  misc_feature 1..585: note = Synthetic
atggataaaactttgtccagaaatgaagcaaaagaacttatgcagctgctgggtcttgatatgacctgctggggaaatttaccactaatgagaacaaaataccttagcaaatgcaaagaatttcatcctgacaaagggggaaatgaggaaaaaatgaaaaagcttaattctttatatttaaaactgcaagagtgtgttagtacagtgcaccaactaaatgaagaagaagatgaagtgtggagctcttcacaggtagaatgcacagaattgtgctgtaactttccccctagaaagtacaggcttgttggagaagtttatggtgatgtttttgaagagtatattttaaaagactgggacatatgcttaaaggggttttattatttgtgtaattgtttttactgctttttagacaagcgccacaagcaaaaatataaaatatttagaaaacctccaatgtggatagagtgttactgctacaggtgctatagagagtggtttggctttgaaattagtgcagaaacatttttttactggaaaaagattatatttcttacaaccatgcaaggggttggcttaaccaggtaa

SEQ ID NO: 12944 - DNA, 2403 bp, unidentified
  misc_feature 1..2403: note = Synthetic
  source 1..2403: mol_type = other DNA
atgctcaacgacatgcagtggctcgccagcagcgactcggaggaggagaccgaggtgggaatctctgacgacgaccttcaccgcgactccacctccgaggcgggcagcacggacacggagatgttcgaggcgggcctgatggacgcggccacgcccccggcccggcccccggccgagcgccagggcagccccacgcccgccgacgcgcagggatcctgcgggggtgggcccgtgggtgaggaggaagcggaagcgggaggggggggcgacgtgtgcgccgtgtgcacggacgagatcgccccgcccctgcgctgccagagttttccctgcctgcaccccttctgcatcccgtgcatgaagacctggattccgttgcgcaacacgtgtcccctgtgcaacaccccggtggcgtacctgatagtgggcgtgaccgccagcgggtcgttcagcaccatcccgatagtgaacgacccccggacccgcgtggaggccgaggcggccgtgcgggccggcacggccgtggactttatctggacgggcaaccagcggacggccccgcgctccctgtcgctggggggacacacggtccgcgccctgtcgcccacccccccgtggcccggcacggacgacgaggacgatgacctggccgacgtggactacgtcccgcccgccccccgaagagcgccccggcgcgggggcggcggtgcgggggcgacccgcggaacctcccagcccgccgcgacccgaccggcgccccctggcgccccgcggagcagcagcagcggcggcgccccgttgcgggcgggggtgggatctgggtctgggggcggccctgccgtcgcggccgtcgtgccgagagtggcctctcttccccctgcggccggcggggggcgcgcgcaggcgcggcgggtgggcgaagacgccgcggcggcggagggcaggacgccccccgcgggacagccccgcgcggcccaggagccccccatagtcatcagcgactctcccccgccgtctccgcgccgccccgcgggccccgggccgctctcctttttctcctcctcctccgcgcaggtgtcctcgggccccggggggggaggtctgccacagtcgtcggggcgcgcggcgcgcccccgcgcggccgtcgccccgcgcgtccggagtccgccccgcgccgccgccgcccccgtggtgtctgcgagcgcggacgcggccgggcccgcgccgcccgccgtgccggtggacgcgcaccgcgcgccccggtcgcgcatgacccaggctcagaccgacacccaagcacagagtctgggccgggcaggcgcgaccgacgcgcgcgggtcgggagggccgggcgcggagggaggacccggggtcccccgcggcaccaacacccccggtgccgccccccacgccgcggagggggcggcggcccgcccccggaagaggcgcgggtcggactcgggccctgcggcctcgtcctccgcctcttcctccgccgccccgcgctcgcccctcgccccccagggggtgggggccaagagggcggcgccgcgccgggccccggactcggactcgggcgaccgcggccacgggccgctcgccccggcgtccgcgggcgccgcgcccccgtcggcgtctccgtcgtcccaggccgcggtcgccgccgccgcctcctcttcctcctccgccgcctcctcttcctcctccgccgcctcctcttcctcctccgccgcctcctcttcctcctccgccgcctcttcctcctccgccgcctcctcttcctcctcctcctcctccgcctcttcctctgcgggcggggctggtgggagcgtcgcgtccgcgtccggcgctggggagagacgagaaacctccctcggcccccgcgctgctgcgccgcgggggccgaggaagtgtgccaggaagacgcgccacgcggagggcggccccgagcccggggcccgcgacccggcgcccggcctcacgcgctacctgcccatcgcgggggtctcgagcgtcgtggccctggcgccttacgtgaacaagacggtcacgggggactgcctgcccgtcctggacatggagacgggccacataggggcctacgtggtcctcgtggaccagacggggaacgtggcggacctgctgcgggccgcggcccccgcgtggagccgccgcaccctgctccccgagcacgcgcgcaactgcgtgaggccccccgactacccgacgccccccgcgtcggagtggaacagcctctggatgaccccggtgggcaacatgctctttgaccagggcaccctggtgggcgcgctggacttccacggcctccggtcgcgccacccgtggtctcgggagcagggcgcgcccgcgccggccggcgacgcccccgcgggccacggggagtag

SEQ ID NO: 12945 - DNA, 2430 bp, unidentified
  misc_feature 1..2430: note = Synthetic
  source 1..2430: mol_type = other DNA
acgcccgccgccccgcacgcctgggggatgctcaacgacatgcagtggctcgccagcagcgactcggaggaggagaccgaggtgggaatctctgacgacgaccttcaccgcgactccacctccgaggcgggcagcacggacacggagatgttcgaggcgggcctgatggacgcggccacgcccccggcccggcccccggccgagcgccagggcagccccacgcccgccgacgcgcagggatcctgcgggggtgggcccgtgggtgaggaggaagcggaagcgggaggggggggcgacgtgtgcgccgtgtgcacggacgagatcgccccgcccctgcgctgccagagttttccctgcctgcaccccttctgcatcccgtgcatgaagacctggattccgttgcgcaacacgtgtcccctgtgcaacaccccggtggcgtacctgatagtgggcgtgaccgccagcgggtcgttcagcaccatcccgatagtgaacgacccccggacccgcgtggaggccgaggcggccgtgcgggccggcacggccgtggactttatctggacgggcaaccagcggacggccccgcgctccctgtcgctggggggacacacggtccgcgccctgtcgcccacccccccgtggcccggcacggacgacgaggacgatgacctggccgacgtggactacgtcccgcccgccccccgaagagcgccccggcgcgggggcggcggtgcgggggcgacccgcggaacctcccagcccgccgcgacccgaccggcgccccctggcgccccgcggagcagcagcagcggcggcgccccgttgcgggcgggggtgggatctgggtctgggggcggccctgccgtcgcggccgtcgtgccgagagtggcctctcttccccctgcggccggcggggggcgcgcgcaggcgcggcgggtgggcgaagacgccgcggcggcggagggcaggacgccccccgcgggacagccccgcgcggcccaggagccccccatagtcatcagcgactctcccccgccgtctccgcgccgccccgcgggccccgggccgctctcctttttctcctcctcctccgcgcaggtgtcctcgggccccggggggggaggtctgccacagtcgtcggggcgcgcggcgcgcccccgcgcggccgtcgccccgcgcgtccggagtccgccccgcgccgccgccgcccccgtggtgtctgcgagcgcggacgcggccgggcccgcgccgcccgccgtgccggtggacgcgcaccgcgcgccccggtcgcgcatgacccaggctcagaccgacacccaagcacagagtctgggccgggcaggcgcgaccgacgcgcgcgggtcgggagggccgggcgcggagggaggacccggggtcccccgcggcaccaacacccccggtgccgccccccacgccgcggagggggcggcggcccgcccccggaagaggcgcgggtcggactcgggccctgcggcctcgtcctccgcctcttcctccgccgccccgcgctcgcccctcgccccccagggggtgggggccaagagggcggcgccgcgccgggccccggactcggactcgggcgaccgcggccacgggccgctcgccccggcgtccgcgggcgccgcgcccccgtcggcgtctccgtcgtcccaggccgcggtcgccgccgccgcctcctcttcctcctccgccgcctcctcttcctcctccgccgcctcctcttcctcctccgccgcctcctcttcctcctccgccgcctcttcctcctccgccgcctcctcttcctcctcctcctcctccgcctcttcctctgcgggcggggctggtgggagcgtcgcgtccgcgtccggcgctggggagagacgagaaacctccctcggcccccgcgctgctgcgccgcgggggccgaggaagtgtgccaggaagacgcgccacgcggagggcggccccgagcccggggcccgcgacccggcgcccggcctcacgcgctacctgcccatcgcgggggtctcgagcgtcgtggccctggcgccttacgtgaacaagacggtcacgggggactgcctgcccgtcctggacatggagacgggccacataggggcctacgtggtcctcgtggaccagacggggaacgtggcggacctgctgcgggccgcggcccccgcgtggagccgccgcaccctgctccccgagcacgcgcgcaactgcgtgaggccccccgactacccgacgccccccgcgtcggagtggaacagcctctggatgaccccggtgggcaacatgctctttgaccagggcaccctggtgggcgcgctggacttccacggcctccggtcgcgccacccgtggtctcgggagcagggcgcgcccgcgccggccggcgacgcccccgcgggccacggggagtag

SEQ ID NO: 12946 - DNA, 78 bp, unidentified; identical to SEQ ID NO: 4574
  source 1..78: mol_type = other DNA
  misc_feature 1..78: note = Synthetic

SEQ ID NO: 12947 - DNA, 33 bp, unidentified; identical to SEQ ID NO: 4575
  misc_feature 1..33: note = Synthetic
  source 1..33: mol_type = other DNA

SEQ ID NO: 12948 - DNA, 357 bp, unidentified
  misc_feature 1..357: note = Synthetic
  source 1..357: mol_type = other DNA
acgacgactatgatgaagcggccgtggtggccgtgctgggctgggtgcatcgcttcgaggttgtcgtccgaatcgccggcttgctcctcttccaaatctccacggcggtggccgtcttgggtagcttctctctggtcttccctacagcgactctcaagtcgcgtccgggctttccttgtcacgttgtctgggcgcccgaggtgctcctcctggtgcctgtggcctccgcgctcttcgtgtatttccgctatgagcgaccggttctcgctcagcgaaaccggcacccgcgctgccgtcgtccgttccgacagctggtgctattactcgccggcctcctggcgcacatcccggcgctag

SEQ ID NO: 12949 - DNA, 924 bp, unidentified
  misc_feature 1..924: note = Synthetic
  source 1..924: mol_type = other DNA
ctgcgctttcccaccgcgacccagcgacagatcgtgtttcggcggctgttcgacagcggcaacaacgacgactatgatgaagcggccgtggtggccgtgctgggctgggtgcatcgcttcgaggttgtcgtccgaatcgccggcttgctcctcttccaaatctccacggcggtggccgtcttgggtagcttctctctggtcttccctacagcgactctcaagtcgcgtccgggctttccttgtcacgttgtctgggcgcccgaggtgctcctcctggtgcctgtggcctccgcgctcttcgtgtatttccgctatgagcgaccggttctcgctcagcgaaaccggcacccgcgctgccgtcgtccgttccgacagctggtgctattactcgccggcctcctggcgcacatcccggcgctaggtgtcacgtgtgcctgccaggagccccgcgaggtgttgacgtcgtttgtgctcacgttggtcatcaccttgctctgcgcggaagtagtcttcatctgtcgcgacaactgcaccctgtccgatcaatttgccctcatcaacggcgtctgggtcgtggtctttctggctaacgttctcatcgtcttcacgcggccctggacttggcccctgcggctgcttttgggcttctacagcacggtgggccttatcttcgccggccacttttcgcagcaggtccttttcgtccgtcacgttcttatgccacgcgatgtggcgcatacgtcgctacagctctttattacgttcatttcccttttttttctgatcttgcgaatccgcaactgtcaggacctgctgagcgatctacgtctcttagaactaccgtcgtccgacgcgatgacgttaacgccgaacgacctgtcccatgcttcgtcgtcaacgccgttgtccaccctctcgccctag

SEQ ID NO: 12950 - DNA, 207 bp, unidentified
  misc_feature 1..207: note = Synthetic
  source 1..207: mol_type = other DNA
gtgtttttctcgtttgttgttgttctggtctggaaacacgtggccaaggtctcgagctccagggctcaagatctcctccctccggcctcttccccgagagctgggataacaggcgtgcgctcggaggggctccgggcccttcttgacgcgagactgtgccgctccttcgaagaggtctctcaaaatgaaagaatatcccccctttag

SEQ ID NO: 12951 - DNA, 10305 bp, unidentified; identical to SEQ ID NO: 10820
  source 1..10305: mol_type = other DNA
  misc_feature 1..10305: note = Synthetic

SEQ ID NO: 12952 - DNA, 3603 bp, unidentified; identical to SEQ ID NO: 10821
  misc_feature 1..3603: note = Synthetic
  source 1..3603: mol_type = other DNA

SEQ ID NO: 12953 - DNA, 87 bp, unidentified
  source 1..87: mol_type = other DNA
  misc_feature 1..87: note = Synthetic
atgcccatcttaaactatgaggccgaggcacagcgagccatgcttcctgctattagttacttcaatctaaccggcggagatgactga

SEQ ID NO: 12954 - DNA, 69 bp, unidentified; identical to SEQ ID NO: 4583
  misc_feature 1..69: note = Synthetic
  source 1..69: mol_type = other DNA

SEQ ID NO: 12955 - DNA, 18 bp, unidentified
  misc_feature 1..18: note = Synthetic
  source 1..18: mol_type = other DNA
ttgcaacatggcccatga

SEQ ID NO: 12956 - DNA, 36 bp, unidentified; identical to SEQ ID NO: 4590
  misc_feature 1..36: note = Synthetic
  source 1..36: mol_type = other DNA

SEQ ID NO: 12957 - DNA, 564 bp, unidentified
  source 1..564: mol_type = other DNA
  misc_feature 1..564: note = Synthetic
atgtccatcctcatctctcccgataacaacaccggctggggactgggctccggcaagatgtacggcggagccaaaaggcgctccagtcagcacccagttcgagttcggggccacttccgtgctccctggggagcttacaagcgaggactctcgggccgaacggcggtagacgataccatagatgccgtgattgccgacgcccgccggtacaaccccggaccggtcgctagcgccgcctccaccgtggattccgtgatcgacagcgtggtagctggcgctcgggcctatgctcgccgcaagaggcggctgcatcggagacgtcgccccaccgccgccatgctggcagccagggccgtgctgaggcgggcccggagggtaggcagaagggctatgcgccgcgctgccgccaacgccgccgccgggagggcccgccgacaggctgcccgccaggctgctgccgccatcgctagcatggccagacccaggagagggaacgtgtactgggtgcgcgattctgtgacgggagtccgagtgccggtgcgcagccgacctccccgaagttag

SEQ ID NO: 12958 - DNA, 1677 bp, unidentified
  source 1..1677: mol_type = other DNA
  misc_feature 1..1677: note = Synthetic
atgtcccaatcaaaagaagtgaaatccttcctttggttacagactctgagaagagagctctccccgttttgcacggacgtgagagccaaagttgtcaaggatgccgtgagtctgatcaacggccttgatttctctatggtgtccgatgtccagagactcatgagaaaggataaaaggaatgacgaggacctaatgaaattgagagaattgaaccagacagtggatggcttggtggaccttaaatcgagcaataagaagaacagggttggtgttgggaaactaacctctgatgagttgatgattctggcaacagatctggagaaactcaaaaagaaggtgaccaggaccgaagccagaggccctggagtctatagggggaatctgagtcaggatcaattgggcaggaggtcagagctcctcaacatgattggtatgggcaccccgaggccaacaaggaacacagttgtgagggtctgggacgtcaaagactcttctctcctgaacaatcagtttggcactatgccaagtctgacactggcctgtttaaccagacagacaagggtagatctgaatgatagtgtccaagcctgtgtagatctgggcctcatttacaccgcaaagtttcccaacatggatgatctggacaagctaaagaacaagcatccagttttagactatgtaagcaattgtgattctgcgatcaacatttcaggttacaacttgagtcttgcttcattggtcaaagctggtgcgtctctcatgaagggaggagacatgttggagaccattgaattgaacagcagaaatattgatgacgtgatcaaggcaactctaactgcaaggaacaaagtacagatgtttgtgtctgaggttccaggagaaagaaacccgtatgagaatctactatacaagatctgcttatcaggtgagggttggccatacatctcttccagaaccagcataaaaggcagatcctgggacaacacagtcattgatatgactccaaaggaccctacacctccacagaacgaaagagcaaaagccccccaccaatttcctgtgggtgtgagcttcagccaatctcaactcttagatgacattatgaaaaacctgaaccccaaggggagaacatggatggacattgaaggtagacctgatgatccggtggagatagcaatattccagccagaagaaagactttgcctccacttctacagagagcccacggatcaaaaacaattcaaaaatgacagcaagtactgtcatggcatggatttcactcagctttgctccacccaacctggactaaccacagcagtgttggaaagactcccccttggcatggtgataacctgtcaggggaaggatgacattgaaaaactccttcacagtcaaggtagaagggacgtgaaattcattgatattcaaatgtcaaaagaggcctctagaaagttcgaggaccaggtttgggactcatacaagaccttttgcaaccagcatactggaattgttgtgaccaagtccaagaaagggaagaaagagattacaccacattgtgcactgatggactgtatcatgtatgaatcagcagtgaatgggcaactttaccaagagcccataaggaacttgctgcctgcagacatgatcttcagaacagcagccaagctgagtctgtga

SEQ ID NO: 12959 - DNA, 120 bp, unidentified
  misc_feature 1..120: note = Synthetic
  source 1..120: mol_type = other DNA
aagaacattaagatagccagggcattcacaatcgcagtccagcacagcatgcatttggaggtcatcgtccaaccctataaaaaaagcaaatactattttagttacacattctccttgtaa

SEQ ID NO: 12960 - DNA, 45 bp, unidentified; identical to SEQ ID NO: 4594
  misc_feature 1..45: note = Synthetic
  source 1..45: mol_type = other DNA

SEQ ID NO: 12961 - DNA, 1512 bp, unidentified
  source 1..1512: mol_type = other DNA
  misc_feature 1..1512: note = Synthetic
atggaaatagtcacatacaagacggcttcagcgagatctccgaccgtcacctggtcatcgggattcggacgagctatagcctcaattcaaaaaaggcatcaagaaaatatcaggaaacccctacgcttctacagcggtctcctacactgccttataaaacagtatgagcattgcctcgtcccgccaaataaatcaatacgtttcgacaaagggaagattgaagtcgcggccctaattctagatctcggacaccaggtacttggtcgtcagatacacgtccgacaacgtatctacagctggactagcatcacactccctaaactctttactcccagagaactttactttttagttgcctctccagaagacgaagacatcgtatttaatccaactataacaaagggagggtggatctcgggaagtttttcgtatcccgttgaatacagatcaaacttttcgctaaccggaatgtcggctaacgtattaatggtgccgttcgttccgtatagatacccactaaactatgctcgcttcatatcgtcaatagatctgatgatactaaacgaacaatttccggaacacgaatgcggagacatacagattttaaagcagcgaaactacctctacctgggagtcatcaaaaatcttacatggaaaaaaagcgtcaccggcacaggtcagacagctccacatagaatcctaaaagcttcgttcataggaagttggccggacacctccctgcctgacagagtagcactgcgtttctttaataacactaggtttacgatacactgccacgagttcgcaattaatattgaaaatctcggtctcgtcaaaaataaagagaaagtctttgggacactagccaccgtatgctgcgagcaaatcccttctctactaacgactgaaaatctaccgagatatttaatagttcagtttgaagtagtaacgcaaatcgaagatcccgaacccctgttattttccagtaacccgaaactatattttacaggagacgtactaaacgcaacgatgcaactacagcacaacccaaattattacgatctactcgtacacgcgccatacgacatccatttctatccaagccgatgtcacatagtaattctacctatccgatatttcacgaggggtgacaagcaaatcctcatatccggctatcagaacgaaggtttcttcgaaacccaggtgatgctgtgggctcctggaacaccgttgcatattacgctgcgttcattctctccaaatctgatcctgccccaaagcacacctatcgcaaccctgttttatgtagaaagaatgacaagccagaacactgaacaaaaagacgtaatcgcaaagctgtctgagaatggacattttattggcaacctgaagctccccagagaaaattttttacatcacgacgcgatcactgacttgtctttggcagctatacccaaggactcagcgactcccggcccagggacggtttcttcatcagtttccccgtcttga

SEQ ID NO: 12962 - DNA, 162 bp, unidentified; identical to SEQ ID NO: 4600
  misc_feature 1..162: note = Synthetic
  source 1..162: mol_type = other DNA

SEQ ID NO: 12963 - DNA, 102 bp, unidentified; identical to SEQ ID NO: 4601
  misc_feature 1..102: note = Synthetic
  source 1..102: mol_type = other DNA

SEQ ID NO: 12964 - DNA, 18 bp, unidentified
  misc_feature 1..18: note = Synthetic
  source 1..18: mol_type = other DNA
atgtcagtgaggcagtag

SEQ ID NO: 12965 - DNA, 18 bp, unidentified
  source 1..18: mol_type = other DNA
  misc_feature 1..18: note = Synthetic
atgtcagtgaggcagtag

SEQ ID NO: 12966 - DNA, 18 bp, unidentified
  source 1..18: mol_type = other DNA
  misc_feature 1..18: note = Synthetic
atgtcagtgaggcagtag

SEQ ID NO: 12967 - DNA, 174 bp, unidentified
  source 1..174: mol_type = other DNA
  misc_feature 1..174: note = Synthetic
ctggccctaccgctacccctctttcaacccctcaccatcacccaacccgctgccccacccacatcccccccaccgccaccgctaccgtcacctctgaacttcacctttttcctccatctcgccccacttctctctacatttctccgcccctctattcttactcctgttttctag

SEQ ID NO: 12968 - DNA, 174 bp, unidentified; identical to SEQ ID NO: 12967
  misc_feature 1..174: note = Synthetic
  source 1..174: mol_type = other DNA

SEQ ID NO: 12969 - DNA, 156 bp, unidentified; identical to SEQ ID NO: 4614
  source 1..156: mol_type = other DNA
  misc_feature 1..156: note = Synthetic

SEQ ID NO: 12970 - DNA, 156 bp, unidentified; identical to SEQ ID NO: 4614
  source 1..156: mol_type = other DNA
  misc_feature 1..156: note = Synthetic

SEQ ID NO: 12971 - DNA, 156 bp, unidentified; identical to SEQ ID NO: 4614
  misc_feature 1..156: note = Synthetic
  source 1..156: mol_type = other DNA

SEQ ID NO: 12972 - DNA, 78 bp, unidentified; identical to SEQ ID NO: 4615
  misc_feature 1..78: note = Synthetic
  source 1..78: mol_type = other DNA

SEQ ID NO: 12973 - DNA, 75 bp, unidentified; identical to SEQ ID NO: 4616
  source 1..75: mol_type = other DNA
  misc_feature 1..75: note = Synthetic

SEQ ID NO: 12974 - DNA, 45 bp, unidentified; identical to SEQ ID NO: 4618
  misc_feature 1..45: note = Synthetic
  source 1..45: mol_type = other DNA

SEQ ID NO: 12975 - DNA, 1203 bp, unidentified
  misc_feature 1..1203: note = Synthetic
  source 1..1203: mol_type = other DNA
atgatgaggatggaaactcaggagactctaacagaccgtttcaatgcactgcaagatgcaatattgaatctgattgaagaaaaccccagtgatttgaaatctattattcgttattgggaactaaatagaaaagaacacgtaacattatattatgctagaaaagaaggatttacacgtttaggcctacagcctgtcccaaccccagctgtctcagaatacaatgcaaaacaagcaatacaaatgcaactgctggtaaatagtttaagtaaatctgtgtttgctaaagaaacttggacattatctgactgtagtgctgaacttataaatacactaccaaaagactgttttaaaaaacaaggttatactgtagaagtatggtatgataatgatagaaacaaggcatacccatatactaactggaaaaggatatattatcaagactcacatgacgaatggcaattaactgaaggaaaggtagatgaaaatggactttattatgatgaaaaaaatggtgacagagtttattttatgctgtttggggcagatgcagacaaatatggagtgacaaaagaatggactgtgcattatagagatactactattgtctcctcttccagctccagcaggagggtcgcagactccagccaagccttcacccaaccctctacctccgggtactccaagaccccatcgccgaagcgtcgacgagctgcagaagaggcagattcctcaacatcatcatcatcatcatcagccccatcagggtccccagcgtctaaccttcgagatcggggaggaggacaaggagaacgatccgttcccttatcaaaaagacgaagacacaccagtgaatcagctggggaatctgctgtcccgtctccttctgaagtgggaacaggacatcgactacttgcgcgacaagctcttggaagagttcagcgacttcaagctgaggcttgggatccattcatcctaattttaaaaggtccttcaaataatttgaaatgctggagaaatagaaataaacataatcatgtccatgtaaaagctagcagcaatgtttggagatggctgggggagggttatacatacagtagaatgcttttagcttttgattcagaaacggaaagagaacgctttgtacagtttactaggttccctaaagacactacatatgcctatggaaatttagaatcattgtaa

SEQ ID NO: 12976 - DNA, 57 bp, unidentified; identical to SEQ ID NO: 4620
  misc_feature 1..57: note = Synthetic
  source 1..57: mol_type = other DNA

SEQ ID NO: 12977 - DNA, 135 bp, unidentified; identical to SEQ ID NO: 4622
  source 1..135: mol_type = other DNA
  misc_feature 1..135: note = Synthetic

SEQ ID NO: 12978 - DNA, 135 bp, unidentified; identical to SEQ ID NO: 4622
  misc_feature 1..135: note = Synthetic
  source 1..135: mol_type = other DNA

SEQ ID NO: 12979 - DNA, 417 bp, unidentified; identical to SEQ ID NO: 12566
  misc_feature 1..417: note = Synthetic
  source 1..417: mol_type = other DNA

SEQ ID NO: 12980 - DNA, 36 bp, unidentified; identical to SEQ ID NO: 4626
  source 1..36: mol_type = other DNA
  misc_feature 1..36: note = Synthetic

SEQ ID NO: 12981 - DNA, 36 bp, unidentified; identical to SEQ ID NO: 4631
  source 1..36: mol_type = other DNA
  misc_feature 1..36: note = Synthetic

SEQ ID NO: 12982 - DNA, 1161 bp, unidentified
  source 1..1161: mol_type = other DNA
  misc_feature 1..1161: note = Synthetic
ctgaacgaaaagatggctacagtcaactgggctgattcctctgaaccacaacgtggtcgtcagggcagaataccttattccctttatagccctttgcttgttgatagtgaacaaccttggaaggtgatacctcgtaatttggtacccaccaacaagaaagataaaagcaagcttataggctattggaatattcaaaaacgtttcagaactagaaagggcaaacgggttgacttgtcacctaagttgcatttctattatcttggcacaggaccccacaaagatgctaaattcagagagcgcattgaaggtgttgtctgggttgctgttgatggtgctaaaaccgaacctactggttatggtgttaggcgcaagaattcagatccagaagaaccactcttcagtcaaagtcttccaaatggtgttactgttgttgaagaacctgactctcgtgctccttcgcgttctcagtcaaagtcacagagccgaggtcgtggtgaatttaaacctcagtcgcgcaattcttcaagtgcaagtcaggacgacattattaaggcagtagctgctgctcttaaatctttaggttttgaaaaagagaaagaggcagcgaaaaagggtactcctaagccttctagaaatcagagtcctgcttcttttcagactcgtgccaagagccctgctcgtcctcagaattctgaaacaaaagaacaaaagcatgaaatgcaaaaaccacggtggaaaagacagcctaatgatgatttgacatctaatgttacacagtgttttggccccagagatccttaccacaactttggaagtgcaggtgttgtagctaatggtgtcaaagccaaaggctacccacaatttgctgaacttgtgccttctacagctgccatgctgtttgacagtcacattgactctaaggagtctggcaataatgttgttcttacttacacaactagggttacagtgcccaaggaccacccgcatttgggcaagttcttagaggagttaaatgcattcactaagcctctacaaggagacatgcaacaacaccctcttcttaaccctagtgcacaagaattacaaacttcacctggaactgctgaaccagtctacgatgcagtttctattgaaactgacataattgatgaagtcaactaa

SEQ ID NO: 12983 - DNA, 1038 bp, unidentified
  source 1..1038: mol_type = other DNA
  misc_feature 1..1038: note = Synthetic
atgctatcaggtaacgcaggagaaggagcaacagcctgcggaggttcggccgccgcgggccaggacctcatcagcgtcccccgcaacacctttatgacactgcttcagaccaacctggacaacaaaccgccgaggcagaccccgctaccctacgcggccccgctgccccccttttcccaccaggcaatagccaccgcgccttcctacggtcctggggccggagcggtcgccccggccggcggctactttacctccccaggaggttactacgccgggcccgcgggcggggacccgggtgccttcttggcgatggacgctcacacctaccacccccacccacacccccctccggcctactttggcttgccgggcctctttggcccccctccacccgtgcctccttactacggatcccacttgcgggcagactacgtccccgctccctcgcgatccaacaagcggaaaagagaccccgaggaggatgaagaaggcggggggctattcccgggggaggatgccaccctctaccgcaaggacatagcgggcctctccaagagcgtgaatgagttacagcacacgctacaggccctgcgccgggagacgctgtcctacggccacaccggagtcggatactgcccccagcagggcccctgctacacccacccggggccttacggatttcagcctcatcaaagctacgaagtgcccagatacgtccctcatccgcccccaccaccaacttctcaccaggcagctcaggcgcagcctccacccccgggcacacaggcccccgaagcccactgtgtggccgagtccacgatccctgaggcgggagcagccgggaactctggaccccgggaggacaccaaccctcagcagcccaccaccgagggccaccaccgcggaaagaaactggtgcaggcctctgcgtccggagtggctcagtctaaggagcccaccacccccaaggccaagtctgtgtcagcccacctcaagtccatcttttgcgaggaattgctgaataaacgcgtggcttga

SEQ ID NO: 12984 - DNA, 1038 bp, unidentified
  source 1..1038: mol_type = other DNA
  misc_feature 1..1038: note = Synthetic
atgctatcaggtaacgcaggagaaggagcaacagcctgcggaggttcggccgccgcgggccaggacctcatcagcgtcccccgcaacacctttatgacactgcttcagaccaacctggacaacaaaccgccgaggcaaaccccgctaccctacgcggccccgctgccccccttttcccaccaggcaatagccaccgcgccttcctacggtcctggggccggagcggtctccccggccggcggctactttacctccccaggaggttactacgccgggcccgcgggcggggacccgggtgccttcttggcgatggacgctcacacctaccacccccacccacacccccctccggcctactttggcttgccgggcctctttggcccccctccacccgtgcctccttactacggatcccacttgcgggcagactacgtccccgctccctcgcgatccaacaagcggaaaagagaccccgaggaggatgaagaaggcgggggactattcccgggggaggacgccaccctctaccgcaaggacatagcgggcctctccaagagtgtgaatgagttacagcacacgctacaggccctgcgccgggagacgctgtcctacggccacaccggagtcggatactgcccccagcagggcccctgctacacccactcggggccttacggatttcagcctcatcaaagctacgaagtgcccagatacgtccctcatccacccccaccaccaacttctcaccaggcagctcaggcgcagcctccacccccgggcacacaggcccccgaagcccactgtgtggccgagtccacgatccctgaggcgggagcagccgggaactctggaccccgggaggacaccaaccctcagcagcccaccaccgagggccacccccgcggaaagaaactggtgcaggcctctgcatccggagtggctcagtctaaggagcccaccacccccaaggccaagtctgtgtcagcccacctcaagtccatcttttgcgaggaattgctgaataaacgcgtggcttga

SEQ ID NO: 12985 - DNA, 1038 bp, unidentified
  source 1..1038: mol_type = other DNA
  misc_feature 1..1038: note = Synthetic
atgctatcaggtaacgcaggagaaggagcaacagcctgcggaggttcggccgccgcgggccaggacctcatcagcgtcccccgcaacacctttatgacactgcttcagaccaacctggacaacaaaccgccgaggcagaccccgctaccctacgcggccccgctgccccccttttcccaccaggcaatagccaccgcgccttcctacggtcctggggccggagcggtcgccccggccggcggctactttacctccccaggaggttactacgccgggcccgcgggcggggacccgggtgccttcttggcgatggacgctcacacctaccacccccacccacacccccctccggcctactttggcttgccgggcctctttggcccccctccacccgtgcctccttactacggatcccacttgcgggcagactacgtccccgctccctcgcgatccaacaagcggaaaagagaccccgaggaggatgaagaaggcggggggctattcccgggggaggacgccaccctctaccgcaaggacatagcgggcctctccaagagtgtgaatgagttacagcacacgctacaggccctgcgccgggagacgctgtcctacggccacaccggagtcggatactgcccccagcagggcccctgctacacccactcggggccttacggatttcagcctcatcaaagctacgaagtgcccagatacgtccctcatccgcccccaccaccaacttctcaccaggcagctcaggcgcagcctccacccccgggcacacaggcccccgaagcccactgtgtggccgagtccacgatccctgaggcgggagcagccgggaactctggaccccgggaggacaccaaccctcagcagcccaccaccgagggccaccaccgcggaaagaaactggtgcaggcctctgcgtccggagtggctcagtctaaggagcccaccacccccaaggccaagtctgtgtcagcccacctcaagtccatcttttgcgaggaattgctgaataaacgcgtggcttga

SEQ ID NO: 12986 - DNA, 921 bp, unidentified
  misc_feature 1..921: note = Synthetic
  source 1..921: mol_type = other DNA
atgacaattcacagatcagctcaaccagacaccaccagcatacacgaaaccaaccttcacagtggatacctcagcatccaaaactctccttcccgaatggatcaggatgccttcttttttgagagggatcctgaagccgaaggagaggcaccacgaaaacaagaatcactctcagatgtcatcggactccttgacgtcgtcttatcctacaagcccacagaaattggagaagacagaagctggctccatggtatcatcgacaacccaaaagaaaacaagccatcatgcaaagccgacgataacaacaaagacagagcaatctcaacgtcgacccaagatcatagatcaagtgaggggagtggaatctctaggagaacaagtgagtcaaaaacagagacacatgctagaatccttgatcaacaaggtatacacagggcctctaggcgaggaactagtccaaaccctctacctgagaatatgggcaatgaaagaaacaccagaatcgacgaagattctccaaatgagagaagacatcagagatcagtacttacggatgaagacagaaagatggctgagaactctaataagagggaagaagaccaagttgagggatttccagaagaggtacgaagaagtacacccttatctgatgatggagagggtagaacaaataataatggaagaagcatggaaactagcagcacacatagtacaagaataactgatgtcattaccaacccaagtccagagcttgaagatgccgttctacaaaggaacaaaagacggccgacgaccatcaagcgtaaccaaacaagatcagagagaacacagagttcagaactccacaaatcaacaagtgaaaatagctccaacctcgaagaccacaacaccaaaaccagcccaaaagttccaccgtcaaag

SEQ ID NO: 12987 - DNA, 660 bp, unidentified; identical to SEQ ID NO: 9972
  misc_feature 1..660: note = Synthetic
  source 1..660: mol_type = other DNA

SEQ ID NO: 12988 - DNA, 42 bp, unidentified; identical to SEQ ID NO: 4654
  source 1..42: mol_type = other DNA
  misc_feature 1..42: note = Synthetic

SEQ ID NO: 12989 - DNA, 1044 bp, unidentified
  source 1..1044: mol_type = other DNA
  misc_feature 1..1044: note = Synthetic
atgacagcaaaacaaatttttccagtttggaaagactgtacactttacgttaacaatgagacagcaactgtgcatgaaatcttgaattccgatttaagtgaactgttacagttaaagacggaatttgtatctatgacagacctatgtgtttacattactggatgtataaatcagaatatttccagcatcacgatatattggcatgcttacagtgaagtaatttatgctttaactggaattatacactgtgaaaagatttctattgaatgtggaattaaatccacggacaataacattttgtatgaaaagcccaaactgtttttacttcgagaaaatttagcaccaactgaattaaggtggaaatctttaataaaaacaaagactataaaaagtgctctgtctccaaatcaaaatgagatttttcccaaaatagcacacaagccgtcaatccttttagagattgaagaagcaccccgatttaaggaaatggtgtcatgtatttggaagttagttgccgaagaggcgaccataacctcaaaaagcgagaatgatattgtcaaaacatgcaaaaagcttgctgaatcacaaagatatactttgacaaatggtactgtgttgcaaaattttatattagtccatgcctgcttatttaagcttggagctgttaatttttgggaggaaatgaatggaaaattacgtcaacggccagaactaatgtcaaaatcattcactggccatgaggaatgtttctataattgttattatttatgcactttgttaaattccatttatagttacaaaactttattgccagaaattgtagacaataccagatccattcatgtagtagtgaaagcatattattcagagcacatagatgtttcttacaaaattctttcgtactcaacaaacatgatgaacttattctctcagtatttaaattttacagatttattgccatatataaataagcacattaaaattgatgtttcagcatctaagcaagatatgattaaattcttaaatgcctgtttgggactttag

SEQ ID NO: 12990 - DNA, 288 bp, unidentified
  misc_feature 1..288: note = Synthetic
  source 1..288: mol_type = other DNA
aggaaatcacccgccatgaacagcaaattgtcattgcccggcaaaaacttaaagatgcagaaaagacggtggaagccgacccggatgatgttaacaagagcacactacagagtagacgggcagctgtgtcagcattggaggacaaactggcagacttcaagaggcagcttgcagatctggtgtcaagtcaaaaaatgggtgaaaagcctgttgacccgactgggcttgagccggatgatcacctcaaggagagatcaagccttcgatatggaaatgtccttgatgtga

SEQ ID NO: 12991 - DNA, 51 bp, unidentified; identical to SEQ ID NO: 4659
  source 1..51: mol_type = other DNA
  misc_feature 1..51: note = Synthetic

SEQ ID NO: 12992 - DNA, 933 bp, unidentified
  source 1..933: mol_type = other DNA
  misc_feature 1..933: note = Synthetic
atggaaggcgaccagctggtcctgaacagcattagcgccaaggcgctgaaggcatacctgtgccagcgcctctgcgagatcgtggacgagatggtcacgcgcaaggccgcgcccaagaagaagcagcagaccaagaagcccgaggtgcgcattcccgtggacctcatcaagcccgagttcgcggcgcgtttcggcctgcacggctaccgcgacggcgtgctggccagcctcatcgtgagcctggtcgagaacaactacttcgaggccggcaagctcaagcccggcgaacaccccgagctggtgatcctggatatcgagcgcgagattctggcgcgcgtgccgcccgagtccgcgctcaacattgacgtgggcgacgtgaagacgctggcggcgcgcctgcgcaccagtgcgcactgtttcgagttccgcgggcacacttacttcctggagcacgacaagacagaagaaatcatcaaccagctggtgcgcaacggcgcgctcacgctggacgcgcgcaactccgtcaaggacagtttctacaccatcagcgacgagctgctggacgtgctgcgcgcgcgcctcttccgctgtccgcaggtcaaggacaacaccatttcgcgcactcgcctctacgactacctcattcgcatgaccaagcccgacgagtctcgcctctacgtgatcctgcgcgacgcgcgcctggccgagctgctggacatcgagaccgtgacagtgaatcacttcgtgtataccaagcacagcttgctagtggcctccgtttcggcgcacgtggacaagtactccaagcgctttggcgacgccttttaccagggtattgccgagtacgtcaaggacaatgagaagatcaatgtggccaaggtggtcgactacctcacggtgtccacggtgaagtgcgccgcattggaggaatag

SEQ ID NO: 12993 - DNA, 777 bp, unidentified
  source 1..777: mol_type = other DNA
  misc_feature 1..777: note = Synthetic
acgcagctcagcgaatcgcttggttgctacataaggatggaggaatccctgatggatgttccctctacctccggcactcaagtttattcgcgcaaagcgaggaagaggagccattctccaactaagaaactgcgctacgttaagcgtagattttctcttctgcgccatgaagaccttagtgttattgtccaaccaacacactatgtcagggttacattttcagaccccaacatgtggtatctacgttcgggtcatcatttacactcagttcacaattggcttaaaccttatggcggccaacctgtttctgagtaccatattactctagctttgctaaatctcactgatgaagatttagctagagatttttcacccattgcgctctttttgcgcaatgtcagatttgagctacatgagttcgccttgctgcgcaaaactcttgttcttaatgcatcagagatctactgtgctaacatacatagatttaagcctgtgtatagagttaacacggcaatccctactattaaggattggcttctcgttcagggattttccctttaccatagtggcctccctttacatatgtcaatctctaaattgcatgcactggatgatgttactcgcaattacatcattacaatgccatgctttagaacttaccctcaacaaatgtttgttactcctttggccgtagatgttgtctccatacggtcttccaatcagggtaataaacaaattgttcattcttatcccattttacatcatccaggattttaa

SEQ ID NO: 12994 - DNA, 777 bp, unidentified
  misc_feature 1..777: note = Synthetic
  source 1..777: mol_type = other DNA
acgcagctcagcgaatcgcttggttgctacataaggatggaggaatccctgatggatgttccctctacctccggcactcaagtttattcgcgcaaagcgaggaagaggagtcattctccaactaagaaactgcgctacgttaagcgtagattttctcttctgcgccctgaagaccttagtgttattgtccaaccaacacactatgtcagggttacattttcagaccccaacatgtggtatctacgttcgggtcatcatttacactcagttcacaattggcttaaaccttatggcggccaacctgtttctgagtaccatattactctagctttgctaaatctcactgatgaagatttagctagagatttttcacccattgcgctctttttgcgcaatgtcagatttgagctacatgagttcgccttgctgcgcaaaactcttgttcttaatgcatcagagatctactgtgctaacatacatagatttaagcctgtgtatagagttaacacggcaatccctactattaaggattggcttctcgttcagggattttccctttaccatagtggcctccctttacatatgtcaatctctaaattgcatgcactggatgatgttactcgcaattacatcattacaatgccatgctttagaacttatcctcaacaaatgtttgttactcctttggccgtagatgttgtctccatacggtcttccaatcagggtaataaacaaattgttcattcttaccccattttacatcatccaggattttaa

SEQ ID NO: 12995 - DNA, 51 bp, unidentified; identical to SEQ ID NO: 4669
  source 1..51: mol_type = other DNA
  misc_feature 1..51: note = Synthetic

SEQ ID NO: 12996 - DNA, 51 bp, unidentified; identical to SEQ ID NO: 4669
  source 1..51: mol_type = other DNA
  misc_feature 1..51: note = Synthetic

SEQ ID NO: 12997 - DNA, 45 bp, unidentified
  misc_feature 1..45: note = Synthetic
  source 1..45: mol_type = other DNA
atgtgggtatttattatggtacgttattatcggaacacttggtag

SEQ ID NO: 12998 - DNA, 45 bp, unidentified; identical to SEQ ID NO: 12997
  misc_feature 1..45: note = Synthetic
  source 1..45: mol_type = other DNA

SEQ ID NO: 12999 - DNA, 273 bp, unidentified
  source 1..273: mol_type = other DNA
  misc_feature 1..273: note = Synthetic
atgaacagcaacttattgttgccagacaaaaacttaaggatgcagagagagcagtggaagtggacccagatgacgttaataaaaacacactgcaagccaggcaacaaacagtgtcagcactggaggacaaactcgcagactacaagagaaggatggcagatgctgtgtccaggaaaaaaatggatactaaacctactgacccgactgggattgaacctgatgaccacctcaaggagagatcaagccttaggtatggaaatgtccttgatgtaa

SEQ ID NO: 13000 - DNA, 45 bp, unidentified; identical to SEQ ID NO: 4675
  source 1..45: mol_type = other DNA
  misc_feature 1..45: note = Synthetic

SEQ ID NO: 13001 - DNA, 75 bp, unidentified
  source 1..75: mol_type = other DNA
  misc_feature 1..75: note = Synthetic
ctgctcttgactttcacaaagttgctcaagtccaaagaatggtgcgcaaagataagaggactgattctgatctga

SEQ ID NO: 13002 - DNA, 63 bp, unidentified; identical to SEQ ID NO: 4678
  misc_feature 1..63: note = Synthetic
  source 1..63: mol_type = other DNA

SEQ ID NO: 13003 - DNA, 75 bp, unidentified; identical to SEQ ID NO: 4679
  misc_feature 1..75: note = Synthetic
  source 1..75: mol_type = other DNA

SEQ ID NO: 13004 - DNA, 30 bp, unidentified; identical to SEQ ID NO: 4681
  misc_feature 1..30: note = Synthetic
  source 1..30: mol_type = other DNA

SEQ ID NO: 13005 - DNA, 288 bp, unidentified
  misc_feature 1..288: note = Synthetic
  source 1..288: mol_type = other DNA
atgggcaattcaaaatctaaatccaacccatccagttcctcagagtctcaaaaaggggcaccaacagtcacagaatttaggaggactgccattcacagtctctatgggaggtacaactgcaagtgttgctggtttgctgacaagaatctgattaaatgctctgatcattacctctgcttgaggtgtttaaatgtcatgctgaaaaactctgatctttgcaacatttgttgggagcagctgcccacatgcatcacagttccggaggagccaagcgctccaccggaatga

SEQ ID NO: 13006 - DNA, 1440 bp, unidentified; identical to SEQ ID NO: 12713
  misc_feature 1..1440: note = Synthetic
  source 1..1440: mol_type = other DNA

SEQ ID NO: 13007 - DNA, 114 bp, unidentified
  source 1..114: mol_type = other DNA
  misc_feature 1..114: note = Synthetic
atgtttggaaatcaggaattcttcagctgtttgtgttcttggttctggcgggaaggtcatgctctttcaaagttggtcatcatacaaattttgagtcatttacagttaagctag

SEQ ID NO: 13008 - DNA, 825 bp, unidentified
  misc_feature 1..825: note = Synthetic
  source 1..825: mol_type = other DNA
atggatgtcgtgcaggaggtgcgcttcaagcgggagagcctcatcgaggcgcccttcaggatggcgctcgtcggcggctccggctccggcaagaccgcatacctgctttcgctcttccgcacgctcgtgcggcgcttcaagcacatcctgctcttcacgcccgtctacaacgccgcctacgacggcttcgtgtggccggaccacatccacaaggtcaccacgcacgaggagctcgagtacaacctctcggtcgccaagcgcaagatcgagcggcacgcgcagacgaagaagcagaagttcctcatcattctcgacgatatgggcgacacacagacgcggtcgcccacactcttgggcctcatgaactacgggcggcacatcaacgtgtcgctggtgctgctctgccagacctacaagcacatccccgtcaacgggcgcgccagcatcacgcacctctgctgctgcaacgtctccgactccgacgtggagaacgtgctccggtccatgtccatacgcggatcgaagaagaggctcatccgggccatggccatcatgcggtcggccgggaccaggagggtgttgatcatcgaagactcggtgttctgccagaaccaggagcgcatctgctacgacttcgccgacgagagcgtcgtcaagcgctgtctcgaccccggcatcctgctcgcgcagttctcgcacatgaagacgcggctcgccgacatcgtcgacgccgagaccaagggcgacaagggcgaccgcgccggtcgcggcgacggcaaggacggcagcgaaagcgacaggggcgacgccgacagcgacaattaa

SEQ ID NO: 13009 - DNA, 303 bp, unidentified
  misc_feature 1..303: note = Synthetic
  source 1..303: mol_type = other DNA
atgggtaactccaagtcaaaatcaaagctgtctgctaaccagtatgaacagcaaacagtcaatagcaccaaacaggtagccattttaaagagacaggctgaacctagtctgtatggaagacacaactgcaggtgctgctggttcgccaatacaaatctaataaaatgttccgaccattatatttgtctaaaatgtttgaacataatgttggggaagtcttctttttgtgacatttgtggtgaagagctccccacatccattgtggtgcccatcgaaccaagtgctccacctccagaagactaa

SEQ ID NO: 13010 - DNA, 36 bp, unidentified; identical to SEQ ID NO: 4688
  misc_feature 1..36: note = Synthetic
  source 1..36: mol_type = other DNA

SEQ ID NO: 13011 - DNA, 87 bp, unidentified
  misc_feature 1..87: note = Synthetic
  source 1..87: mol_type = other DNA
atcatcatcatcatcatcatcttcaacttcgatatttattttgctatcttgatgatgtcctgtatcagttgcattttcagcacttga

SEQ ID NO: 13012 - DNA, 120 bp, unidentified; identical to SEQ ID NO: 4692
  misc_feature 1..120: note = Synthetic
  source 1..120: mol_type = other DNA

SEQ ID NO: 13013 - DNA, 63 bp, unidentified; identical to SEQ ID NO: 4693
  source 1..63: mol_type = other DNA
  misc_feature 1..63: note = Synthetic

SEQ ID NO: 13014 - DNA, 243 bp, unidentified
  misc_feature 1..243: note = Synthetic
  source 1..243: mol_type = other DNA
atcgcaacaattaggtacaaaactttgcaccggcgtaagcagaccgaaagtaaaacatatagcacggggcgaaacataggaattctcctactagcttcctcaatgtgcgcgattcccaccgctctctttgtgcagattaacggagcaaaaaaaacgacgggaaaatgcgtcgtttatctatcctctccgaaagcttacgaactgtttctagcggtgaaaattgttttcagcttcatttggtga

SEQ ID NO: 13015 - DNA, 33 bp, unidentified; identical to SEQ ID NO: 4702
  misc_feature 1..33: note = Synthetic
  source 1..33: mol_type = other DNA

SEQ ID NO: 13016 - DNA, 195 bp, unidentified; identical to SEQ ID NO: 4705
  misc_feature 1..195: note = Synthetic
  source 1..195: mol_type = other DNA

SEQ ID NO: 13017 - DNA, 642 bp, unidentified
  source 1..642: mol_type = other DNA
  misc_feature 1..642: note = Synthetic
aaggatctcaaaagggcctgccagatggccgggtttactctgaagggggggacttcgggggatcttgtattctcatcgcatgcgaacttgctcttttcaacctcgatgggatatttcctccatgcaggcagtccaaggtcgacagcggggacggggggtgagcctaacccacgtcacatcaccggaccagacactgagggaaatggggaacacagaaactcccccaacctctgcggctttgttacctggctgcaaagcttaaccacatgcattgaacgagccctaaacatgcctcccgacacttcctggctgcagctgatagaggaagtgatacccctgtattttcataggcgaagacaaacatcattctggctcatccccctatcgcactgtgaagggatcccagtatgcccccctttaccatttgactgcctagcaccaaggctgtttatagtaacaaagtccggacccatgtgttaccgggcaggcttttcgcttcctgtggatgttaattacctgttctatttagagcagactctgaaagctgtccggcaagttagcccacaggaacacaacccccaagacgcaaaggaaatgactctacagctagaggcctggaccaggcttttatctttattttga

SEQ ID NO: 13018 - DNA, 24 bp, unidentified
  source 1..24: mol_type = other DNA
  misc_feature 1..24: note = Synthetic
atgttgatcacagccaatccatga

SEQ ID NO: 13019 - DNA, 21 bp, unidentified
  misc_feature 1..21: note = Synthetic
  source 1..21: mol_type = other DNA
atgacaaatctgaatgtatga

SEQ ID NO: 13020 - DNA, 48 bp, unidentified; identical to SEQ ID NO: 4710
  source 1..48: mol_type = other DNA
  misc_feature 1..48: note = Synthetic

SEQ ID NO: 13021 - DNA, 42 bp, unidentified; identical to SEQ ID NO: 2468
  source 1..42: mol_type = other DNA
  misc_feature 1..42: note = Synthetic

SEQ ID NO: 13022 - DNA, 138 bp, unidentified; identical to SEQ ID NO: 4714
  misc_feature 1..138: note = Synthetic
  source 1..138: mol_type = other DNA

SEQ ID NO: 13023 - DNA, 222 bp, unidentified; identical to SEQ ID NO: 12937
  misc_feature 1..222: note = Synthetic
  source 1..222: mol_type = other DNA

SEQ ID NO: 13024 - DNA, 30 bp, unidentified; identical to SEQ ID NO: 4721
  source 1..30: mol_type = other DNA
  misc_feature 1..30: note = Synthetic

SEQ ID NO: 13025 - DNA, 30 bp, unidentified; identical to SEQ ID NO: 4721
  source 1..30: mol_type = other DNA
  misc_feature 1..30: note = Synthetic

SEQ ID NO: 13026 - DNA, 30 bp, unidentified; identical to SEQ ID NO: 4721
  source 1..30: mol_type = other DNA
  misc_feature 1..30: note = Synthetic

SEQ ID NO: 13027 - DNA, 30 bp, unidentified; identical to SEQ ID NO: 4722
  source 1..30: mol_type = other DNA
  misc_feature 1..30: note = Synthetic

SEQ ID NO: 13028 - DNA, 30 bp, unidentified; identical to SEQ ID NO: 4722
  source 1..30: mol_type = other DNA
  misc_feature 1..30: note = Synthetic

SEQ ID NO: 13029 - DNA, 297 bp, unidentified
  misc_feature 1..297: note = Synthetic
  source 1..297: mol_type = other DNA
atagtacctgcaatatctgaaaaaatgagacgagaacgagccgcatacgtaaactacaaacgtctaaacaagaatttcatttgtgtcgatgatagactgtttggttataattttacaacatctggaattaaggcaaaggtggccgttaacaaaaatgttcccattccatgttccaagataaacgaggtcaataataaagatgttgatacactatattgtgataaagatagagacgatataccaggttttgcacgatcgtgttatagggcatattctgacttattttttactacctaa

SEQ ID NO: 13030 - DNA, 306 bp, unidentified
  source 1..306: mol_type = other DNA
  misc_feature 1..306: note = Synthetic
attatagtacctgcaatatctgaaaaaatgagacgagaacgagccgcatacgtaaactacaaacgtttaaacaaaaatttcatttgtgtcgatgatagactgtttagttataattttacaacatctggaattaaggcaaaggtggccgttgataacaaaaatgttcccattccatgttccgagataaacgaggtcaataataataaagatgtcgatacactatactgtgataaagatagagacgatataccaggttttacacgatcgtgctatagggcatattctgacttattttttactacctaa

SEQ ID NO: 13031 - DNA, 303 bp, unidentified
  source 1..303: mol_type = other DNA
  misc_feature 1..303: note = Synthetic
atagtacctgcaatatctgaaaaaatgagacgcgaacgagccgcatacgtaaactacaaacgtctaaacaagaatttcatttgtgtcgatgatagactgtttagttataattttacaacatccggaattaaggcaaaggtggccgttgataacaaaaatgttcctattccatgttccaagatacacgaggtcaataataataaaaatgtcgatacactatattgcgataaagatagagacgatataccaggttttgcacgatcgtgctatagggcatattctgacttattttttactacctaa

SEQ ID NO: 13032 - DNA, 198 bp, unidentified
  misc_feature 1..198: note = Synthetic
  source 1..198: mol_type = other DNA
atgagcctgaagagaaccctggcaagcgcccaacccggagcgcgcccctttaccgtcaccgaaaccaacctaacgcgaaccctgcgaccctggaaagacattacccttgctccactggacgcccaccgactggtaccgtacagccaaagccgtcccaacccccgcaaccaagaagtttgttggatcgagatgccatag

SEQ ID NO: 13033 - DNA, 10338 bp, unidentified
  misc_feature 1..10338: note = Synthetic
  source 1..10338: mol_type = other DNA
acgagtgcgggcaaccgtaaacacagtttgaacgttttttggagagagactactatgtcaaacaaaaaaccaggaagacccggggcaacccgggttgtcaatatgctaaagcgcggcgcatcccgcggaaatccgatatctcggatcaagaggatgttggatgggctattcaagggaataggacccatcaggattgtccttgcattcctgacgtttttcaaatttacagctttgaaaccgacggcaggattgttgagacgatggaagattgttggtgtggcggaagccacgcgacatctaaaaagttttaggaaggacataggacagatgttggatggactcaacaagagaggaaagaagaaaagaggaggaagcactggtggtttgcttttgattattagcttctcatgtgcgtgtgcccttaaggtgggatcgtacaatggaaagccgctgatcactgtaaaccaagcggacgtgcagaacccaattgagctaccaacagcacagggaacgaaccgatgcatggtgaaagctttggatgttggactcatgtgtcctgacgacataacatatttgtgccccaagcttgaaaatggatatgaccctgaggacattgattgctggtgcaacggaacggaagtgtacatacattatggtcggtgcacgccgacgagacatgccagacggtcaagaagagcgatcacagtccatcatcatggcgaaagcctattggaagcgaagaacacaccatggatggactcaacaaaagccacaaagtacttgactaaggttgagaactgggctattcgaaatccaggatacgctctagccgcagccatagtgggttggaacttggggaccaccaaagcacaaaagataatctttaccatcatgctcatgctcattgcaccagcgtacagtttcaattgcttgggcatgcagaaccgtgactttgttgaaggcgtgaatggagttgagtggattgatgttgtaatggaaggaggaagttgtgtgactataacggcgaaagacaaaccaacaattgatgtcaaaatgatgaacatggaggcaactgacttggccctcgtccgctcttattgctatgaacccaaaataaccgatgtcagtacagagccacgctgcccaaccatgggagaggcccacaatacaaaggcatccagtcaagactacgtatgtaagaaaggattgacggacagaggatggggaaatggctgtggactgtttggaaaaggaagcattcatacatgtgcaaaattcgaatgcacacataaagctgaagggagggtagtgcagaaagaaaacatccagtttgaagtggctgtcttcgtgcatggctcgacggaagtcggaacttataacaactactctatacagcaatcactgaaacatgctgcgagatttgtcatcacacccaaagctccggtgcacacagcagagctgagtgagtatggaacggtcactctggaatgtgaaccgcggtcaggtcttgatatgagtcaattttatgtgatgaccatgaacatgaagagctggctagtgaacagagactggttccatgatttaaatctgccatggaccggttcagcagcaggaaattggcaaaatagagagtcactagttgaatttgaggaggcgcacgccaccaagcaatcagtggttgctttggcctctcaagaaggagccctgcacgcggcactggccggagcaattcctgtgaagtacacaagcagcaagctggaaatgacatcaggacacttgaaatgtagggtaaaattgcaaggattgaagttaaaaggaatgacttacccaatgtgctctaacaaattcagcctagctaggaatcccacagacacggggcatggaacagtggtggtgaaattgagctatgctggctctgatggaccatgcagaataccaatctcaatgacagcaaatctacaggacttgaccccgatcggccgcatgataactgtgaacccatatgtttccacatcctccaccggaacgaaagtgatagttgaattggaaccaccctttggcgactcgttcatcctagttggtagtggagaaaatcaaattaaatatcagtggcataagagtgggagctcaattggtaaagcatttgtttccaccctcaagggagcccagcgtatggtggcacttggggatactgcctgggatttcggatcagtaggaggtttctttacctctcttggaaaaggaattcaccaagtctttggaacagcattcagaagcttgttcggaggcatgtcatggataacacagggacttctagggatcctaatgctttggatggggctgaatgccagagaccggtcaatatcgatcacattcttagcagtgggaggagtcctagtgtttctagcgaccaatgtccatgcggacactggttgtgctctggacatgtcaagaaaggaactgaaatgtggaagtggcatctttgtgttcaatgatgttgagacttggagagacaattacaaatactacccagcaacaccaaggaatttggctaaagtgatcgtggaatcatacaggaaaggaatatgtggagtcagatcagtgagccggttggaacacaacatgtgggattcgatcaagcatgaactcaatgccattctggaagacaacggggaggatttgacagtcgtggtggaaccaattgtgggacgtctcaggtcgacacagcgaagattgacgtggacggaagaagagttggaatatggatggaagaaatgggggaaaaccctctttacgagtccaggcatgtcaaacagaacttttgtggtggatgggccaaaaacgaaagagtgtcccgatgacaagagagcttggaacagcttgtacgttgaggactttggatttggcatcacatccactagagtgtggatgggactgcgaaaggtgaacaccacggactgtgatacggcagtgatgggcacagcggtgaaaggagacgttgctgtgcacagtgacctgagctactggattgagagccgcaacaacaagacctggaaattagaacgagcagtgctaggagaagttaaatcgtgcacatggcctgagacacacactctgtggagtgaaagtgttatggagagtgacttaatcataccggttaccattgcgggaccacgtagtagacacaacatgagacctggatacaaagtgcagaattctggaccttgggatgagaaggaaatcaccatagattttgactactgcccaggaacaacagtgaaagtgacttcgacctgccatgacagggcagcatcagctcgaaccaccactgccagcgggaagctcattcaagactggtgttgcaggtcatgcacactcccaccattgagatacatgacaaaaagtggatgctggtatgccatggaaatccggccgacaacacacggtgaggacacccttatcaagtctaaggtgagcgcattcagaggcgatggcatggaaccatttcaactgggggttctcttgatgtttgtggccacacaggaagtcttgcggaagagatggacagcaggcatggcattaccagcaatgctcatgtttttatgtgctttgatctttggtgggataacatacatggatctggttaggtacgtcatactagtggctgcagcttttgcggaaagcaacagtggaggtgacatcgtgcacttagcgctaatcgctgctttcaaaattcagccaggattactagttgcatactcactgaaaaggaaatggagcaaccaggagagtgttttggttggaattgccctttcaatgttgaccttggccatgcaagattgggacatgacaatcccgagcctgcttaactcgggagcggccgcttggttgctgctgagagctgtgagtgagggaacagtaagtgccgtctgcattccagtgctgggcatgctggctcctggacttcgcatcgcgggaattgacgtggttcgcataggattgctgatcatagggattatgtcgctgatgagggaacgcaacaatgcagcagcaaaaaagaaaggaggattgttgataggactggccctagcagaatctgggttgatcagccctcttgtttatgccggactaaccttggcactaaaaccaaacatgaggagaggatggccggtgagtgaagcactgacagccgttggattgacgttcgcactggctggtggcatcgcacattttgatgaaggaaatatggccattccgttagcagtgggcggcataatgttggttgtggcagttgtgacagggttcacaacagatctatggctggaaaaagctggagaaatgacatggtctgaggaggcccaaataacgggtagctcccaacgatatgatgtggaaattgatagtgatggcaacatgcgacttttgaatgatcctggaatacccttctcagtgtgggcgcttcgaacaggattgatacttttatccgcttacaacccttatctccttccagtgacgttgggagcttattggctcacagtcaaggctccgaaacgtagcggagcgatttgggatgttccagcaccaaaggaaagaaggaaagcagaaattagcacgggggtgtttagaatcatggccagaggaatttttggaaaataccaagctggagtaggcgtgatgtacgagggagtatttcacacaatgtggcatgtcacgaacggtgccacgattaacgtgggtgacgggtgcctggtcccctactgggctagtgtcagggaagacctcatatcctatggagggccatggaagctgggaaaaaagtggaatggagttgatgaagtgcaggtcgtggtggtccagccaggaaagccagccacaaatgtgcaaactaaacctgggatatttcgaacacatgcaggggaagttggagccgtcacattggattaccccacaggaacatctggttcaccaatcattgataaagaaggcaacataattggcttgtatgggaatggcatcctcgtcggagcgggaaactttgtgagtatgatatcacaaggaaaccgtatggaagaagagattccacaggtgtttaatgatgatatgctacgcaagcgacaactcacggtgcttgatttacatccaggatcagggaaaacccgcaaagtgctcccacagattgttaaagctgccattgaaaaaaggttgagaactgcaatcttggcacccacacgtgtcgtggcggctgagatagctgaggcgttgaaggaatacccaatcaggtatttgacccctgccgtcaagagagaacacactggcactgaaataattgacgtgatgtgccatgccactttgacagcacggttgttaacaccacaaagggtgcctaactacaacttattcgttatggatgaagcacatttcactgacccagccagcattgcggctcgtgggtacatttccacaaaagttgacctaggagaagcggcagccatattcatgactgcgacaccaccaggaacgagagatgcctttcctgattcaaattcacctatcatggatgtggaggaacaaataccagatcgagcatggaactcagggtatgactggattacggactatactgggaaaacggtgtggtttgttccaagcgtgaaaatggggaatgaaattgctatgtgtctgacaaaagcggggaagaaagtcattcaattgaacaggaagagttttgacaacgaatatccaaagtgtaagacaggagactgggactttgttgtgacaacagacatatcagagatgggagccaattttggagccagtagagtgatagacagccgcaagtgcataaaaccagttattattgaagacggggaaggcagtgttcaattaaatgggccagttcccatcacagcggctagtgcagcacaaaggaggggaagagtgggcagaaatccagtgcaagttggggatgaataccactttgctggaccgaccagtgaggatgatcacgatttcgcccattggaaggaagcgaagatcttgctagacaacatcaacctaccaaacggactggtggcgcaattgtatgagcctgaacgagagaaggtcttttccattgatggggagtacaggctgagaactgagcaacggaaaaactttgtagagttcttgagaacgggagacctgccagtttggatatcgcacaaactggctgacgctggaatagcttacaacgaccgacgatggtgctttgatggacccaccgtgaacacagtgctagaagacaacaatcctgttgagctctggacgaagactggagagaagaagatcctgaggcctcgttggcgagacggaaggctttgggctgaccatcaagcgctaaaatcattcaaagagtttgcttgtggaaaaaggtcggccattggggtttttgaagtagttaaaatgcttcccgaacattttgcgcataggatgggagaatccatggacaacatttacatgctgagcaccgcagagcgtggaagcagggcgcatagggaagcattggaggaactccccgaaactctagaaacaatcctactaatcacaatgatggctttagcatcatgtggagtctttctattctttgtgcagaggagggggttgggaaaaaccggtctaggtgcaatgatccttatgacagctacagtgttgttgtggattgcagaagtacagccccagaagatagcagggatcttgcttgtgtcacttctcttaatgatagtgttaatcccagaaccagagcgacaacgctcacaaacagacagccacctcgcagtcttcatgatagttgtcctactgattgttggggctgtggcttccaacgaaatgggttggctagagcagacaaaaagggatatatccggtttgtttgggagaacccaggagcagagaactgaaaagtgggattttccttggccagatttgagacctgccacagcctgggcagcatatgctggagcgacaacgctgctcactccactattaaagcatctaatagtcactgagtacgtgaatttctcactcatggctgtgacagcacaagctggagctttgtttggattaggaaaagggatgccctttgtgtccatggacctgtcagtgcctcttcttttactcggatgttggggacagttcaccatgaccaccacactcacgacaatcgtgttgttgattgtgcactatgcattcctcgtgccaggatggcaagctgaagcaatgcgtgcagcgcaaaggaggacagctgctggagtgatgaagaatccagtggtggatggaatagtcgccacagacatacctgatctagacgccagtactccgattacagagaagaaattcggccaagttattctaatagttgtgggagtctgtgcagttttcctaaaaccagggaccatgtcgctaacagagtttggaatgctgacatctgcagccgcagtcacactgatagaaggagcagcaggacgtatttggaatgccacaacagctgtggccatgtgccatctcttgcggaaaaattggctggccggagcctctctggcttggaccatatccaggaacctgcaaagtggagcgttgcgacgaggtggaggaagaggtcgcatgttgggtgagatgtggaaggcacaactaaaccagttgacgagacaggagttcatggagtacagaagggacggtataatagaggttgacagatctgcggctagaaaagcacggagagaaggtaatgtgactgggggacatcccgtctcacgtggaaccgcaaaactacggtggatggtcgagagaggttttgtgaagccacacggaaaggttatagacttgggctgcggcagaggaggctggagttattactgcgccaccttaaaattagttcaagaggtgaagggttacacaaaagggggaccaggtcatgaagaacctgtgatgatgcagagctacggctggaatttggtctcgctgaagagcggtgttgatgtgttttacagaccatctgaacaatcagacacactattatgcgacataggggaagcctcaccagtgccagaaattgaagaagcacggaccgtgaaagtactgcaaatggtggaagaatggctctcacgtggagttgaagatttctgtgtaaaaattctttgtccatacatgcccaaggtgcttaaagagctggaaaagatgcaattaagatggggaggtggcctgatccgggttccactttcgaggaattccaaccatgagatgtactgggtgagtggagccagtggaaacatcacaaattccgtcaacacagtaagtcaaatgctgatcaacagaatgaacagaaccaacaggaatgggcccaagtatgaggaagatgtgcatctaggatctggaacaagagccgtggtcacaaaaaagataaaaacaaactggaagatggtagaagacagagtgaaaaaactggcagatgagttttccaccacatggcactatgactcggagcacccttacaaaacttggaactatcatggaagttatgaagtcaaagcgaccggatcagctagctccatggtgaatggggtggtccgggtgctctcgaaaccatgggacacactgcagagtgtggtgaacatggccatgactgacacaacaccatttggccagcaacgggtgttcaaggaaaaggttgacacaaaagcaccagaaccccctaaaggaacagcagaagttatgagagtcacagcaaaatggatgtggaaatttgttggtagaagcaagacgccaagggtgtgcacgaaagaggaatttatagcaaaagtcaacagtcatgcagcgcttggggccatttttaaggaacaaaacagatgggcatcagcccgagaagcagtggaagaccccgctttctgggaaatggtggacagagaaagagaagcccatctacaaggacgatgtgaaatgtgtacatacaacatgatgggaaaacgcgagaagaagatgggtgaatttggaaaagcaaaaggtagccgggccatctggtacatgtggttaggttcaagatatcttgaatttgaagctctggggttcttaaacgaagaccattggatgagcagagagaacacacttggaggagtcgagggcttaggcctgcagaagcttggatacgtgctgagagacatagcaaagaatccaggaggcctcatgtatgcagacgacacggctggctgggacacaaggatcacgaaagcagatcttgaaaatgagtcaatcgtgttagaaatgatgactccggaacaccgagcgctggctgaaccactgattaagtttgcatacatgaacaaagtcgtgaaagtaatgagaccaggagctgatggcataacagtgatggacgtcatctcacgggaagaccagagagggagtggacaggtggtaacatatgcactcaacacgttcaccaacctttgtgtgcagctcatacgatgcatggaaggagagggtttgctgaagccagaggaggtggagaaacttgagagagggaaacaaaggaaaatccaagactggttggacaagaatggaactgaacgcctagcgtccatggcagtgagtggagacgattgcgtggtaaaaccaaaagatgacagattcgcaaccgctctccattttctcaatagcatgtcaaaaatcaggaaggatattccagagtggaaacaatcaacaggatggagaaactggcaggatgttccattctgctcacatcatttccacgaactcaccatgaaggatggacgccaaattgtggtaccttgccgccatcaagatgaactgatagggagggccaggctatcacctggctctggatggtcactgacggaaacagcatgcttgagcaaggcttatgggcagatgtggctgttgatgtacttccacagacgggacctccgtctgatggctaacgcaatctgctcagccgtgccagtgagttgggtgcccaccgggagaacaacctggtccatccatggaaaaggggaatggatgacaactgaagacatgctaagagtgtggaatcgcgtgtggattgaggaaaatgagcacatggaggataagaccccagtcagcagttggaatgacgtgccataccttggaaaaagggaagacagttggtgtgggagcttaattgggcatagagctagatccacctgggcggagaacatatacactcccatcatgcagataagagggctgataggcccagaaagatatgtggactatatgcccactctaaacagatttaaggcagtggaatcgtggtcagagggagtgctgtag

SEQ ID NO: 13034 - DNA, 288 bp, unidentified
  source 1..288: mol_type = other DNA
  misc_feature 1..288: note = Synthetic
acggggataccgacagcctttttgtcacggaagcgggacacagactcatggagacgcaagggagacgacgcccgcttcagcaccagcaggatgagcctgaagcgcaccctcgcaagcgcccagcccggggctcatcccttcaccgtcaccgagaccaccctcacccgaacgctgagaccctggaaggacagaaccctcgcggccctggacgcccaccggctggtgccctacagcgaaagtcggcccaacccccgaaaccaagaagtctgctggatcgagattccatag

SEQ ID NO: 13035 - DNA, 1365 bp, unidentified
  source 1..1365: mol_type = other DNA
  misc_feature 1..1365: note = Synthetic
acggaagcgggacacagactcatggagacgcaagggagacgacgcccgcttcagcaccagcaggatgagcctgaagcgcaccctcgcaagcgcccagcccggggctcatcccttcaccgtcaccgagaccaccctcacccgaacgctgagaccctggaaggacagaaccctcgcggccctggacgcccaccggctggtgccctacagcgaaagtcggcccaacccccgaaaccaagaagtctgctggatcgagattccatagagcacgtcaccgagctctgggaccgactgtacttgcttcgtcagtcgcttgaaaagatgcccatggccgacggcctgaaaccgctgaaacacttcaacagcctggaagaactcttatccctgggtggggagaggctcttgcaaaacttagtgagtgaaaataaacatgtcagaagcatgatgaatgaggtagctcccctcctgcgccccgacggcagctgttcctctctgaactaccagctgcaacccgtcatcggggtcatctacggtcccaccggttgcggcaaatcccagctgttgcgtaacttgctttccacccagctcattaaccccccgccagaaaccgtgttttttatcgccccccaggtggacatgatccccccctcggaaattaaggcctgggagatgcagatctgtgagggcaactacgctccaggcccagatggaactatcatcccccagtcgggcaccctcctaccccgctttgtaaagatggcctatgatgagctcactctagagcaaaactatgatgtttccaacccccaaaacgtgtttgctaaagcggccgccaggggtcccattgccattattatggatgagtgcatggaaaacctaggggggcacaagggggtatctaaattcttccacgccttcccctccaaactgcatgacaagttccccaaatgcactggctataccgtgctggtggtccttcataacatgaacccccgcagagacctgggtggtaacatagctaacctcaaaatccaagccaagatgcatatcatctccccccgcatgcatccctcccagctcaaccgctttgtaaacacctacactaagggtctacccttggccattagcctgctcctgaaggacatattccagttccacgctcaaaaaccctgctacgactgggtgatttacaataccaccccggaacatgacgctcttcagtggtcctatctccaccccaaagatggcctcatgcccatgtacttgaacatccaagcccatctgtaccgtgttttggaaaacatacacaaagtccttaacgaccgagacaggtggacccgagcctaccgagccaaaaaaaacaaataa

SEQ ID NO: 13036 - DNA, 258 bp, unidentified
  source 1..258: mol_type = other DNA
  misc_feature 1..258: note = Synthetic
gtggacaccggctcatggaaaccagagggcgaagaccggcagcgcttcagcaccagcaggaccagcctcaagcgcaccctggccagcgcgcagcccggagcgcaccccttcaccgtgacccagactacgctgacgaggaccctgcgcccgtggaaagacatgaccctggcccgtctggacgagcaccgactactgccgtacagcgaaagccgccccaacccgcgaaacgaggagatatgctggatcgagatgccgtag

SEQ ID NO: 13037 - DNA, 2364 bp, unidentified
  source 1..2364: mol_type = other DNA
  misc_feature 1..2364: note = Synthetic
atggcggcgcccatatgcgataactctcacgtgttcctcctcaagcgcctgggcgtgccgtcttcctgccggcgctcggaggacccgcgcttcgtggagatcctgactcccttcgagctctcgaactacatcgagcggcacccgggatgctgcctcttcgagacgctgcgcgacgaggaggactgctccgtcgtgcgcgtcttcgcggacgtggacatggacagcgtgctagaggaggaggacttcgtcgcggcgctggaggacctcattgtggagctcgcggccttcttcgaccgcttcgcgagcggctcctgcggcactgtgcccggcgaggtcaagcgcgccatgctcgcgaacttctcggtcacgcgatccacggccgagcacaagaccagcttccacctgatcttcacggagacgtacaccacgctggacactctggtggcggcgaagcgcccgctgctggacctgtgccggcgctcggacaacgtgctgctgcgcgcgctggacacggccgtgtaccgccacggcgcgacgctgcgcgtggtgggcacgcgcaagacgccggagtcgagcgcggtccaccgcatgcagtcgcccgacgacgacatcaaggactacctgttcacgttcgtggagctctcggacgcgagcgtgtacttcgagctcgcggagcgcgagcagcacacgctgagcaccgtctgctgggagacctcctacatccccttcggcgacgcgatgcggcgcgtgtgccaggcggtggtcaacgacatcgtgaacctccgcgacatcaccgaggacaacttcctcgacacgccgctggtcatcgactacgcgacgcgctgcgcgctgtgcaagaagcccaagcacaagcacgcgcaccacatcaccatgggcaacggctgcctgcgcctggtcaagggcgggaacgcacacagctgcaaggtcaagatcatccagctcgagggcaaccggctcttcacggccgcgcagatcatcatcgcgtccgaggtcgtgaagctcaccgagcgcaacgactacatcgtgtggctgaacaactcctggcgcttcagcgcggaggagtcgctcatcaccaagctcatcctggacgtgcggcactcgctgcccgcggactacgccaacgacatgctgtgcccgcgcaagcgcaaggtcgtggagaccaacatccgcgacatgctcgtggacatctccgagacggacacgcagtacgacaagctgcccttcacgaacggcgtgctggacctggccacgggcgagttcctcaccggcgaccgcgcgaaggcctgcgtgtgcacggtctccaccgggtacgccttctcgcgcgaggagttcgcggccgcggcggactcggaggccatgcgccggctggtgggcgtcatcaacgacatccagccggacacgcccgagaacgccgagaaccgcgcgctgtacgagcgcgccatgtccagcgcgctctgcggcgccacgaagacggtcatcgtcttcttctacggcgacaccatgaccggcaagtccacgagcaagcgtctgctcatgtccgcgctcggcggactcttcatcgagaccgggcagaccgtgctcacggacgtgctcgacaagggcccgaaccccttcgtggccaacatgcacctgcggcgcgcggtcttctgcagcgagctcccggacttcgcctgcaacaacgcgcgcaagctgcgctccgacaacttcaagaagctgaccgagccctgcatcgtgggccggccctgcttctctaacaagatccacaaccgcaaccacgctaccttcatcatcgacaccaactaccgcccggtcttcgaccgcgtggacaacgcgctcatgcgccgcgtggcgctggtgcgcttccgcacgcacttctcctcggcggccactcgcgcggccgccgcgcacaacgtcgagtacagcgcggtcaaggagatggacgagagtctggacaccaagatccagcgcaactacttccgctacgccttcctgcgcctgctcgtgcagtggttcggcaagtaccacgtcccgcaggtctcgctggcgcccacgcccgacgcggtccccgacttcgccttccactgccgcgtggccgagctggtggtggccagcaacgacacgcaccgccgcgcgatggagtcgctgtccaagctggggtacgtgctcgtgggcggcaacgtggccatgcccgcggacgccttccggcagcggctggccgcgcacttcaacgtgcgcgtgcacggcggcgacatagacgccttcatgttcaagcacaagaaggtcgtcaacgtaacggaggagtacgtggagtacgtattcatcgaagatgtcgaaaataaatag

SEQ ID NO: 13038 - DNA, 372 bp, unidentified
  source 1..372: mol_type = other DNA
  misc_feature 1..372: note = Synthetic
atggttagacaagtagctgaaagggaaggtacccgtgtacattttggccatacttatagtatagatgatgctgacagtatagaagaagttacacaaagaatggacttaagaaatcaacaaagtgtacattcaggagagtttatagaaaaaactattgccccaggaggtgctaatcaaagaactgctcctcaatggatgttgcctttacttctaggcctgtacgggactgtaacacctgctcttgaagcatatgaagatggccccaaccaaaagaaaaggagagtgtccaggggcagctcccaaaaagccaaaggaacccgtgcaagtgccaaaactactaataaaaggaggagtagaagttctagaagttaa

SEQ ID NO: 13039 - DNA, 63 bp, unidentified; identical to SEQ ID NO: 4740
  source 1..63: mol_type = other DNA
  misc_feature 1..63: note = Synthetic

SEQ ID NO: 13040 - DNA, 447 bp, unidentified
  source 1..447: mol_type = other DNA
  misc_feature 1..447: note = Synthetic
atgtgtccaccagttcgccagcaccccgcccaggcaccaccagccaagcgtcaggccctggaaacagttccacatccacaaaaccgggggaggttaatgtcaccaaaggcacgcccccccaaaatgcaacgtcgccccaggcccccagtggccaaaagacggcggttcccacggtcacctcaacaggtggaaaggccaattctaccaccggtggaaagcacaccacaggacatggagcccggacaagtacagagcccaccacagattacggcggtgattcaactacgccaagaccgagatacaatgcgaccacctatctacctcccagcacttctagcaaactgcggccccgctggacttttacgagcccaccggttaccacagcccaagccaccgtgccagtcccgccaacgtcccagcccagattctcaaacctctccatgctag

SEQ ID NO: 13041 - DNA, 447 bp, unidentified
  misc_feature 1..447: note = Synthetic
  source 1..447: mol_type = other DNA
atgtgtccaccagttcgccagcgccccgcccaggcaccaccagccaagcgtcaggccctggaaacagttccacatccacaaaaccgggggaggttaatgtcaccaaaggcacgccccccaaaaatgcaacgtcgccccaggcccccagtggccaaaagacggcggttcccacggtcacctcaacaggtggaaaggccaattctaccaccggtggaaagcacaccacaggacatggagcccggacaagtacagagcccaccacagattacggcgatgattcaactacgccaagaccgagatacaatgcgaccacctatctacctcccagcacttctagcaaactgcggccccgctggacttttacgagcccaccggttaccacagcccaagccaccgtgcctgtcccgccaacgtcccagcccagattctcaaacctctccatgctag

SEQ ID NO: 13042 - DNA, 24 bp, unidentified
  misc_feature 1..24: note = Synthetic
  source 1..24: mol_type = other DNA
atggcgatcggcgccgctgattga

SEQ ID NO: 13043 - DNA, 66 bp, unidentified; identical to SEQ ID NO: 4747
  misc_feature 1..66: note = Synthetic
  source 1..66: mol_type = other DNA

SEQ ID NO: 13044 - DNA, 15 bp, unidentified
  misc_feature 1..15: note = Synthetic
  source 1..15: mol_type = other DNA
attctggttcgctag

SEQ ID NO: 13045 - DNA, 39 bp, unidentified; identical to SEQ ID NO: 4750
  misc_feature 1..39: note = Synthetic
  source 1..39: mol_type = other DNA

SEQ ID NO: 13046 - DNA, 2073 bp, unidentified
  source 1..2073: mol_type = other DNA
  misc_feature 1..2073: note = Synthetic
atacatcgccgcgcgctgcatactaaggggaatacaagaaaaccaacgctcggtgccatggccttgagcgtcaacgactgcgcacgcctcaccggccagagcgtcccgaccatggagcactttttgccgctgcgcaacatctggaaccgcgtccgcgactttccgcgcgcctccaccaccgccgccggcatcacctggatgtccaggtacatctacggatatcatcgccttatgttggaagacctcgcccccggagccccggccaccctacgctggcccctctaccgccagccgccgccgcactttttggtgggatatcagtacctggtgcggacttgcaacgactacgtctttgactcaagggcttactcgcgtctcaggtacaccgagctctcgcagccgggtcaccagaccgttaactggtccgttatggccaactgcacttacaccatcaacacgggcgcataccaccgctttgtggacatggatgacttccagtctaccctcacgcaggtgcagcaggccatattagccgagcgcgttgtcgccgacctggccctgcttcagccgatgaggggcttcggggtcacacgcatgggaggaagagggcgccacctacggccaaactccgccgccgccgtagcgatagatgcaagagatgcaggacaagaggaaggagaagaagaagtgccggtagaaaggctcatgcaagactactacaaagacctgcgccgatgtcaaaacgaagcctggggcatggccgaccgcctgcgcattcagcaggccggacccaaggacatggtgcttctgtcgaccatccgccgtctcaagaccgcctactttaattacatcatcagcagcacctccgccagaaacaaccccgaccgccacccgctgccgcccgccacggtgctcagcctaccttgcgactgtgactggttagacgcctttctcgagaggttttccgatccggtcgatgcggactcgctcaggtccctcggtggcggagtacctacacaacaattgttgagatgcatcgttagcgccgtatccctgccgcacggcagccccccgccaacccataaccgggacatgacgggcggcgtcttccaactgcgcccccgcgagaacggccgcgccgtcaccgagaccatgcgccgtcgccgcggggagatgatcgagcgctttgtcgaccgcctcccggtgcgccgtcgtcgccgccgtgtcccccctcccccaccgccgccagaagaagaagaagaaggggaggcccttatggaagaggagattgaagaagaagaggcccctgtagcctttgagcgcgaggtgcgcgacactgtcgccgagctcatccgtcttctggaggaggagttaaccgtgtcggcgcgcaactcccagtttttcaacttcgccgtggacttctacgaggccatggagcgccttgaggccttgggggatatcaacgaatccacgttgcgacgctgggttatgtacttcttcgtggcagaacacaccgccaccaccctcaactacctctttcagcgcctgcgaaactacgccgtcttcgcccggcacgtggagctcaatctcgcgcaggtggtcatgcgcgcccgcgatgccgaagggggcgtggtctacagccgcgtctggaacgagggaggcctcaacgccttctcgcagctcatggcccgcatctccaacgacctcgccgccaccgtggagcgagccggacgcggagatctccaggaggaagagatcgagcagttcatggccgaaatcgcctatcaagacaactcaggagacgtgcaggagattttgcgccaggccgccgtcaacgacaccgaaattgattctgtcgaactctctttcaggttcaagctcaccgggcccgtcgtcttcacgcagaggcgccagattcaggagatcaaccgccgcgtcgtcgcgttcgccagcaacctccgcgcgcagcaccagctcctgcccgcgcgcggcgccgacgtgcccctgccccctctcccggcgggtcccgagccccccctacctccgggggcccgcccgcgtcaccgcttttag

SEQ ID NO: 13047 - DNA, 93 bp, unidentified; identical to SEQ ID NO: 4756
  misc_feature 1..93: note = Synthetic
  source 1..93: mol_type = other DNA

SEQ ID NO: 13048 - DNA, 1335 bp, unidentified
  misc_feature 1..1335: note = Synthetic
  source 1..1335: mol_type = other DNA
atggaaatagtaaatccgggtccagagagtccgtctgccgagctcatggcctcgatcgacatgcgcgaggtactggcgcgctacgttgaggacacggacaccgcggagcaactactgcgctgggccaccgacaaggcagctgtgtactacctgcgcaacattagcaacagcaaggccaacatcgaggagaccaagttcgagacagccaacaacatcggcatcgagtactccaaggaccacaagaacaagctttcctatcgcaacaagccgctcattcccaccaacctggaatacgagtatctctgcgacctgatcaagtccaccagcggcggcgacaaagaaactctgcggtacctactcttcggcatcaagtgcgtgcgcgcgcgcgttgagtacgacatcgacaagctgcccgactacaactacgacaagtacttccacgtgctgaacgagcggagcagcgcgccgtgccccgtgtgccggggcctcaacaccacgcccatgatcttgcaaacgcgcgcatccgacgaggagccgaccgtgcgctacgtgtgcaaggactgcaacaagcacttttcgcccccgaagtttcgctctccgcgaggagggcacgcggagcccggcccgccagaaggcgtgtcaagaggtacgcagggctctcacgcgcctgctggggagggcgagcccgaacatgttgcgcgtcgacctcgcacccgtgcaaaggaacgcgcttgcaagtgcgaggtcgagagcgagaaagctgagacaaaggccgtggcggaggccaaagaagaaactcccgtcagcgaagaggccgcgcagtgcttggagaatgccgcgagcgcggaaaacgtcgctcattccgacgacgaagagttcgcggacgacccaggacccgtacccgttcccgaagtgctctccgcggacgacgcagccgctgccgctgccgtcgcggacgcgctcgacaatgccaacgacgtcaccacggggaatgcagacgacgaagatgcttccgagaaggatgcggatgaagacgcggagaaggacaccgacggggacgcggaagacaacgaccagcacgagggcattgccgagaacgcgagcgtcactcgggacgcagacagaaattccgacaagcccgtgacgaggggctctgcctccgcacagcctggtgctaagggccgcagtcgcgccaaggcttccacgcgcgcgcacgcaaagagggaatgtctcgacagcgtgcaaagaagccgccctggagtacacggggctgctcctttgtacgcgaccgagccactcctaggggctgctccccgcagtggctcgaaagcgtaa

SEQ ID NO: 13049 - DNA, 231 bp, unidentified
  misc_feature 1..231: note = Synthetic
  source 1..231: mol_type = other DNA
atgtggcatttattgctaaacatggggcccaactcaatttcgataccgttagagtcttcttcctcaatcagaagaaggccaagatggtactcagtaagacggcacaaccaagtgttgatcttacatttggtggcatcaagtttacactggttaataaccattttccccaatacacagcaaatcctgtgccagacactgccctcactctccatcgtctctcaggatatctag

SEQ ID NO: 13050 - DNA, 231 bp, unidentified; identical to SEQ ID NO: 13049
  source 1..231: mol_type = other DNA
  misc_feature 1..231: note = Synthetic

SEQ ID NO: 13051 - DNA, 744 bp, unidentified
  misc_feature 1..744: note = Synthetic
  source 1..744: mol_type = other DNA
atgatcctgtggtccccgtccacctgttccttcttctggcactggtgtctgatcgcagtaagtgtactctcgagccgctccaaggagtcgctccggttgtcgtggtccagcgacgagtcgtctgcgtcctcgtcgtctcgtatctgtccgttgtcaaatagcaagtccgttcgtctgccccagtaccctcgcgggtttggggacgtgtccggctaccgtgtctccagttccgtgtccgaatgttacgtccagcacggggtactcgtggccgcctggcttgtgcgtggcaacttctccgatacggccccgagagcctacggcacctggggtaacgagcggagcgcgacccatttcaaggtcggcgcaccccagctggaaaatgacggggctctacgttacgaaactgagctcccacaggtggacgcacgactctcttacgtgatgttaaccgtttacccctgcagtgcctgtaaccggagcgtgctccattgccggccggcgtccaggctgccctggttgccgctgcgggtaacgccctcagacttggaacggctgtttgcggagagacgctacctgacattcctctatgtggtactggtgcagtttgtgaaacacgtagccttgttcagcttcggtgtccaggtagcctgctgtgtgtacctgaggtggatacgtccctgggtccgaggtcggcaccgcgccaccggaaggacttcacgggaagaagaggctaaagacgattga

SEQ ID NO: 13052 - DNA, 285 bp, unidentified
  source 1..285: mol_type = other DNA
  misc_feature 1..285: note = Synthetic
atgcggccggtggtcctgcggggggtgacggtcaggcagctcctgtatttaactttgcggacagaggccagagccgtttgctccatctgtcagcaacgccaagctccagaggacgcccgcgacgagcctcacctgttctcctcctgtttagaggtagaattgccacctggtgagcggtgtgcgggctgccgtctctatcagacgcgttatggcacgccggctgcccaagcccaccctccaggggaggctggaggcggattttccagacagtcccctgcttcctaa

SEQ ID NO: 13053 - DNA, 285 bp, unidentified; identical to SEQ ID NO: 13052
  source 1..285: mol_type = other DNA
  misc_feature 1..285: note = Synthetic

SEQ ID NO: 13054 - DNA, 285 bp, unidentified; identical to SEQ ID NO: 13052
  misc_feature 1..285: note = Synthetic
  source 1..285: mol_type = other DNA

SEQ ID NO: 13055 - DNA, 18 bp, unidentified
  misc_feature 1..18: note = Synthetic
  source 1..18: mol_type = other DNA
acgacgattactacgtaa

SEQ ID NO: 13056 - DNA, 18 bp, unidentified
  misc_feature 1..18: note = Synthetic
  source 1..18: mol_type = other DNA
acgacgattactacgtaa

SEQ ID NO: 13057 - DNA, 138 bp, unidentified; identical to SEQ ID NO: 4770
  misc_feature 1..138: note = Synthetic
  source 1..138: mol_type = other DNA

SEQ ID NO: 13058 - DNA, 138 bp, unidentified; identical to SEQ ID NO: 4770
  misc_feature 1..138: note = Synthetic
  source 1..138: mol_type = other DNA

SEQ ID NO: 13059 - DNA, 702 bp, unidentified
  misc_feature 1..702: note = Synthetic
  source 1..702: mol_type = other DNA
atggcaaaccaattcatttttgaggatgtacctcaacggaacttatctacatttagtccggaggcagggtatgtggcatttattggtcggtatgggcaacaacttaacttcagtgttgttagagtcttcttcctcaaccagaagaaggccaaaatggtcttacataagacggcacaaccaaatgttgatcttacttttggaggggtcaaatttacactggttaataacaattttccccaatacacagctaatccggtgccagacaatgccctcaccctccacaggctctctggatatctagctagatggacagcagagcaagttaagaacaatcaagtgaaacttgctgaagctactgctgcaattgttatgcctctggctgaagtcaaaggatgcacctggaatgatggctataccatgtatcttggatttgcaccaggagcggaaatgtttctagagacatttgaatttttccctcttgtcatcgatatgcatagagttttaaaagatggcatggatgtaaactttatgcggaaagctcttcgccagaggtatgggctgcttactgcagaacaatggatgactcaaaagattgttgaagtcaaagcagcattcgatgcagttgggcaaatagcttgggctaaatctggcttctcccctgctgctagagccttcctgcagcagtttggtatcactgtgtaa

SEQ ID NO: 13060 - DNA, 501 bp, unidentified
  misc_feature 1..501: note = Synthetic
  source 1..501: mol_type = other DNA
atggcaaaccaattcatttttgaggatgtacctcaacggaacttatctacatttagtccggaggcagggtatgtggcatttattggtcggtatgggcaacaacttaacttcagtgttgttagagtcttcttcctcaaccagaagaaggccaaaatggtcttacataagacggcacaaccaaatgttgatcttacttttggaggggtcaaatttacactggttaataacaattttccccaatacacagctaatccggtgccagacaatgccctcaccctccacaggctctctggatatctagctagatggacagcagagcaagttaagaacaatcaagtgaaacttgctgaagctactgctgcaattgttatgcctctggctgaagtcaaaggatgcacctggaatgatggctataccatgtatcttggatttgcaccaggagcggaaatgtttctagagacatttgaatttttccctcttgtcatcgatatgcatagagtt

SEQ ID NO: 13061 - DNA, 276 bp, unidentified
  misc_feature 1..276: note = Synthetic
  source 1..276: mol_type = other DNA
atgtacctcaacggaacttatctacatttagtccggaggcagggtatgtggcatttattggtcggtatgggcaacaacttaacttcagtgttgttagagtcttcttcctcaaccagaagaaggccaaaatggtcttacataagacggcacaaccaaatgttgatcttacttttggaggggtcaaatttacactggttaataacaattttccccaatacacagctaatccggtgccagacaatgccctcaccctccacaggctctctggatatctag

SEQ ID NO: 13062 - DNA, 276 bp, unidentified; identical to SEQ ID NO: 13061
  misc_feature 1..276: note = Synthetic
  source 1..276: mol_type = other DNA

SEQ ID NO: 13063 - DNA, 1239 bp, unidentified
  source 1..1239: mol_type = other DNA
  misc_feature 1..1239: note = Synthetic
atggacaccatcatccacaacaccacgaaccgcagtaccgatactccgcatgtcaacatcacctgtaacataacggagccgctatccgccatccgtaccacagaagccgtgatcaacacgttcatcattttcgtaggcggcccgctcaatgccatagtgttgatcacgcagctgctcacgaatcgcgtattgggctattcaacccccaccatctacatgaccaacctctattccaccaacttcctcacgctcaccgtactgccatttatcgtgctgagcaaccagtggctactacccgctagcgtggcttcgtgcaaattcttgtcggtgatttactactcgagctgcacagtaggctttgccaccgtagccctgatcgccgccgaccgataccgcgttcttcataagcgtacctacgcgcggcagtcgtaccgctccacctatataattttgctattgacctggtttgccgggctgatcttttccatgcccgcggctgtctacactacagtagtgatacataatggtacaaatggacaaagtagcaatggacacgctacctgcgtattgtacttcatagccgacgaggtgtacacggtactactctcgtggaaagtgctgctgacgctagtgtggggcgccgcgcccgttatcatgatgacgtggttttacgccttcttctactcaaccgtacagcgtgcgtctcaaaaacaaaggagtcgcactttaaccttcgtcagcgtgttactcatctccttcgtggcgctacagacgccttacgtgtccatcatgattttcaacagttacgccacggccgcatggcccatggactgcgaacacctgacactgcgacgcaccattggcacgctgtcacgcctggtaccccacctacactgcctcatcaatcccattctgtacgcgctgctgggtcatgactttctgcagcgcatgcggcagtgtttccgcggccagttgctggaccgccgcgctttcctgagatcgcagcagaatcagcgagctacagcggagacaaatctagcggctggcaacaattcacaatcagttgctacgtcattagacaccagtagcaaaaactgcaatcagcacgccaaacgcagcgtgtctttcaattttcccagcggtacgtggaaaggcggccagaaaaccgcgtccaacgacacatccacaaaaatcccccatcgactctcacaatcgcatcataacctcagcggggtatga

SEQ ID NO: 13064 - DNA, 84 bp, unidentified; identical to SEQ ID NO: 4779
  source 1..84: mol_type = other DNA
  misc_feature 1..84: note = Synthetic

SEQ ID NO: 13065 - DNA, 249 bp, unidentified
  source 1..249: mol_type = other DNA
  misc_feature 1..249: note = Synthetic
atgcaacctataccaatagtagcaatagtagcattagtagtagcaataataatagcaatagttgtgtggtccatagtaatcatagaatataggaaaatattaagacaaagaaaaatagacaggttaattgatagactaatagaaagagcagaagacagtggcaatgagagtgaaggagaaatatcagcacttgtggagatgggggtggagatggggcaccatgctccttgggatgttgatgatctgtag

SEQ ID NO: 13066 - DNA, 2760 bp, unidentified
  misc_feature 1..2760: note = Synthetic
  source 1..2760: mol_type = other DNA
atggccactccctcgatgatgccgcagtggtcttacatgcacatcgccggtcaggatgcctcggagtacctgagtcccggtctggtgcaattcgcccgcgccacggacacctacttcaccctgggaaacaagtttagaaaccccaccgtggctcccacccatgatgttaccaccgatcgctcgcagcgtctgacgctgcgttttgtgcccgtggatcgggaagatactacctactcctacaaggctcgctttacgctggctgtgggtgacaaccgcgtgttagacatggctagttcttactttgacattcgaggggtactggatcgtggtcccagttttaagccctattccggaaccgcctacaattctttggcaccaaaaggcgctcctaatgcttcacaatggtcagataacgctaagcttaatacctttgctcaggcgccgtatcttagcgacactatcaccgccgccgatggtattaaagttggaacagacaccgcccaggcaggcgcggcggtgtatgccaacaaaacttatcagccagagccgcaagtaggaccaagtgaatggaacaccagcattgaaaacgttaaagctggcgggagggcattaaagcaaaccactgcaatgcagccgtgctatggctcctacgctcgtccaaccaacgaacacggaggacaatccaaggatgacaacattgaacttaagttctttgattcagctaacaatgcagcaaacactgctcaagttgtgttctataccgaagacgtaaaccttgaaatgccagacacgcatcttgtgtttaagcctactgttaccaatggaacaattgcttctgagtcgctgttgggacagcaagcagcgccaaatagagcaaactacattgcattcagagataattttattggcctgatgtattacaacagtacaggcaacatgggtgtattggccgggcaagcttcccaacttaacgcagtagtagacctgcaagacagaaatacagagctgtcataccagttaatgctggatgctttgggagacagaacacggtacttttccttgtggaattccgcagtggacagttacgaccctgacgttcgcgttattgagaatcacggggtagaggatgaactaccaaattattgctttcctcttagcgcagtaggtgaaataaaaaattacaaaggcattaagccagataacggaggaggaggtggctggactgccgacaacactgtcagtgaagcaaaccacataggcattgggaatatagccgccatggaaattaatttgcaggctaatttgtggagaagcttcttgtactcaaatgtgggcttatacctaccagacgacttaaaatacactccaggaaacataaaactacctgataacaagaacacctacgagtacatgaacgggcgtgtgactgccccggggttggtggatacctatgtcaatatcggcgctcgctggtccccagatgtgatggataatgtaaacccttttaaccaccaccgaaacgcagggttgcgctacagatccatgttgctaggcaatgggagatttgttccttttcacattcaggtgccgcaaaaattttttgccatcagaaatttgttgctgttgcccggttcctacacttacgaatggaactttagaaaggatgtaaacatgattcttcagagcacactgggaaatgatcttcgggtggacggagccagcgttcgctttgacaacattgccctgtatgctaacttttttcccatggcacataacacagcttctactttagaagccatgttaagaaatgacaccaacgaccagtcttttaacgattatttgtgtgctgcaaacatgctgtatcccatcccagctaacgccaccagcgtgcccatttcaataccttcgcgaaattgggcggcatttagaggctggagctttactcgcctaaaaactaaagaaactccttccctgggttcagggtttgacccctactttgtatactctggaaccattccctatttagacggcaccttttacctaaaccacacttttaagaaggtgtcaatcatgtttgactcctccgtgagttggcctggaaatgaccgtttgctaaccccaaatgaatttgaaataaagcgttctgtggatggggagggatacaatgtggcccaatgcaatatgactaaggattggttcctaatacaaatgcttagtcattacaacattggataccaaggtttttacattccagagagctacaaggaccgcatgtattctttctttagaaactttcagcccatgagtaggcaagttgtggataccacagaatataagaactacaaaaaagtaaccgtagagtttcaacataacaactcaggattcgtgggatacctgggccccactatgcgggagggacaagcttaccccgccaactatccctaccctcttataggccaaacagctgtggaaagcatcacacagaaaaagtttctatgcgatcgtgttatgtggcgcatcccattttctagtaacttcatgtctatgggggcgctaacggatcttgggcaaaatatgctgtacgcaaactcagcccatgctctagacatgacatttgaggtggatccaatggatgagcctacccttctttatgttttatttgaagttttcgacgtggtacgcattcaccagccacaccgcggcgtcattgaagcggtctacctgcgcacgcccttctcggcgggtaacgctaccacctaa

SEQ ID NO: 13067 - DNA, 588 bp, unidentified; identical to SEQ ID NO: 10998
  misc_feature 1..588: note = Synthetic
  source 1..588: mol_type = other DNA

SEQ ID NO: 13068 - DNA, 2028 bp, unidentified
  misc_feature 1..2028: note = Synthetic
  source 1..2028: mol_type = other DNA
atggaaacgaaggccggtcctgactccgtttttctgtgctcgcgcctgaacctgggcgcgcactaccgcaaccagctgctgtcgctcgtggatcgcgcgcacctgcacgagccggcgccgtcaatactctgtagcatctgcgacacgctggcgaaggtacttcccgaggacgcgggcgtgtccgcgggcgcgcgccagcagcgcccggtgcggcgtgttccggcagcgccgcgcgcgcgcgtgagtccgcggcgagtcgcgggcgcgcgcggagaggacgcgtgcaagcccagcagcgaggccggagacgtacccatgattcccatcgacgaggtcgcgtccacgcaggactggcacctgcggctgcggcgcgacggcgacgcgatcgtgcgctacctagtggagaacaagtgcgacctggcgagttttacgatccaggacatgatcggcatcatgcgcaagctgaacatcgtgcgcagcgacaggcaggagctctttgagctgctggggcacgtgaaaggctcgctgtcgaactcgagcgtgtccgtgaagaccacgcacccgctggtgctcatctactcgcacgcggacccccacatcggcgagcagctccgcgcgctggagcgcgtgtactcgccgtcgcgctaccagacgctgctggccactacgcgcttccagtcggggcatttcgtggacatgtcgagctcgcaggacctggtcttcaagtaccgcgagaacgactcgacctgcttcgtgcaccccatcctggtggcgctcttcggcgtgaagctgcccgcgttggagaatgccttcgtgtacggcgacagctacagcctgctccggcaactgtacgagctcaagaaggtgcgtcccgacaactacatgctgctgattaacaggctcacggaggacgcgcccatcctattcaccggcgtgaacgacgtggtctccaccgaggtgcagcgcgcgaacgtgcacaccatgatccgcaagctcatcctgaacattcggctgggcattttctactgctgcgacagcgaggctgtggacccctacctgatgaagatcatccacacgagcagctcgcagatgatggcggacgaggagcagctgctggcgtccgtgctggccatcgtgggcttccggcccgcgctggtgtcggtggtgcgcgcgggcgcggcgcctggcttcgacgtgaacctgcagtccgtgccctacatcgtggtcaaccccgcgcgcatgatcaccaccatggacaaccccgtggccatcaactccagctcggtgtactcgctgacgttcgacggcgccaccgggcgcgtgctcttctcgccgccacacatgagctaccagggccagctgggctgccgcggcgtggacgcgctgcccatcctgcacggcaacaacatgcccgtgctcgagaggcccatgaacgcgcccgtcatcgtgaacggcacgctcatttactacgtggagcgccgccagaacaagaacatcatcggcggcgagagctacgctggcttccgctcgctcatcaacgacaggcccatggacgtggccaatgacatcaccatcaacggcatcctgtaccgcctgcgctcggccgtgtgctacaaggtgggcgaccaactcatcgacggctgcgagcctgccggggacatcttcctcaagggctactacaccatcgtcttcaccgagctcgggccctggctctacgacccgctctcggtcttcagcaagcccgcgcgcgaggcgcgcctgctgcgcgcgctcaagaatcactacgcgcgcgagaacgcgggcgaggacgaggcgctcttctacgactggctcaagcaggagagcacgcagcccgtgctcatggccaagcagcagcagctcatgaaccaccgcgctatgttcgacgacgacctgctgcccatggaggaggccatgtcgctggtctcgcgccactgctgcgtgctggtctacgcgcaggactacgagccctacatcgccgcgaagaacatcaccgagatcttctgctag

SEQ ID NO: 13069 - DNA, 27 bp, unidentified
  source 1..27: mol_type = other DNA
  misc_feature 1..27: note = Synthetic
ctggaggttttgaataggtcgctatag

SEQ ID NO: 13070 - DNA, 60 bp, unidentified; identical to SEQ ID NO: 4792
  source 1..60: mol_type = other DNA
  misc_feature 1..60: note = Synthetic

SEQ ID NO: 13071 - DNA, 60 bp, unidentified; identical to SEQ ID NO: 4792
  source 1..60: mol_type = other DNA
  misc_feature 1..60: note = Synthetic

SEQ ID NO: 13072 - DNA, 507 bp, unidentified
  misc_feature 1..507: note = Synthetic
  source 1..507: mol_type = other DNA
attcagttttacgaagaccaatctcgaccaccgaaagcccccctcacggcctgcgtcatcacccagagcaagatcctggcccaattgcaatccatcaaccaagcgcgccgcgatttccttttgaaaaagggtcggggggtgtacctggacccccagaccggcgaggaactcaacccgtccacactctccgtcgaagcagcccccccgagacatgccgcccaagggaaccgccaagcagctgatcgctcggcagagagcgaagaagcaagagctgctccagcagcaggtggaggacgaggaagagatgtgggacagccaggcagaggaggtgtcagaggacgaggaggagatggaaagctgggacagcctagacgaggaggaggacgagctttcagaggaagaggcgaccgaagaaaaaccacctgcatccagcgcgccttctctgagccgacagccgaagccccggcccccgacgcccccggccggctcactcaaagccagccgtag

SEQ ID NO: 13073 - DNA, 507 bp, unidentified; identical to SEQ ID NO: 13072
  source 1..507: mol_type = other DNA
  misc_feature 1..507: note = Synthetic

SEQ ID NO: 13074 - DNA, 768 bp, unidentified
  misc_feature 1..768: note = Synthetic
  source 1..768: mol_type = other DNA
atggacgcatggttgcaacagacggtctttaggggcaccctatccatcagtcagggggtggacgaccgggatctgttactggcacctaagtggatttcctttctgagcctctcatcatttctgaaacagaaactgctctcgctgctcagacagattcgggaacttaggctaaccaccacagtgtatcccccacaggacaagctgatgtggtggtcccactgctgcgatccagaggatattaaagtggtgatcttaggccaggacccgtaccacaagggccaagctactggcctggcgtttagtgtggatccgcaatgtcaggttccacccagtttgagaagcatctttagagagctagaggcttccgtccccaatttcagtactccttcccacgggtgcctcgacagctgggctcgccagggtgtgttgctactaaacacagttttgacggtggagaaggggagggccggctcacacgagggacttggctgggattggttcacgagtttcatcatcagtagcatatcctcaaagttagaacattgcgtttttctcctgtgggggcgcaaggccattgacagaactccgctcataaacgcacagaaacacctggtgcttacggcccagcatccatctccgctggcctctcttggtggccgacactcgcgatggcctcggttccagggctgtaatcactttaacctagccaacgactatttgactcgccaccggcgtgagactgtggactggggcctgttggagcagtaa

SEQ ID NO: 13075 - DNA, 768 bp, unidentified; identical to SEQ ID NO: 13074
  misc_feature 1..768: note = Synthetic
  source 1..768: mol_type = other DNA

SEQ ID NO: 13076 - DNA, 1632 bp, unidentified
  misc_feature 1..1632: note = Synthetic
  source 1..1632: mol_type = other DNA
atgggtgtcaaaggtttatctttaattatgattgggttattaatctcaccaattaccaatctggatataactcatttaatgaatctaggaacggtaccgactgcaattagatctctagtttactacacttataccaaaccatcttatctcactgtagatttgattcccaatttgaagaatctggaccaaaattgcaattactcaagcttaaactactacaacaaaactgcactaagcctaattcaaccaattgcagataacatcaatcgccttacaaagcccatcacaagctcagaaattcaaagtcgtttctttggggcagtcataggtacaattgctcttggtgtagccaccgctgcacaagttacagcagcaatcggtctagcaaaagctcaagaaaatgcaaaacttatactaactctcaaaaaagctgcgacagaaacaaatgaggcagttcgagatcttgcaaactctaataaaattgtagtaaaaatgatatcagcaattcaaaatcaaataaacactattattcaacctgctatagatcagattaattgtcaaattaaagacctacaagttgccaatattttaaatttgtacctaacagagataacgactgttttccacaaccaattgaccaatcctgcattagagtcaattagcattcaagccctcaaaagcctcttaggacctaccctaccagaagtgctatctaaattagatttaaacaacatctcggcagcttcagtgatggcatccggcttaattaaaggacagataattgcagttgatataccgactatgacactagtattgatggtccaaataccgagtatatcccctttaagacaagcaaagataatagatctaacttctataacaattcacacaaatagccaagaagtacaggctgtagtaccggctaggtttctcgagattggctcagaaatattaggattcgatggctcagtgtgccaaatcacaaaagatacaatcttttgtccttataatgatgcttatgaattacccatccagcagaagagatgcctacaaggtcaaacaagggattgcgtgttcaccccagttgctggcactttccctcggagatttctcactacatatggtactatagtagctaattgtagagatttagtatgttcttgtctgcgacctcctcaaataatctaccaacctgatgaaaatccagttacaatcatagacaaagacctgtgtacaacattgactctagactccatcactatagagatccagaagtccataaatagtacttttcgacgtgaagtagttttagaatctactcaagtcagatctttgactcctcttgatttatcaactgatttaaatcaatacaatcaattactcaagagtgctgaagatcacatccaacgatcaactgattacttaaactcaattaatcctagtatagtcaataataacgcaataataatattgattatactctgcatcttattaatattgacagttacaatctgcataatttggctcaagtatttgactaaggaagttaagaacgtggcaagaaatcaaagacttaatagagatgctgatcttttttataagatccctagtcaaataccggtgcctagataa

SEQ ID NO: 13077 - DNA, 12 bp, unidentified
  misc_feature 1..12: note = Synthetic
  source 1..12: mol_type = other DNA
atggaggcttaa

SEQ ID NO: 13078 - DNA, 1413 bp, unidentified
  misc_feature 1..1413: note = Synthetic
  source 1..1413: mol_type = other DNA
atggctcatcttcccggcggtgcggccgccgcccccctttcggaggacgcgatcccgtcgccgcgcgagcggacggaagactggccgccctgccagatagtgctgcagggcgccgagctgaacgggatcctgcaggcctttgcgccgcttcgcacgagccttttggactcgctcctggtcgtgggcgaccgaggcatccttgtacataacgcgattttcggcgagcaggtgtttctgcccctcgaccattcgcagttcagtcgctatcgatggggcggacccaccgcggcgttcctgtctctcgtggaccagaagcgatccctgctgagcgtgtttcgcgccaaccagtaccctgacctgcggcgggtggagctgacggtcacgggccaggccccgtttcgcacgctggtgcagcgcatatggacgaccgcgtccgacggagaggccgtggagcttgccagcgagacgctcatgaaacgcgagttgacgagcttcgcggtactactcccccagggcgaccccgacgtccagctgcgcctcacgaagccccagctcacgaaggtggtgaacgccgtcggggacgagaccgccaaacccaccacgttcgagctcggccccaacggcaagttttccgtgtttaacgcgcgcacctgcgtcacctttgccgcccgcgaggagggcgcgtcgtccagcaccagcgcccaggtccagattctgaccagcgcgctgaagaaggcgggccaagcggccgccaacgccaagacggtctacggggaaaacacacaccgcacattctcggtggtcgtcgacgactgcagcatgcgggcggtcctccggcggctccaggtcggcggggggaccctcaagttcttcctcacggccgacgtccccagcgtgtgtgtcaccgccaccggccccaacgcggtgtcggcggtgtttcttttaaaaccccagcgggtctgcctgaactggctcggccggagcccgggttcctcgaccgggagcttggcgtcccaggactctcgggccggcccgaccgacagccaggactcctcctccgagccggacgcgggcgaccgcggcgccccagaagaagaaggcctcgagggccaggcccgggtaccgcccgcgttcccggaaccgccgggaaccaagcggaggcaccccggggccgaagttgtccccgcggacgacgccaccaagcgcccgaagacgggcgtgcccgccgcccccacgcgagccgagtcgccccccctctccgcgagatacggacccgaggcggcggagggtggtggggacggcggccgctacgcgtgctactttcgcgacctccagaccggcgacgcgagccccagccccctctccgccttccggggtccccaaagacccccatacggctttgggttgccctga

SEQ ID NO: 13079 - DNA, 201 bp, unidentified
  misc_feature 1..201: note = Synthetic
  source 1..201: mol_type = other DNA
ctgtgccgcgtacttggcacagagctcggaaaagcgcgggaagcgggccccggaaccgtctgccatttaaggacgcggaaaaccgcgaacggatttggacacgtgtccgcgcggaagctgtttctggcgagatccctacgcccgcaacagtactttctggtgcaagctcggcaacttcttcaaagaatgccggacacataa

SEQ ID NO: 13080 - DNA, 108 bp, unidentified; identical to SEQ ID NO: 4805
  source 1..108: mol_type = other DNA
  misc_feature 1..108: note = Synthetic

SEQ ID NO: 13081 - DNA, 222 bp, unidentified; identical to SEQ ID NO: 12819
  misc_feature 1..222: note = Synthetic
  source 1..222: mol_type = other DNA

SEQ ID NO: 13082 - DNA, 54 bp, unidentified; identical to SEQ ID NO: 4808
  source 1..54: mol_type = other DNA
  misc_feature 1..54: note = Synthetic

SEQ ID NO: 13083 - DNA, 54 bp, unidentified; identical to SEQ ID NO: 4808
  source 1..54: mol_type = other DNA
  misc_feature 1..54: note = Synthetic

SEQ ID NO: 13084 - DNA, 141 bp, unidentified; identical to SEQ ID NO: 4813
  source 1..141: mol_type = other DNA
  misc_feature 1..141: note = Synthetic

SEQ ID NO: 13085 - DNA, 138 bp, unidentified
  source 1..138: mol_type = other DNA
  misc_feature 1..138: note = Synthetic
atgtggcacagaaggttggtgaaccccagctctgggattttgctcaccactaaatccgtgtacttgtccatttatcatggagaatcatctgccggacatgctgatgtttcccaactgcgtttctgtgtttccctttga

SEQ ID NO: 13086 - DNA, 129 bp, unidentified; identical to SEQ ID NO: 4815
  source 1..129: mol_type = other DNA
  misc_feature 1..129: note = Synthetic

SEQ ID NO: 13087 - DNA, 594 bp, unidentified
  source 1..594: mol_type = other DNA
  misc_feature 1..594: note = Synthetic
acgccaataacaaagaaaaaatgccttaacctctttctgtttacagacatggcttctcttacatctctcatatttgtcagcattgtcactgccgctcatggacaaacagtcgtctctatccctctaggacataattacactctcataggacccccaatcacttcagaggtcatctggaccaaactgggaagcgttgattactttgatataatctgcaacaaaacaaaaccaataatagtaacttgcaacatacaaaatcttacattgattaatgttagcaaagtttacagcggttactattatggttatgacagatacagtagtcaatatagaaattacttggttcgtgttacccagttgaaaaccacgaaaatgccaaatatggcaaagattcgatccgatgacaattctctagaaacttttacatctcccaccacacccgacgaaaaaaacatcccagattcaatgattgcaattgttgcagcggtggcagtggtgatggcactaataataatatgcatgcttttatatgcttgtcgctacaaaaagtttcatcctaaaaaacaagatctcctactaaggcttaacatttaa

SEQ ID NO: 13088 - DNA, 39 bp, unidentified; identical to SEQ ID NO: 4818
  misc_feature 1..39: note = Synthetic
  source 1..39: mol_type = other DNA

SEQ ID NO: 13089 - DNA, 294 bp, unidentified
  misc_feature 1..294: note = Synthetic
  source 1..294: mol_type = other DNA
ataaccttaaaaattctccagacttatatagtcatcattttcaaagtcatggacagttatctgaccacccccatgccttatcatccagtagcagtcatgcagaacctagaggagaagatgcagtattatctagtgaagacttacacaagcctgggcaagttagcgtacaactacccggtactaactatgttgggcctggcaatgagctacaagctgggcccccgcaaagtgctgttgacagtgctgcaaggattcatgactttaggtatagccaactggctaagttgggaataa

SEQ ID NO: 13090 - DNA, 366 bp, unidentified; identical to SEQ ID NO: 12803
  misc_feature 1..366: note = Synthetic
  source 1..366: mol_type = other DNA

SEQ ID NO: 13091 - DNA, 84 bp, unidentified; identical to SEQ ID NO: 4824
  source 1..84: mol_type = other DNA
  misc_feature 1..84: note = Synthetic

SEQ ID NO: 13092 - DNA, 1053 bp, unidentified
  source 1..1053: mol_type = other DNA
  misc_feature 1..1053: note = Synthetic
atcaaacaaatggccgagatctacaagttccccaagctatcgtatgaggaacatggatatatggaacctctaccactaaagaccggcccagacaagaaggcagtcccacacataaggataatcaagataggggacccaccgaagcatggaaatcgataccttgatattctcttacttgggttttatgagatacccaaagaagttggaacatatggtagtgtatcagatttgacgagacccacgggatacacaatctgcggttcaggatcattacctattggaatcgctaggtacttaggtacagatcaggaactactcaaagcatcagtagagctaaaggtgacagtaagaaggacagtaaggtcaagtgagatgattgtgtatatggtagattccataccaccagcaatgatggcttgggcttctagactgaaacgaggcatgatattcaatgcaaacaaagtagccctagctcctcaatgtctgcctatagacaaagatataagattcagagttgtctttgtaaatggcacttctctaggttctattacaatagcaaaagttcccaagacattagccgatcttgccttaccgaattccatatccgtcaatttaatggtctcactcaagactggtgcgtcaactgagtccaagggcattattcctacgctaaacgaaaagggcgacaaggtactaaactttatggtacacctcggattaatacataggaaagtcggaagagtgtattcaatggagtattgcaaaggtaaaatagagaagatgcggctgatcttctcattaggactggttggaggaatcagtttccatgttcagcttacaggtgtggtatctaaatcctttgttggtcagcttggagggaaaaaggaaatatgttaccctttgatggatgttaatccacacatgaatttagttatctgggctgcttccgttgaaatcaccggcgtagatgctgtcttccaaccctccattccaagagatttcaaatactacccgaatgtggtggcaaaaaacattggaaaaataaaagtctag

SEQ ID NO: 13093 - DNA, 36 bp, unidentified; identical to SEQ ID NO: 4826
  misc_feature 1..36: note = Synthetic
  source 1..36: mol_type = other DNA

SEQ ID NO: 13094 - DNA, 933 bp, unidentified
  source 1..933: mol_type = other DNA
  misc_feature 1..933: note = Synthetic
atggagacagtttccacgcagcgggaaaccgcgtcgtcggaaacggagcgtaccagggaagccgcgtccgcggaaacgacggacgctactttccgatccttggaagagggaagcacgatctcctcccggtattcggaaacagcgtccacagcttccgaagatgcggtgtgttggctacgtcggaccgcgatcgtcatgcgtgtctacggattgctgacgctggaaaccgctttcagcgtactcattagcgcgctggtttggctgggttacccctcactgggctacgagtgccgcgacgatccctcgccgctattgcttagctgcacaccggtgttggttctgggcgcgctggagctcaccgaccacagacaccccagcaacggcctggtgtttgcactgtatgtggcgcttctctcgttcaccaccgccgggctcaacctgtgcgccacagcgcccatcggcgtttccagcctcatcctaacgtggacgttgttcgtggcctgcaacggcgtggcttgggaacaccgcctcagctctgtgtggcgtgacgcgcttttcacctccacacttttgacggtgatggtcagcgtcctggcttctacttacacctggttgcataagactctgctgtgtctctacaccgtgttcgtgggctgcatcctggccgtccttttccaagacgtgcgctacatcgccaccaaaatgcccgtgagccacatcatccgcagctcgctggtactttacgccaccgagacactcatctatcacaccacactcctgatgctcacgcccgtggtgtggtcggcacgctgggaccaaatgttcagctacctggccaagctgggcacctatcatcattaccgggttgacaacggcacgctcagcgtcatcctcaacagcaccaccgcgacgttccagagcagggttgcttga

SEQ ID NO: 13095 - DNA, 1506 bp, unidentified
  misc_feature 1..1506: note = Synthetic
  source 1..1506: mol_type = other DNA
atgatggatccggctgcgggttctggccctgacggcgctgcagttgtgccgccggagctccccgcgctgcctgtggcggctgaggatcccatggcgttataccgacaagtgttgcgggattttaaggaactgttcttttgcctggagccaatggaaatcacgcgttacgttcatcgtaacgagggacgctgtctgtccttgggtccccccaagggctggcatgtgatgttacgtacggaggacggaatcattaccgccgccaaacaggcggcgtcaaagctcatctgttgccgcgagccgctgacgccgttgggatacgctgttattttgttgcccgagccacgtcgcgatcaccatgatggcatggtggctaccccgtacgtggtttttatgggtcgcttttctcgcgtctacgcctacgacactcgtgaaaagtacatggtgttggtatcgcacaacctggacgaactggcacgttacggtgtgtcacgttcggagattgcgtatcgcgacgtgattcacaccactctgcggagaatgacggtacctgttccgcgacgataccctaagggcgcgcgtaccatgcatgttttgtttctcaatgacacaacgcctgagggctcgtacgccacggccgaacgaatcctgggttgcgacgtgaagttgcatacaccgggttacggcacggtgattatgcggctgatgaaaacggtgcagcagttacaccgcatttggcccttttgtgcgctcaccgaggtggagagccgtcgttggtggtgggctgtccgtgctaatctggccacgccgtggtatgtgctaggcgtgacgggacgtccgcggccgggacgcagttttgtggccgaagtgctggtactgttggactggttcggtgccgtgtacgccatccagatggacgaccccaaccactacgtgcggcgcgttgccaacaccatcacggagtttttccgcatggggttgctgaaaatggtctttcgacaccggcgttttgagcgcgagcgtcaacgtcagacgcgtatggaacaccgtcatctgtgcccgcaccaccacgagcgtgccgtagaccacaagcgggacattctcttcaacgaagacgccgcgttgcccgatgagcgacgcgagcgcgagcggcgtattctgcagcagcagtatgactggctctgtttaacggagcgttttgacccgcacgagggcgcgtgggagcgtctggaccccaacacgttggtgctacaccgctacgacaccaactcgcagagctacgtgttggatcccgacattgtcggtgtggaagcagccgagcgcgaggccgctggtcatcaggacgatacgggcccgcggctgcactgcctggtgacgacgcgttcgtcgacgcgcgagggcgcagagcgggtgattaccgccctggtgcatcagtcgcggttagtgacgtactcggacccttttcccttaaagagcctgacgggtgtgcgcgagtacatccagatttga

SEQ ID NO: 13096 - DNA, 144 bp, unidentified
  source 1..144: mol_type = other DNA
  misc_feature 1..144: note = Synthetic
aggatcccatggcgttataccgacaagtgttgcgggattttaaggaactgttcttttgcctggagccaatggaaatcacgcgttacgttcatcgtaacgagggacgctgtctgtccttgggtccccccaagggctggcatgtga

SEQ ID NO: 13097 - DNA, 375 bp, unidentified
  source 1..375: mol_type = other DNA
  misc_feature 1..375: note = Synthetic
gtggagatgactgactctcaggacattaatattagtgtggaaagaatagctgctcagcgtcagcgagaaacgcgagtgttggaatacctggaactacagcaacttaaagagtcccactggtgtgagaaaggagtgctgtgccatgttaagcaggcagccctttcctacgatgtcagcgttcagggacatgaactgtcttacactttgcctttgcagaaacaaaccttctgcaccatgatgggctctacctccatcacaatcacccaacaagccgggcctgtagagggggctatcctctgtcactgtcacgcacctgattgcatgtccaaactaatcaaaactctctgtgctttaggtgatatttttaaggtgtaa

SEQ ID NO: 13098 - DNA, 87 bp, unidentified; identical to SEQ ID NO: 4837
  misc_feature 1..87: note = Synthetic
  source 1..87: mol_type = other DNA

SEQ ID NO: 13099 - DNA, 78 bp, unidentified; identical to SEQ ID NO: 4838
  source 1..78: mol_type = other DNA
  misc_feature 1..78: note = Synthetic

SEQ ID NO: 13100 - DNA, 78 bp, unidentified; identical to SEQ ID NO: 4838
  misc_feature 1..78: note = Synthetic
  source 1..78: mol_type = other DNA

SEQ ID NO: 13101 - DNA, 1539 bp, unidentified
  source 1..1539: mol_type = other DNA
  misc_feature 1..1539: note = Synthetic
atggctaccgacattgatatgctaatcgacctaggattggacctgtccgacagcgagctcgaggaggacgctctggagcgggacgaggagggccgccgcgacgaccccgagtccgacagcagcggggagtgttcctcgtcggacgaggacatggaagacccctgcggagacggaggggcggaggccatcgacgcggcgattcccaaaggtcccccggcccgccccgaggacgccggcacccccgaagcctcgacgcctcgcccggcagcgcggcggggagccgacgatccgccacccgcgaccaccggcgtgtggtcgcgcctcgggaccaggcggtcggcttccccccgggaaccgcacggggggaaggtggcccgcatccaacccccgtcgaccaaggcaccgcatccccgaggcgggcggcgaggtcgccgccggggccggggtcgatacggccccggcggcgccgactccacaccaaacccccgccggcgcgtctccagaaacgcccacaaccaagggggtcgccaccccgcgtcggcgcggacggacggccccggcgccacccacggcgaggcgcggcgcggaggggagcagctcgacgtctccgggggcccgcggccacgaggcacgcgccaggccccccctccgctgatggcgctgtccctgacccccccgcacgcggacggccgcgccccggtcccggagcgaaaggcgccctctgccgacaccatcgaccccgccgttcgggcggttctgcgatccatatccgagcgcgcggcggtcgagcgcatcagcgaaagctttggacgcagtgccctggtcatgcaagacccctttggcgggatgccgtttcccgccgcgaacagcccctgggctcccgtgctggccacccaagcgggggggtttgacgccgagacccgtcgggtttcctgggaaaccctggtcgctcacggcccgagcctctaccgcacattcgcagccaacccgcgggccgcgtcgacagccaaggccatgcgcgactgcgtgctgcgccaggaaaatctcatcgaggccctggcgtccgcggatgagacgctggcgtggtgcaagatgtgcattcaccacaatctgccgctccgcccccaggaccctatcatcggaacggcggccgccgtgctggaaaacctcgccacgcgcctgcgcccctttctgcagtgctacctgaaggcccgaggcctgtgcgggctggacgacctgtgctcgcggcgacgcctgtcggacattaaggatattgcctcctttgtgttggtcatcctggcccgcctcgccaaccgcgtcgagcgcggcgtgtcggagatcgactacacgaccgtgggggttggggccggcgagacgatgcacttttacatcccgggggcctgcatggcgggtctcattgaaatactggacacgcaccgccaggagtgttccagtcgcgtgtgcgagctgacggccagtcacactatcgcccccttatatgtgcacggcaaatacttctactgcaactccctattttag

SEQ ID NO: 13102 - DNA, 876 bp, unidentified
  misc_feature 1..876: note = Synthetic
  source 1..876: mol_type = other DNA
ctgaaaatgagacatattatctgccacggaggtgttattaccgaagaaatggccgccagtcttttggaccagctgatcgaagaggtactggctgataatcttccacctcctagccattttgaaccacctacccttcacgaactgtatgatttagacgtgacggcccccgaagatcccaacgaggaggcggtttcgcagatttttcccgagtctgtaatgttggcggtgcaggaagggattgacttattcacttttccgccggcgcccggttctccggagccgcctcacctttcccggcagcccgagcagccggagcagagagccttgggtccggtttctatgccaaaccttgtgccggaggtgatcgatcttacctgccacgaggctggctttccacccagtgacgacgaggatgaagagggtgaggagtttgtgttagattatgtggagcaccccgggcacggttgcaggtcttgtcattatcaccggaggaatacgggggacccagatattatgtgttcgctttgctatatgaggacctgtggcatgtttgtctacagtcctgtgtctgaacctgagcctgagcccgagccagaaccggagcctgcaagacctacccggcgtcctaaattggtgcctgctatcctgagacgcccgacatcacctgtgtctagagaatgcaatagtagtacggatagctgtgactccggtccttctaacacacctcctgagatacacccggtggtcccgctgtgccccattaaaccagttgccgtgagagttggtgggcgtcgccaggctgtggaatgtatcgaggacttgcttaacgagtctgggcaacctttggacttgagctgtaaacgccccaggccataa

SEQ ID NO: 13103 - DNA, 738 bp, unidentified
  source 1..738: mol_type = other DNA
  misc_feature 1..738: note = Synthetic
ctgaaaatgagacatattatctgccacggaggtgttattaccgaagaaatggccgccagtcttttggaccagctgatcgaagaggtactggctgataatcttccacctcctagccattttgaaccacctacccttcacgaactgtatgatttagacgtgacggcccccgaagatcccaacgaggaggcggtttcgcagatttttcccgagtctgtaatgttggcggtgcaggaagggattgacttattcacttttccgccggcgcccggttctccggagccgcctcacctttcccggcagcccgagcagccggagcagagagccttgggtccggtttctatgccaaaccttgtgccggaggtgatcgatcttacctgccacgaggctggctttccacccagtgacgacgaggatgaagagggtcctgtgtctgaacctgagcctgagcccgagccagaaccggagcctgcaagacctacccggcgtcctaaattggtgcctgctatcctgagacgcccgacatcacctgtgtctagagaatgcaatagtagtacggatagctgtgactccggtccttctaacacacctcctgagatacacccggtggtcccgctgtgccccattaaaccagttgccgtgagagttggtgggcgtcgccaggctgtggaatgtatcgaggacttgcttaacgagtctgggcaacctttggacttgagctgtaaacgccccaggccataa

SEQ ID NO: 13104 - DNA, 129 bp, unidentified; identical to SEQ ID NO: 4847
  misc_feature 1..129: note = Synthetic
  source 1..129: mol_type = other DNA

SEQ ID NO: 13105 - DNA, 30 bp, unidentified; identical to SEQ ID NO: 4848
  source 1..30: mol_type = other DNA
  misc_feature 1..30: note = Synthetic

SEQ ID NO: 13106 - DNA, 33 bp, unidentified; identical to SEQ ID NO: 4850
  source 1..33: mol_type = other DNA
  misc_feature 1..33: note = Synthetic

SEQ ID NO: 13107 - DNA, 1896 bp, unidentified
  misc_feature 1..1896: note = Synthetic
  source 1..1896: mol_type = other DNA
gtgcccaccatggagcgctttcgccccctgcgcaacatctggaaccgcgtccgcgaattcaccagggccgcgaccacctcggccggcatcacctggctctcccgctacatctaccactaccatcgcctcatgctggacgacctgtcccccggcgcccccgccacagtcggctggcccctgtaccgagaaccgcctccccacttcctggttggctaccagtatctggtacgcacatgcaacgactacgtgttcgagtcccgcgcctactcgcgcctcaagtacacggagatcacccaacccggcatgcaagtcgtcaactggtccgtcatggccaactgcacctacaccatcaacacgggggcctatcaccgcttcgtggacctggacgacttccagaccaccctcacgcagatccaacaggccgtgctggccgagagggtcgtggccgacctagcgttgctgcagcccctgcgggggttcggctcgactcgcatggcagacaggggagaagcagaggttccggtggagagactgatgcaagactactacaaagacctgcgtcgctgtcagagcgaggcctggggcatggccgagcgcctgcgcattcaacaggccgggcccaaagacgtggtcctcctcgccaccatccgccgcctgaagaccgcctactttaattacatcatcagcagcatcacctcccaactgcccgcggacgccccccagcggcccaccgtcctcagcttaccttgcgactgcgattggatagacgctttcctagagaagttctcggatcccgtcgacctcgacgttctcagatccctgcacggagtgcctacgcagcaattgataaaatgcatcgtcagcgccgtgtccctgcccgacggccctaaccacttaccctccctgcacgggggcgctctgcgcggcggcgtcttcgaactgcgacctcgcgaaaacggacgcgccgtcaccgagaccatgcgtcgccggcgcggcgaaatgatcgagcgcttcgtggaccgcctgccggtcagacgacgacgtcgccgccccgtccccgtcgcagagctgccggaggaacccgtgcccctggaagaggaggagccggaggaagaagcagaggcgcctcggggcgctttcgagcaggaggtgcgcgacacggtcgccgatctcatccgcctcctgcaagaagaactcacggtggccgcccgcaactcccaatttttcaacttcgccgtcgacttctacgaggccatggagcgtctcgaagccatcggagacatcaacgagatgaccctgcggcgctggatcatgtacttcttcgtctgcgagcacatcgccaccacgctcaactacctcttccagcgcctcagaaactacgccgtcttcgcccgccacgtggaactcaacgtggcccaggtggtcatgcgagcgcgcgactccttcggaaacgtggtgtacagccgcgtgtggaacgagaacggcctcaacgccttctctcaactcatgcgtcgcatctccaacgacctggccgccaccgtggagcgagcgggccacggcgacctccgcgaggaagaagtggagcagttcatggccgagatcgcctatcaagacaactcgggcgacgtacaggagatcctcaggcaggccgccgttaacgatgcagacattgattctgtggaactctctttcaggttcaggacccgggggccggtggtcttcacgcagagacggcacatccaggacctcaaccgccgcgtcgtcgcccacgccagcagtctccgggctcgtcatcaaccgctgccgaatcctcacgaaaacgtgccactgcctccgctgccccccggcgcagagccgcctctaccccccggcgctcgccctcgacgagtgagataa

SEQ ID NO: 13108 - DNA, 3561 bp, unidentified
  misc_feature 1..3561: note = Synthetic
  source 1..3561: mol_type = other DNA
gtggccatggctctggttcaggacccgggggccggtggtcttcacgcagagacggcacatccaggacctcaaccgccgcgtcgtcgcccacgccagcagtctccgggctcgtcatcaaccgctgccgaatcctcacgaaaacgtgccactgcctccgctgccccccggcgcagagccgcctctaccccccggcgctcgccctcgacgagtgagataaaacctcctcggggcacggtggtggccccgcgcggacacggcctcctctacgccgtggacgcctcttccaacacccccctggaaatcaagtaccatgtgcacctggctcacgctcttaccggtcttctgaaagtgaacttgcaaacgcttcccgccgacctcagcgcggccgccctcgactccctggacagcgggcagctgcgtcccctcctgcaacgcctgcgcccctccgtggcggagatctggacttgcggcacccggggcgtcgtcgtccccaccgtcgtccacccagagaaggagggcgcagacgcagactcccaccgccaaggcgaaggggatgccgccccaccaagcccccgtctcaacttccccctccggtttctggtgcgcgggcgaaaagcgcatctcattcaggagatacagagcgtgcagcgctgcgactactgcggtcgcttttacaaacatcagcacgaatgctctgtgcgccggcgggacttctactttcaccacatcaacacccattcctccaactggtggcaggagatcagcttcttcccgatcggctcccacgcgcgcacccagcggctctttgtcacctacgacgtagaaacctacacatggatgggctcgttcgggaaacagttggtacccttcatgctggtcatgcacgtctcgggcgaggagaccctcgttcgtcaagcctgcgagctggccctagagctccgatgggacgtctggaacgaccgcccctgcactttctacgtggtgacgccggagaaaatggccgtggggaaaaagtttcgcgagttccgcgaccgcttgcaaactctgctagcccttgacctgtggagctctttcctcgcggctaaccctcagctctccgactgggcccgggcggagctgggtctctcctcgccggactgtctcacctacgaggagttgaaaaaagcgccggccctcaagggacagccgcgctttatcgaactttacatcgtgggccacaacatcaacggcttcgacgagatcgtcctggcggcgcaagtcatcaacaaccgctcggacgtgcccggacccttcaggatctctcgcaacttcatgccccgcgccgggaaaatcctctttaacgacgtcacattcgccctccccaatcccaggcagaaaaagcgcaccgacttcacgctgtgggaacagggcgcctgcgacgacacggacttcaaacatcagtacctgaaagtgatggtgcgggacaccttcgccctcacccacacctctctcagaaaggccgctcaagcgtacgccctgccggtagaaaaaggctgttgtccatacaaagccgtgaacgaattttacatgttaggttcttaccgagcggacgaaaaaggatttcccgccgaagagtactggaaagaccgcgaggaatacctcctcaatcgcgaactgtgggagaaaaaacaagagacggcctacaacctggtccgcgagacgttggactactgcgctctcgacgtgctggtaaccgcagccctggtggacaagctccgggaatcctacgcccagttcatccaagactccgtgggactgcccggagccaactttaacgtcttccaacgccccactatctcttccaactcccacgccatcttcaggcagatcctctaccgggccgaaaaaccccacaagacccacttgggagacgggctcatggctccctctcacgagatgtacgactacgtgcgagccagcatccgcggggggcgctgttaccccacttacatcggggtgttgagggagcccctgtacgtgtacgacatctgcggcatgtacgcctcggccctgacccaccccatgccctggggaccgcccctgaatccctacgaaagggccctggcggtgaagaagtgggaagacgcgttgcaagacacggacaccgaaatcgattattttaataaaattctgctacccggcatatttaccatcgacgccgaccccccgcccgccaacttgctagatcccctgcctccgttctgctccagaaaaggggggcgattgtgttggaccaacgagcccctccgcggggaggtggccaccagcgtggacctcatcaccctgcacaaccgcggctggcgcgtgcgcatcctgcccgacgagcgcaccgccgtgttccccgagtggcggtgcgtggcccgcgagtacgtgcaactcaacatcgccgccaaggagagggccgatcgggagaaaaatcagaccctgcgctccatcgccaagttgctttccaacgccctctacgggtctttcgccaccaaacttgacaataaaaagatcgtgttttctgatcagatggacccctccaccatcaaaagcatcgccgcggggcacgtgaatatcaaatccacctcgtttgtagaaactgacaacttgagcgccgaaatcatgccggcttttgagagggcctactcacccgaacagctggctctggtccacagcgatgcggaagaaagtgacggggagagtgggcacgcccccttttataccccttgggggggtgcgggtcacgtgacctacacttacaagccaatcaccttcgtggacgcggaggaggacgacctgtgtctgcacaccctggaaaaggtggaccccctcattgaaaacgacagatacccctcgcagatcgcctccttcgtgttagcctggacccgagcctttgtctcggagtggtcccagttcctgtacgcggaagacctcggaacacctttggaagatcgccccctcaagtcggtctacggggataccgacagcctttttgtcacggaagcgggacacagactcatggagacgcaaggtaagaaacgcatcaaaaaaaatggaggcaacttggtttttgatcccgctaaacccgagctcacgtggctggtggagtgcgagaccgtctgcgctcagtgcggagccgacgcctactcgcccgagtcggtcttcctggccccaaaactctacgccctcaagtgtctgcactgcaccaaatgtcagcacgtttccaagggaaagctgcgcgccaagggacacgcggccgagtccctcagctacgacctcatgcttcgttgctatctggccgactcacagggagacgacgcccgcttcagcaccagcaggatgagcctgaagcgcaccctcgcaagcgcccagcccggggctcatcccttcaccgtcaccgagaccaccctcacccgaacgctgagaccctggaaggacagaaccctcgcggccctggacgcccaccggctggtgccctacagcgaaagtcggcccaacccccgaaaccaagaagtctgctggatcgagattccatag

SEQ ID NO: 13109 - DNA, 45 bp, unidentified; identical to SEQ ID NO: 4855
  source 1..45: mol_type = other DNA
  misc_feature 1..45: note = Synthetic

SEQ ID NO: 13110 - DNA, 1620 bp, unidentified
  source 1..1620: mol_type = other DNA
  misc_feature 1..1620: note = Synthetic
atgccaacttcaacactgctaattattacaaccataattatggcatctttctgccaaatagatatcacaaaactacagcatgtaggtgtattggtcaacagtcccaaagggatgaagatatcacaaaacttcgaaacaagatatttaattttgagcctcataccaaaaatagaagactctaactcttgtggtgaccaacagatcaagcaatacaagaggttattggatagactgatcatccctctatatgatgggttaagattacagaaagatgtgatagtaaccaatcaggaatccaatgaaaacactaatcccagaacaaaacgattctttggaggggtaattggaaccattgctctgggagtagcaacctcagcacaaatcacagcggcggttgctctggttgaagccaagcaggcaagatcagatattgagaaactcaaagaagcaatcagggacacaaacaaagcagtgcagtcagttcagagctccatagggaatctaatagtagcaatcaaatcagtccaagattatgtcaacaaagaaatcgtgccatcaattgcgaggctaggttgtgaagcagcaggacttcaattaggaattgcattaacgcagcattactcagaattaacaaacatatttggtgataacataggatcattacaagaaaaaggaataaaattacaaggtatagcatcattataccgcacaaatatcacagaaatattcacaacatcaacagttgataaatatgatatctatgatctattatttacagaatcaataaaggtgagagttatagatgttgatttgaatgattactcaatcaccctccaagtcagactccctttattaactaggctgctgaacactcagatctacaaagtagattccatatcatataatatccacaatagagaatggtatattcctcttcccagccatatcatgacgaaaggggcatttctaggtggagcagatgtcaaagaatgtatagaagcattcagcagttatatatgtccttctgatccaggatttgtactaaaccatgaaatggagagctgcttatcaggaaacatatcccaatgtccaagaaccacgatcacatcagacattgttccaagatatgcatttgtcaatggaggagtggttgcaaactgtataacaaccacttgtacatgcaacggaatcggcaatagaatcaatcaaccacctaatcaaggagtaaaaattataacacataaagaatgtagtacaataggtatcaacggaatgctgttcaatacaaacaaagaaggaactcttgcattctacacaccagatgatataacattaaacaattctgttgcacttgatccaattgacatatcaatcgagctcaacaaggccaaatcagatctagaagaatcaaaagaatggataagaaagtcaaatcaaaaactagattctattgggaattggcatcaatctagcaccacaatcataattattttgatgatgatcattatattgtttataatcaatataacgataattacaattgcaattaagtattacagaattcaaaagagaaatcaaatggatcaaaatgacaagccatatgtactaacaaacaaataa

SEQ ID NO: 13111 - DNA, 39 bp, unidentified; identical to SEQ ID NO: 4857
  source 1..39: mol_type = other DNA
  misc_feature 1..39: note = Synthetic

SEQ ID NO: 13112 - DNA, 27 bp, unidentified
  misc_feature 1..27: note = Synthetic
  source 1..27: mol_type = other DNA
atagagatgctacagatacgtatttga

SEQ ID NO: 13113 - DNA, 306 bp, unidentified
  source 1..306: mol_type = other DNA
  misc_feature 1..306: note = Synthetic
ctggggacctgcctccgaacaccccaacaggaagtgcaagtggactccatcccacctcaggatacaatccccagggagcaggactcaatctccagtcagtgcacaaaccaattcacgccccctactcaggaatggcattggtacctatccctgaataccagttggaaactggaattccgggcatcccagactggctcttcaaccttgtcgcgtcatacttgcccgagttgcctagtttgcaggacgtgttcaatagaattgcctttggaatctggtcatcatattacaatgcggggtcaacagtag

SEQ ID NO: 13114 - DNA, 2811 bp, unidentified
  misc_feature 1..2811: note = Synthetic
  source 1..2811: mol_type = other DNA
gtgttggtgagtcacactttcgttgcagacaaaatggacaaggacaggccgggtctcccggccccggatgacaacatagaagaagtaccatctacctcgggtgttcaggaacgggcgtctgagggagattgggaaaatgtcctcatagagatatcagatagcagctcagaagaggaagcagaagatgcccacctggagccatcccagaggggtaaaaagagaaaacgggtcgatgatgatgccggtggttcagctccagcacaacacgtgcccccccctcagctggatcaccctggtcgagaagccattctctacaggtttccgctagatttaagaaggtttattcaagcaattggagccgcagctacgcaccccgacacgcgagccatagaccagtttttcggatcccagatttcaaataccgacctgtacgtaatgtatgccatggccattcgacaggccattagagatcgtcggaggaatccagcttctcgtagaagtcaggtcaaatggagaatgaccaccctggccgctggttggcctatgggttaccaggcatacagtagctggatgtacagctacaccgatccccaggtgactgccacgatcatacatctgcaggcgactcttgggtgcgcaagtggccgtaggtgtcatgtgaccttttctgccggcacctttaggccgccgcgatgtagtcccggggatcgccagtggttgtatgttcagagccgcgtgggtgaccttgtgcagagttctaatccatgctacagtattttctttgactacatggccatacataggagcctcacgaaaatctgggatgaagtggtaacacctgatcagcgtgttacatttatggaattcctgggctttttgcaacgcacggagttggtctacatcaagagctttgtcagctatgccttgggcaccactagtatcgaaacaccgtggatggatgagaatcctagcacagagacggcacaggcttggaatgccggcttgctccgggggcgtgcgtacgggcaagacttgcttagaactgaaggagaacatggcgaaggtgctacctgtgaaacacgggaagaaagtgaggacacagagagcgatggggatgatgaagaacttcctcgtgtagtgtccagggatggaactaagcacagacgaccccctatatttttaagacgcctgcacaggttgctgttgatgagagcgggcaaaggaaaggaacgggccagggagacactggcgaaggcccctaggcgcacttatggcacacctaggccgccagttcagaaaccaagaccagaggtcccgcaaagctatgagacagctaccagtcacgggtcggcgcaagtcccagaacccccacccacccacccattacatcagcaacacagcatggccccgtgtatggtagctcagaacccacgtgcacccttaggggaccaactcccaggtgttcctaaagatggacgaggggcgtgtgcaccggtacccgccctggccgggcctattgtccggccctgggagtcatccctgttacagtctccgggaagggcctttgcacccgttagcccacaacccatgccagtagaacccgtccctgtccctactgtggcacttgagcgaccagtttgtcccgcacctcctgagattgctatgcagggcccgggggaaccttctggcattaaacgcacacgggagcgttggaggcccgcaccgtggacgccaaacccaccccgctctcccagtcagatgtccgtgcgtgaccgtctggctcgtttgcgtgctgaggcacaggcccgtcaggctagtgttgaggtgcagcccacccagttgacccaagtatcccctcagcaaccaatggagaggccgttggaaccagagcagcagatgttccctggttccccctttagccaggtcgctgatgttgcccgggaatctggggtacctgcaatgcagcctcagtactttgacctccccttaactcaacccattagccagggggcacccgcggccccgttgagggctagtatgggcccggtacctccggtaccggcaacacagccacagtattttgacatccccttaactgaacccattaaccagggggcatccgcggcccattttctccctcagcaaccaatggaggggccgttggtacccgagcggtggatgttccaaggtgccaccctgagccagagtgttaggccaggggtagcgcagtcacaatattttgacctccccttaactcaacccattaaccatggggcacccgcagcccatttcctccatcagccaccaatggaggggccgtgggtacccgagcagtggatgttccaaggtgccccccctagccaaggcactgacgtggtccaacatcagctggatgatttggggtatccactccatgatctcaaccatcccggggttcccgtgtctcctgccgttaaccaatatcatttcagccaggctgcctttgggttacctattgatgaggatgagagtggcgagaggtccgatacctccgagccgtatgaagctcttgatttgtcaatccatggcaggccctgccctcaggcccccgaatggcctgttcaaggggagggtggccaggatgccaccgaggttcttgatttgtcaatccatggcaggccccgccctcggacccccgagtggcctgttcaaggggagagtggccagaatgtcacagaccatgaacctagaagggtggtggtgtcagctattgttcacatgtgtcaggatgacgagtttccggatctacaagatcctccagatgaggcctaa

SEQ ID NO: 13115 - DNA, 24 bp, unidentified
  misc_feature 1..24: note = Synthetic
  source 1..24: mol_type = other DNA
ttgatgaagattaagaaaaagtga

SEQ ID NO: 13116 - DNA, 12 bp, unidentified
  source 1..12: mol_type = other DNA
  misc_feature 1..12: note = Synthetic
atagcactttag

SEQ ID NO: 13117 - DNA, 78 bp, unidentified; identical to SEQ ID NO: 4870
  misc_feature 1..78: note = Synthetic
  source 1..78: mol_type = other DNA

SEQ ID NO: 13118 - DNA, 3729 bp, unidentified
  misc_feature 1..3729: note = Synthetic
  source 1..3729: mol_type = other DNA
atgtttttcaacccgtatctgagcggcggcgtgaccggcggtgcggtcgcgggtggccggcgtcagcgttcgcagcccggctccgcgcagggctcgggcaagcggccgccacagaaacagtttttgcagatcgtgccgcgaggcgtcatgttcgacggtcagacggggttgatcaagcataaaacgggacggctgcctctcatgttctatcgagagattaaacatttgttgagtcatgacatggtttggccgtgtccttggcgcgagaccctggtgggtcgcgtggtgggacctattcgttttcacacctacgatcagacggacgccgtgctcttcttcgactcgcccgaaaacgtgtcgccgcgctatcgtcagcatctggtgccttcggggaacgtgttgcgtttcttcggggccacagaacacggctacagtatctgcgtcaacgttttcgggcagcgcagctacttttactgtgagtacagcgacaccgataggctgcgtgaggtcattgccagcgtgggcgaactagtgcccgaaccgcggacgccatacgccgtgtctgtcacgccggccaccaaaacctcgatctacgggtacgggacgcgacccgtgcccgatttgcagtgtgtgtctatcagcaactggaccatggccagaaaaatcggcgagtatctgctggagcagggttttcccgtgtacgaggtccgtgtggatccgctgacgcgtttggtcatcgatcggcggatcaccacgttcggctggtgctccgtgaatcgttacgactggcggcagcagggtcgcgcgtcgacttgtgatatcgaggtcgactgcgatgtctctgacctggtggccgtgcccgacgacagctcgtggccgcgctatcgatgcctgtccttcgatatcgagtgcatgagcggcgagggtggttttccctgcgccgagaagtccgatgacattgtcattcagatctcgtgcgtgtgctacgagacggggggaaacaccgccgtggatcaggggatcccaaacgggaacgatggccggggctgcacttcggagggtgtgatctttgggcactcgggtcttcatctcttcacgatcggcacctgcgggcaggtgggcccagacgtggacgtctacgagttcccttccgaatacgagctgctgctgggctttatgcttttctttcaacggtacgcgccggcctttgtgaccggttacaacatcaactcttttgacttgaagtacatcctcacgcgcctcgagtacctgtataaggtggactcgcagcgcttctgcaagttgcctacggcgcagggcggccgtttctttttacacagccccgccgtgggttttaagcggcagtacgccgccgcctttccctcggcttctcacaacaatccggccagcacggccgccaccaaggtgtatattgcgggttcggtggttatcgacatgtaccccgtatgcatggccaagactaactcgcccaactataagctcaacactatggccgagctttacctgcggcaacgcaaggatgacctgtcctacaaggacatcccgcgttgtttcgtggctaatgccgagggccgcgcccaggtaggccgttactgtctgcaggacgccgtattggtgcgcgatctgttcaacaccattaattttcactacgaggccggggccatcgcgcggctggctaaaattccgttgcggcgtgtcatctttgacggacagcagatccgtatctacacctcgctgctggacgagtgcgcctgccgcgattttatcctgcccaaccactacagcaaaggtacgacggtgcccgaaacgaatagtgttgccgtgtcacctaacgccgctatcatctctaccgccgccgtgcccggcgacgcgggttctgtggcggctatgtttcagatgtcgccgcccttgcaatctgcgccgtccagtcaggacggcgtttcacccggctccggcagtaacagtagtagcagcgtcggcgttttcagcgtcggctccggcagtagtggcggcgtcggcgtttccaacgacaatcacggcgccggtggtactgcggcggtttcgtaccagggcgccacggtgtttgagcccgaggtgggttactacaacgaccccgtggccgtgttcgactttgccagcctctacccttccatcatcatggctcacaacctctgctactccaccctgctggtgccgggtggcgagtaccccgtggaccctgccgacgtatacagcgtcacgctagagaacggcgtgacacaccgctttgtgcgtgcttcggtgcgcgtctcggtgctttcggaactgctcaacaagtgggtttcgcagcggcgtgccgtgcgcgaatgcatgcgcgagtgtcaagaccccgtgcgccgtatgctgctcgacaaggaacagatggcgctcaaagtaacgtgcaacgctttctacggttttaccggcgtggtcaacggcatgatgccgtgtctgcccatcgccgccagcattacgcgcatcggtcgcgacatgctagagcgcacggcgcggttcatcaaagacaacttttcagagccgtgttttttgcacaatttttttaatcaggaagactatgtagtaggaacgcgggagggggattcggaggagagcagcacgttaccggaggggctcgaaacatcatcagggggcttaaacgaacggcgggtggaggcgcgggtcatctacggggacacggacagcgtgtttgtccgctttcgtggcctgacgccgcaggctctggtggcgcgtgggcccagcctggcgcactacgtgacggcttgtctttttgtggagcccgtcaagctggagtttgaaaaggtcttcgtctctcttatgatgatctgcaagaaacgttacatcggcaaagtggagggcgcctcgggtctgagcatgaagggcgtggatctggtgcgcaagacggcctgcgagttcgtcaagggcgtcacgcgtgacgtcctctcgctgctctttgaggatcgcgaggtctcggaagcagccgtgcgcctgtcgcgcctctcactcgatgaagttaagaaatacggtgtgccacgcggtttctggcgtatcttgcgccgcctggtgcaggcccgcgacgatctgtacctgcaccgtgtgcgtgttgaggacctggtgctttcgtcggtgctttctaaggacatctcgttgtaccgtcaatctaacctgccgcacattgccgtcattaagcgattggcggcccgttctgaggagctaccctcggtcggggatcgggtcttttacgtcctgacggcgcccggtgtccgggcggcgccgcagggttcctccgacaacggtgattctgtaaccaccggcgtggtttcccggtcggacgcgattgatggcacggacgacgacgctgacggcggcggggtagaggagagcaacaggagaggaggagagccggcaaagaagagggcgcggaaaccaccgtcggccgtgtgcaactacgaggtagccgaagatccgagctacgtgcgcgagcacggcgtgcccattcacgccgacaagtactttgagcaggttctcaaggctgtaaccaacgtgctgtcgcccgtctttcccggcggcgaaaccgcgcgcaaggacaagtttttgcacatggtgctgccgcggcgcttgcacttggagccggcttttctgccgtacagtgtcaaggcgcacgaatgctgttga

SEQ ID NO: 13119 - DNA, 825 bp, unidentified
  source 1..825: mol_type = other DNA
  misc_feature 1..825: note = Synthetic
attatggcagcaaccgttccgcgttttgacgatgtgtacaaaaatgcacaaagaagaattctagatcaagaaacattttttagtagaggtctaagtagaccgttaatgaaaaacacatatctatttgataattacgcgtatggatggataccagaaactgcaatttggagtagtagatacgcaaacctagatgctagtgactattatcccatttcgttgggattacttaaaaagtttgaatttctcatgtctctatataaaggtcctattcccgtatatgaagaaaaagtaaatactgaattcattgctaatggatctttctccggtagatacgtatcatatcttagaaagttttctgcccttccaacaaacgagtttattagttttttattattgacctccatccctatctataatatcttattctggtttaaaaacacacagtttgatattactaaacacacattattcagatacgtctatacagataataccaaacaccttgcgttggctaggtatatacatcaaacaggagactataagcctttgtttagtcgtctcaaagagaattatatatttaccggtcccgttccaataggtatcaaagatatagattaccctaatcttagtagagcaagaagtccatccgattatgagacattagctaatattagtactatattgtactttaccaagtatgatccagtattaatgtttttattgttttacgtacctgggtattcaattactacaaaaattactccagccgtagaatatctaatggataaactgaatctaacaaagagcgacgtacaactgttgtaa

SEQ ID NO: 13120 - DNA, 21 bp, unidentified
  source 1..21: mol_type = other DNA
  misc_feature 1..21: note = Synthetic
atgcacaaagaagaattctag

SEQ ID NO: 13121 - DNA, 24 bp, unidentified
  misc_feature 1..24: note = Synthetic
  source 1..24: mol_type = other DNA
atggctgctccggtgtgggaatga

SEQ ID NO: 13122 - DNA, 93 bp, unidentified; identical to SEQ ID NO: 4889
  source 1..93: mol_type = other DNA
  misc_feature 1..93: note = Synthetic

SEQ ID NO: 13123 - DNA, 93 bp, unidentified; identical to SEQ ID NO: 4889
  misc_feature 1..93: note = Synthetic
  source 1..93: mol_type = other DNA

SEQ ID NO: 13124 - DNA, 93 bp, unidentified; identical to SEQ ID NO: 4889
  source 1..93: mol_type = other DNA
  misc_feature 1..93: note = Synthetic

SEQ ID NO: 13125 - DNA, 741 bp, unidentified; identical to SEQ ID NO: 10352
  misc_feature 1..741: note = Synthetic
  source 1..741: mol_type = other DNA

SEQ ID NO: 13126 - DNA, 195 bp, unidentified
  source 1..195: mol_type = other DNA
  misc_feature 1..195: note = Synthetic
gtgcgccttcccgttccgcactatcgaggaagatctcgtcgtaggagaggcatggcgggtagtggtcgccggcgggctttgcgcaggcgcatgaaaggcggaattttacccgctctgatacccataatcgccgccgccatcggtgccatacccggcgtcgcttcagtggccttgcaagcagctcgtaataaataa

SEQ ID NO: 13127 - DNA, 39 bp, unidentified; identical to SEQ ID NO: 4899
  misc_feature 1..39: note = Synthetic
  source 1..39: mol_type = other DNA

SEQ ID NO: 13128 - DNA, 1413 bp, unidentified
  source 1..1413: mol_type = other DNA
  misc_feature 1..1413: note = Synthetic
atgaacggcgcgcagttcgagctgctgcgcgagtacctgggcaggccgcccacgctcaaccagtacttcatcttcaagccgcaggcgcgcgccatccagcgcatcatgcgcttcgataccgacgttttctttgcgctcatcaagaagaacaagaagcgcttctttgcgcgcatcggcggcagcgccagcgagatcaacgcgcgcgtgctgtcctacttcgtcaagcagcgcgccaccaccaaggtggggcgcatcctctccatcatcgagctgcagagcgtgctggtcaacagctacaccgagatcatgggcgtgctcacgctgcccgcgccgcccgtgtacaactcggtggtgcgcctgcactactgctccatggagcgccttgccgaggaggtgctctggtcctacaacgtggccttccgcagcggcaaggtcatgggccgccactgcgtgtccaacctggtggtgcacgtgaacaagctcatgagcgagtacctgcgccgccacaaccgcacggccatctgctacggctcctactcgctgcaccttctcaacagccgcatcgagtacggcgacatcgacatcctgcagaccaacgcgcgcctgtttctgatcaacctggctttcctcatctacttcatcaccggcaggaacgtgctcctgctcaaggtaccctacctcaagagctacatcgtcatgcaggacgaagagggccgccacatcatcgacagtttcaacatccgccagggcaccatgcaaaacgtgcccaaggtgctggtggacaacatctacatcatcgaccccgtggtgcagctcatgaatacgctcaagatgctctcgcaaatcgaccgcctggaggacctgggcgagcgcatggccaagatgcgcctgcgcctggccacgctactcgaatacgcgcgctaccaccactgcgtgtccttcggcggcggcgcgcgcttgcgcctgcacatgcggctggacgcgggcgcgcgcatcgtgctggtggacacgcgctgctacgggctgggctaccgcgagtgccgctgctacctggacgaggcgcgcctcctgcaggacatctccaagctcaacgccgacgccgccgtggtcgacttcgaggccgtctccaactccgtcttcttaattcaccagggcatcatgtacacgtatttttctaatacggtcctgctgcggagcgaggacgccatccacgacgtctccgagcgcgccgtctgtgcgcacatcacgctctaccacctgctggtgggctgcaactaccaggagctgctggccgacctgctcaactcgctcgtgtcgcgcgagaagtgcccggtggtaggcgttgtggcgcgcgacaagaaggtgggccgtcacggcgtgatcgatatcgagaaagacgtgatcacacactga

SEQ ID NO: 13129 - DNA, 426 bp, unidentified
  source 1..426: mol_type = other DNA
  misc_feature 1..426: note = Synthetic
atggacccgctctcggtcttcttcctcgtggtcgccgcggccgccgtgtgcacattgctgctgcaggcgtatgccgtctacgagaatttcgacagcatcctggagtttaatgacgcgcacgccagcctggagtactcgaagtcgttaggcggctcctacatcgacaagcacgtctttgaccccaacgatggcgtggcggatgtcacgcagaagtggcgctgtgcgttgtatggcaaggtctacgtgtccgcatccgccttcggtttctatgcccagcctgacggcagcaagcgcaccttttccacgcgggatgactgtgtcgacttcaccttcggaactgcggatacttcgcgcgtcgtgaacccgtgtacggatccaaacggtgcccaggcagaagactgcgcgttcttaaaatccgtactataa

SEQ ID NO: 13130 - DNA, 39 bp, unidentified
  source 1..39: mol_type = other DNA
  misc_feature 1..39: note = Synthetic
atgacgcgcacgccagcctggagtactcgaagtcgttag

SEQ ID NO: 13131 - DNA, 426 bp, unidentified
  misc_feature 1..426: note = Synthetic
  source 1..426: mol_type = other DNA
acgctcgccaggaccccggggggcgaagttgccatggctgggcgggaggggcgcacgcgccagcgaactttacgggacacaatccccgactgcgcgctgcggtcccagaccctggagagtctagacgcgcgctacgtctcgcgagacggcgcgcatgacgcggccgtctggttcgaggatatgacccccgccgagctggaggttgtcttcccgactacggacgccaagctgaactacctgtcgcggacgcagcggctggcctccctcctgacgtacgccgggcctataaaagcgcccgacgacgccgccgccccgcagaccccggacaccgcgtgtgtgcacggcgagctgctcgcccgcaagcgggaaagattcgcggcggtcattaaccggttcctggacctgcaccagattctgcggggctga

SEQ ID NO: 13132 - DNA, 117 bp, unidentified
  misc_feature 1..117: note = Synthetic
  source 1..117: mol_type = other DNA
atgcaagtgcttttttctcgatgcgtgtccgctctgtgcacgtctgtagaaacaatgtggcctctcttcagcctgtacccgtgcagctcgttggctcgtcagcacgcttcttcctga

SEQ ID NO: 13133 - DNA, 123 bp, unidentified; identical to SEQ ID NO: 4906
  source 1..123: mol_type = other DNA
  misc_feature 1..123: note = Synthetic

SEQ ID NO: 13134 - DNA, 51 bp, unidentified; identical to SEQ ID NO: 4907
  misc_feature 1..51: note = Synthetic
  source 1..51: mol_type = other DNA

SEQ ID NO: 13135 - DNA, 1314 bp, unidentified
  misc_feature 1..1314: note = Synthetic
  source 1..1314: mol_type = other DNA
gtgaccatgttccagcgcgtgcccgacctcgaggtggacgccgtgctagagctgggagacttctgcatccaggatacgcgcggcgcgccgcgcgagagcgctcactacgtggcacgccaccgacgcctcttcgtcaaccgcagcaaggacgacgagcgcaagctggcgcttggcttcttcctgccgcgcctgcccttccttaccggcagggagatccaccacctcttccagtgcgtggacacggtcaagcacgtgcacattaccaagaagaacaacgtcatcgtcgcgccctacgtcatcctcattaccatggctgcgcgcgggtaccggctcacggagacgctgctggagatgttcttcccagagctgcacaaggagagcagcaagaagttccgcttcgcgacgcaaatccagatcatccaggagaagctgggctacgcgcccggcggctactatgtgtacgagttcgagtgctactacgccacggtggggctgctgctgcagagctaccacggcgagcgcgaccccggagagctcttcgacgcgcgccgcgttagctcgcttgtcaaggcactggccgagatcacgtaccgcctctactgcatacacctgcgctcgcagtctgtgcagtggagcattagcgccagcacgctcatcaaccagattgtcaacaccgttctgctcacgctgcagactctgcaggcgcgcgcgctcgcgtgcggcgaggtactgacgtgcaccctggcgcgagactcggggttcccctcgcagcagttcgcgcactacgcagacgcgctcgcgctgttggtcgccgacatgcgccgcgtgcaaagctgcaaagcgaacaggcacgaccagcaggtgctactgagcttctgtcgcgtgggcggcagagagccggcgctcgcaccagaggcgcgcgccgcgcctgtgtccgtctccgcgtccatgttcgcagcgcgcgacttgcgcgcgcgccagcgcacgcgtacgcgcgcccgtgcgcagcgtgcgcgcctcgcagacgcaaacgtgccgccagcgggaagaccaggagcggctctcccggcaggaacacctggcgtgcttgctagcccgagcgcgcttgccccgcgagacggcgcgccgagggccccgacttggcaaggacaacgaacggcggcagtggcacgagcggacgaacctccagcaatcgcgctgccggtgcttgcgccgccggcaagcgagcatccgcaaacattgcccgcgctcgcggccccgaacacgctgtcagggaaggaggcctgcaagtgccgcgcaaaacgcagagcttag

SEQ ID NO: 13136 - DNA, 24 bp, unidentified
  misc_feature 1..24: note = Synthetic
  source 1..24: mol_type = other DNA
ataatacaaacagctagtatataa

SEQ ID NO: 13137 - DNA, 222 bp, unidentified
  source 1..222: mol_type = other DNA
  misc_feature 1..222: note = Synthetic
atcatctctgtcatggttttttgcagtaccatttttgccctagccatatatccataccttgacattggctggaatgccatagatgccatgaaccaccctactttcccagtgcccgctgtcataccactgcaacaggttattgccccaatcaatcagcctcgccccccttctcccacccccactgagattagctactttaatttgacaggtggagatgactga

SEQ ID NO: 13138 - DNA, 588 bp, unidentified
  source 1..588: mol_type = other DNA
  misc_feature 1..588: note = Synthetic
atcctaaaaaaacgcacgccccgtaaatacgccacaatggcctgcgagtgcgcgtctctgatcctcgagcttctcagaaaatccgacgacaagctgccggccaagcagatcgcgaaggagctcggcatatctaaacacgaggcgaaccgccagctgtaccgcatgctggaattggacgacgtttgctgcgaggacggaaacccgccccgctggtttgtagagtgcgcgccctccgcgcccaccgaggaggacgaaaactccgacaccgagcccatggagactgaggctgggtgcgatacgctcttcggcggcgacatcgacatcatgactcagtctgccgtgatgcgcctcaaaagtcttaacccggtcagtgcggtcaacgagttctgcatgatgacacacagatctctggagttctgcgagacgcgttctggcggcaaggatcactgtccgctcttcacctgcaccatcacgatatccggaaaggtcgttgccgcggccgacggggccagcaagaaactggcgcgccacaccgcctgcgccagcgcacttaccatcctcatcaacaactgcggcatcagcttctaa

SEQ ID NO: 13139 - DNA, 2085 bp, unidentified
  source 1..2085: mol_type = other DNA
  misc_feature 1..2085: note = Synthetic
atgtccggtttcctcgcaatggacgacaaactgtacacggacttgaaaaaactcgtgggcgcacagccactgtatttgttcacggcgcgcggcgatttcgtggaagtcgcgcgccgctcagagttccgcttccgcgtacccgcgggctttttcgcaggcgagggcgtggcgctgcgcgggcagcagtttcccgctggcagcgcgcgcatgccggacgctgcgcatctgcggctgccgcgcctgtaccccgctcagcagcaggtagtcgcggagctgcgcgccattgccaaggcgtgcgcgcgcgagcagcgcccgctgtacgtaacgctgcacctggcctgcggcttcggcaagaccgtgactgccagctacctgctgggcacgcaccggcggcgcgccgtggtctgcgtgcccaccaaaatgctgctggcacagtggggcgcggtgctggccgcactgcgcgtcagcgtgtacgtgtccggcgagggcgtgcgcaagctcatgtccgtgctgcgcacgcgcgactttagcgtgctggtggtggtgaacaagcactttgccgacccgggcttctgcgcgctggtgcacgagcgctacgacgtcttcgtgctcgacgagtcgcacacgtataacctcatgaacctcacgctcatgacgcgcttcctgagtttcttcccgccgcgtatctgctacttcctcagcgccacgccgcgcgccgcgaaccgtgtctattgcaaccgcgtggtcaacgtgaccaagttctcggcgctgcgcaagactgtgcgcgtgctgagcaccttcttcccgcccttcagcaacgcgcgcatccgtgagttcgtgcagcgcctggacagcgtgcacaacaagtaccacatctacaccgagaaggctctggccgaggacgcgccgcgcaacgccagcatcgtagcggttaccgccgccgccttcgagcaccgagacgctcatcgcgtgctgctcattaccaagctgcgctcgcacatgctgggcatgcacgcggcgctgagcgcgcgcctgggcgcgcagcacgtcttcctgggagacgcacaaagcaggcacacacccgagatcgtgtgcgagctgcgcgcgagcgagcgcttcgtcttcgtgtccacgctcttctactcgggcacagggctggatattccgcacctggacacgctcgtggtttgccacgccgtcatgaaccacatgcaggcggagcagctgctgggacgcatttgccgcgaaaccgagcagccgcgccgcactgtctacgttttccctaccacctcggtgcgcgagatcaagaacatggtggggctcttcgcacagcgcttcattacgctggcaacgcagaagctaggcttcacgcaggagcgcgagcaacctgaggacgcggcagtgcctgcatccgcggacaggcccgcgtccgcggacaagcgtgcgcccgcggacaggcccgcgcccgcggacaggcccgcgtccgcggacaagcgtgcgcccgcggacaggcccgcgtccgcggacaagcgtgcgcccgcggacaggcccgcgtccgcggacaagcgtgcgcccgcggacaggcccgcgtccgcggacaagcgtgcgcccgcggacaggcccgcgtccgcggacaggaccgcgcatgcgtactggcgcgcgaacggcccctgttgctcgaacagatttgcgtccgcagacaacaagaagccagcgctctcaatctcgcgggcatcaggaggagacaacgcagtcgagctcgggcacaaacccgggcccgggcccggaacgcacgcctccttgaggtccgtgcgcaagcacgggcgctcgctagcgtgcgaactcgctcaggggacacagtgccgatccgcacgccgcgcagtgcaacgtgtcgggcccgggcgtggccatgcgcagcgggctggcttgcagcttgctcacatcggagaagaatgcgaggcgcgactggcacacggagcacgtggtgcacgagtccgcgggcggctcctccacggtggtacgcggcttgcgcttgcgccgccgttgcttggctccggacacgtccatttagatgcggagaaatag

SEQ ID NO: 13140 - DNA, 888 bp, unidentified
  misc_feature 1..888: note = Synthetic
  source 1..888: mol_type = other DNA
atgacttccgtcaatgcaacggaagatgcgtgcactaaatcctacagcgccttcctcagcggcatgacaagcctgctgctcgtcctgctgattctgctaacactggctggcatcttgtttatcatctttgtaagaaaattggttcaccgaatggatgtctggctgatagctcttctcatagaactgctgctctgggtgctgggaaaaatgattcaggagttctcgtctaccggtctctgccttttgacccagaacatgatgttcttgggcctgatgtgctccgtatggactcacttgggtatggcgttggagaagaccctagcattgttcagccgaacgcccaagagaacctcccacagaaatgtgtgcctgtacctgatgggcgtgttttgtctggtactcctgctgattatcatcctcctcattaccatgggccccgacgccaatctcaacagaggccccaacatgtgcagggaaggccccaccaaaggcatgcacacggccgtccaaggactgaaagccggctgctacctactggcggcagtcctgatcgtcctcctcacagttatcatcatctggaaacttttgcgcacaaaattcggaaggaagccgcgcctgatatgcaacgtcaccttcaccggactcatttgcgccttctcctggtttatgctgtccctgccgctgctcttcctgggtgaggccgggagcctggggtttgattgcacagagtctctcgttgcccgctactacccaggccccgccgcctgtttggccctgttgctcattatactatacgcctggagcttcagccattttatggactctctcaagaaccaggtgacagtcaccgccagatacttcagaagggtgcctagccagtccacctga

SEQ ID NO: 13141 - DNA, 888 bp, unidentified; identical to SEQ ID NO: 13140
  source 1..888: mol_type = other DNA
  misc_feature 1..888: note = Synthetic

SEQ ID NO: 13142 - DNA, 939 bp, unidentified
  source 1..939: mol_type = other DNA
  misc_feature 1..939: note = Synthetic
atgctctccaccatggcccccgggtccactgtggggaccctggtggccaacatgacttccgtcaatgcaacggaagatgcgtgcactaaatcctacagcgccttcctcagcggcatgacaagcctgctgctcgtcctgctgattctgctaacactggctggcatcttgtttatcatctttgtaagaaaattggttcaccgaatggatgtctggctgatagctcttctcatagaactgctgctctgggtgctgggaaaaatgattcaggagttctcgtctaccggtctctgccttttgacccagaacatgatgttcttgggcctgatgtgctccgtatggactcacttgggtatggcgttggagaagaccctagcattgttcagccgaacgcccaagcgaacctcccacagaaatgtgtgcctgtacctgatgggcgtgttttgtctggtactcctgctgattatcatcctcctcattaccatgggccccgacgccaatctcaacagaggccccaacatgtgcagggaaggccccaccaaaggcatgcacacggccgtccaaggactgaaagccggctgctacctactggcggcagtcctgatcgtcctcctcacagtcatcatcatctggaaacttttgcgcacaaaattcggaaggaagccgcgcctgatatgcaacgtcaccttcaccggactcatctgcgccttctcctggtttatgctgtccctgccgctgctcttcctgggtgaggccgggagcctggggtttgattgcacagagtctctcgttgcccgctactacccaggccccgccgcctgtctggccctgttgctcattatactatacgcctggagcttcagccattttatggactctctcaagaaccaggtgacagtcaccgccagatacttcagaagggtgcctagccagtccacctga

SEQ ID NO: 13143 - DNA, 57 bp, unidentified; identical to SEQ ID NO: 4913
  misc_feature 1..57: note = Synthetic
  source 1..57: mol_type = other DNA

SEQ ID NO: 13144 - DNA, 531 bp, unidentified
  source 1..531: mol_type = other DNA
  misc_feature 1..531: note = Synthetic
atggggaagatcaccctagtgtgcggtgtgctggtgacggtggtgctttcgattctgggagggggaagcgcggctgtagtgacggagaagaaggccgatccctgcttgactttcaaccccgataaatgccggctgagttttcagcccgatggcaatcggtgcgcggtgttgatcaagtgcggatgggaatgcgagagcgtgttggtccagtataaaaacaagacctggaacaatactctcgcgtccacatggcagcccggggaccccgagtggtacaccgtctctgtccctggtgctgacggctccctccgcacggtgaacaacactttcatttttgagcacatgtgcgagaccgccatgttcatgagcaagcagtacggtatgtggcccccacgtaaagagaatatcgtggtcttctccatcgcttacagcgcgtgcacggtgctaatcaccgcgatcgtgtgcctgagcattcacatgctcatcgctattcgccccagaaataatgccgagaaagagaaacagccataa

SEQ ID NO: 13145 - DNA, 81 bp, unidentified; identical to SEQ ID NO: 4924
  source 1..81: mol_type = other DNA
  misc_feature 1..81: note = Synthetic

SEQ ID NO: 13146 - DNA, 894 bp, unidentified
  misc_feature 1..894: note = Synthetic
  source 1..894: mol_type = other DNA
atgagcaaaatctttgtaaatcctagtgcaattcgtgcaggactggcagaccttgagatggctgaagagacagttgatttgatcaacaggaatcttgaggacaaccaggctcatcttcaaggagagcccatcgaagtggatgctcttccagaggatatgagaaggctccagataagtgaacatgcaccttgtcacccgtcagagggtgcctgcaagaaagaagaagggagcgacgatgacttctacatggcggagagtgaggacccatatgtacctcttcagtcctatctagacagtgtgggaattcagatcgtgaggcagatgaagactggggagagattcttcaaaatctggtcccagaccgtagaagagatcatatcatatgtgactgtcaactttcctctgccatctggaagaccaactgaggacaaatctacccagactgtaggggagaagcctaggtcaaatgtccagcagggatctgccaagaaagaggatcacctgtctaaggccaaaatgacctcccaagaagcatctgggcctccggcgctcgagtggtccactaccaacgatgaagatgatgcatcaatagaagcagagatagcccatcagattgcagaaagtttctcgaagaaatataaattcccttctagatcttctgggatatttctatataactttgagcaactgaagatgaatctggatgacatcgtgggagaggccaaaaagatcccaggtgtgaccagactggctcaagatggtcttaagctcccactcaggtgtatattaggaggggtggcctcaacccattcaaagaagttccaactcctggttggttccgataagctgggcaaaatcatgcaggacgatctcaacagatatctggcttattaa

SEQ ID NO: 13147 - DNA, 93 bp, unidentified; identical to SEQ ID NO: 4928
  source 1..93: mol_type = other DNA
  misc_feature 1..93: note = Synthetic

SEQ ID NO: 13148 - DNA, 63 bp, unidentified; identical to SEQ ID NO: 4929
  misc_feature 1..63: note = Synthetic
  source 1..63: mol_type = other DNA

SEQ ID NO: 13149 - DNA, 63 bp, unidentified; identical to SEQ ID NO: 4929
  source 1..63: mol_type = other DNA
  misc_feature 1..63: note = Synthetic

SEQ ID NO: 13150 - DNA, 150 bp, unidentified; identical to SEQ ID NO: 4930
  misc_feature 1..150: note = Synthetic
  source 1..150: mol_type = other DNA

SEQ ID NO: 13151 - DNA, 663 bp, unidentified
  source 1..663: mol_type = other DNA
  misc_feature 1..663: note = Synthetic
atgaacctggccattgctctggactctcctcacccaggcctcgcgtcttatactattctgccacgcccattttatcatataagcctgaagcccgtgagctggcctgacgagaccatgaggccagccaagtctacagattctgtgtttgtgaggaccccggtcgaggcgtgggtcgcgccctcgccgccggacgacaaggtggctgagtccagctacctcatgttcagggccatgtacgcggtgttcacccgggatgagaaagacctgcctttgccagccctggtcctctgccggctcatcaaggcctccctgaggaaggataggaagctgtacgcggagctggcctgcaggacagccgacatcgggggcaaagacacgcacgtacggctcatcatcagcgtcctgcgcgcagtgtacaacgaccactacgactactggtcgcggctcagggtggtgctgtgctacacagtggtgtttgcggtgcgaaactacctggatgaccacaagagcgccgccttcgtgctgggggcaatcgcccactacctggccctctatcgcagactctggtttgcgaggctgggcggcatgccaagatcgctgagacgtcagttccccgtgacgtgggccctggccagcctgactgacttcctgaaatctttgtaa

SEQ ID NO: 13152 - DNA, 663 bp, unidentified; identical to SEQ ID NO: 13151
  misc_feature 1..663: note = Synthetic
  source 1..663: mol_type = other DNA

SEQ ID NO: 13153 - DNA, 408 bp, unidentified
  source 1..408: mol_type = other DNA
  misc_feature 1..408: note = Synthetic
atgacacatctgggtggcaaggtgaggtcttctgggtttttaataccggggtcggcaccagtttctgggacaccgccacaaggacaaggtgggctagcaagttctcgagtctacgaagactccgggggcagtcttttgagtttctcgcctatgatccaccccaatctcgcccccctaattgcgccatctgcctacgcgaggctgaacctcctgaatcactgcatctttcttgaggcgtttaaagaagagaatagtggccagggcctcggtggggtccagcgtgaggtcttatttttgaaaagggatattataaaacaggtcattgctcggattgtggcagccgatagcaccctagatctagtgaatcatggcgagcccggaagagaggctcctagacgagctcaataa

SEQ ID NO: 13154 - DNA, 408 bp, unidentified; identical to SEQ ID NO: 13153
  source 1..408: mol_type = other DNA
  misc_feature 1..408: note = Synthetic

SEQ ID NO: 13155 - DNA, 63 bp, unidentified; identical to SEQ ID NO: 4942
  misc_feature 1..63: note = Synthetic
  source 1..63: mol_type = other DNA

SEQ ID NO: 13156 - DNA, 21 bp, unidentified
  source 1..21: mol_type = other DNA
  misc_feature 1..21: note = Synthetic
atgtcccggatgtgttactaa

SEQ ID NO: 13157 - DNA, 21 bp, unidentified
  source 1..21: mol_type = other DNA
  misc_feature 1..21: note = Synthetic
atgtcccggatgtgttactaa

SEQ ID NO: 13158 - DNA, 297 bp, unidentified
  misc_feature 1..297: note = Synthetic
  source 1..297: mol_type = other DNA
atgcgaccgggtagaccactggctggattctacgctactctccgccgttccttcagaagaatgtccaaaaggtcaaagaacaaggccaagaaggagcgtgtccccgtggaggaccgcccaccgactccgatgcccaccagccagcgactgatccgcagaaacgcgttgggaggaggcgtccgccccgatgcggaggactgcatccaacgcttccaccccctggagccagcgctgggggtgtcaacaaagaactttgacctgttgtccctgagatgtgaattgggatggtgtggataa

SEQ ID NO: 13159 - DNA, 297 bp, unidentified
  misc_feature 1..297: note = Synthetic
  source 1..297: mol_type = other DNA
atgcgaccgggtagaccactggctggattctacgctactctccgccgttccttcagaagaatgtccaaaaggtcaaagaacaaggccaagaaggagcgtgtccccgtggaggaccgcccaccgactccgatgcccaccagccagcgactgatccgcagaaacgcgttgggaggaggcgtccgccccgatgcggaggactgcatccaacgctgccaccccctggagccagcgctgggggtgtcaacaaagaactttgacctgttgtccctgagatgtgaattgggatggtgtggataa

SEQ ID NO: 13160 - DNA, 297 bp, unidentified; identical to SEQ ID NO: 13159
  source 1..297: mol_type = other DNA
  misc_feature 1..297: note = Synthetic

SEQ ID NO: 13161 - DNA, 45 bp, unidentified; identical to SEQ ID NO: 4947
  misc_feature 1..45: note = Synthetic
  source 1..45: mol_type = other DNA

SEQ ID NO: 13162 - DNA, 2676 bp, unidentified
  source 1..2676: mol_type = other DNA
  misc_feature 1..2676: note = Synthetic
atgatgcctattaagtcaatagttactcttgatcaattagaggactctgaatatttatttcgtatagtttctaccgttcttccgcatctatgtctagattacaaagtatgtgaccaacttaaaacaaccttcgttcatccgttcgatatattgcttaataactcattaggatccgtaactaaacaagatgagcttcaggctgctatatccaaattgggcattaattatttaattgataccacgtcacgtgaattaaaactgtttaatgttacacttaacgctggaaatatagatattattaataccccaattaacattagttcggaaactaatcctatcattaatactcacagcttttacgatcttccacctttcactcaacaccttcttaatattagattgacggatacagaatacagagctagatttatcggtggttatattaaaccagatggctccgactcaatggatgttctagcagaaaagaaatatccagatcttaactttgataacacttatttgtttaacatcctctataaggatgttattaatgcaccaataaaagaattcaaggcaaaaattgttaacggtgtattaagcagacaagattttgataatcttataggtgttagacaatatataacaatacaagatcgaccccgctttgacgacgcttataacatcgcagatgctgctagacattatggagttaatcttaatacattgccattaccaaacgtcgatctcactactatgccaacatataaacatctcatcatgtttgaacagtacttcatttatacatatgacagagtggatatttattacaatggtaacaaaatgctcttcgatgatgagattataaactttactatttctatgcgatatcaatctcttattcctagactggtagatttctttccagatataccagtaaacaataacatcgtacttcatactcgcgatcctcaaaatgctgcagtgaatgtaaccgtggcgcttccaaacgtgcaatttgtggacataaatagaaacaacaaattctttattaatttctttaacctgttggcgaaggaacaaagatctacggctatcaaagttaccaaatccatgttttgggacggtatggattacgaggaatacaagtctaaaaaccttcaggacatgatgtttataaattctacctgttatgtattcggtctttataatcacaataatactacttattgctctatcctttctgatattatctccgcagagaaaacacctattagagtatgtttgttacccagagtagtcggaggtaagactgttactaatcttatttcagaaactttgaagagtatttcatctatgactatacgagagtttcccaggaaagataaatctatcatgcatataggactttctgagacgggattcatgagattcttccaactactcaggctcatggctgataaacctcatgaaacggctattaaagaggttgttatggcttatgtgggtataaagttgggtgacaaaggtagtccgtactatattagaaaggagtcataccaagactttatctatctgctattcgcatcaatgggctttaaggtgactactagaagatccattatgggaagcaataatatctctatcatcagtattagaccaagagtaactaaacaatacatcgtcgctacattgatgaaaactagttgtagtaaaaacgaggcagaaaaattgattacttcagcgtttgatcttctcaatttcatggtatcagttagtgactttagagattatcagagttacagacagtatagaaactattgtcctagatatttctatgcaggatctcccgaaggagaggaaaccattatctgtgactcggaaccgataagtatcttggatagaattgatactcgtggtatcttttctgcgtatactattaatgaaatgatggacactgatatcttttctccagagaataaggcatttaagaataatctgagtagatttatcgagagtggagatattacaggagaagatattttctgcgcaatgccatacaacatcttagataggattattacaaatgctggtacgtgtaccgtatccataggtgatatgttggataacattacaacccagtcagactgtaatatgactaacgaaatcacagatatgataaacgcctcattgaagaatacaatttctaaagataataatatgctagtcagccaagcgttgaactctgtagctaatcgttctaaacaaaagattggagacttgaggcaatcatcgtgtaagatggcattgttgtttaaaaatcttgctacatccatctacacaatagaacgtattttcaatgctaaagtaggcgatgatgttaaggcatcgatgttggagaagtataaagtattcacagatatttccatgtcattgtataaagacttgatagctatggagaatctcaaagcgatgctatacattattcgacgaagcggatgcagaatagacgatgcacaaattactactgacgatctagtcaagtcttactcattgatccgtcctaaaattctaagtatgataaactattataatgaaatgagtagaggatactttgaacacatgaaaaaaaatctaaatatgacagatggtgactctgtctcttttgatgatgaataa

SEQ ID NO: 13163 - DNA, 57 bp, unidentified; identical to SEQ ID NO: 4950
  misc_feature 1..57: note = Synthetic
  source 1..57: mol_type = other DNA

SEQ ID NO: 13164 - DNA, 4308 bp, unidentified
  misc_feature 1..4308: note = Synthetic
  source 1..4308: mol_type = other DNA
ataactttctcaaaaatgttgttgcttataatagtcctaggaattgcagacgcagtgcctttagataataggtgcttcacagatggagtcatttccatgtctaaagacatggaccatggcatagctgagatttgcattaaggacgatataagtattgtgaaaactacctcacagcagtacaaaaattccagcatatatttaaatactgtccaacggaaaatgcttgtctcgaattatgaagactgcaatccggttgaggcaaaaaatggccctattatgatctttaggcccaataatgatatgatgctaataccgcatacatttgcgtgtagagtacaatgcaccatatctcttgatgaagaagaagcaaatattatacttcactcagaaaagttgaatcattatgaagttatgggtactactactgcaaacagatggtttcaagggacaacgtcttattctctagagcacacatgtgaacacatccaagttacttgtggatcaacttccctgagcttccatgcttgcttcaaataccatatggcttgcattcggcttctgaacaaaagttacatgcctgcatttatgatacattcagtatgtcaaaataaagaattaattattatgggttgtttagttttaataatctttggaatcttatatatcatgactatgacttatatttgttatatattaatacctatcttctacccgattacatacctctatgggtttatttacaacaaatcatgcaaaaaatgctattattgtggtttggcatatcacccattaaccaaatgtggaacaaattgtgtttgtggatgcatgtttgaaaattctgagcgaatgaaaaaacatagagaatctggtatgtgcaagggatacaaatcattacgggctgcacgcattttatgtaaaaacagaggatcctcatttatactagctattatattatcatttttactactatccttcatacagccaatagaaggagtcaagataacttaccaaaatgaaataatagaattggaatcaattgtgcatgagctggaaataattactacaaaattgcattactctgctgtttatcctcaaatagtggctgctgggtcctgcttgatcctgataattcttgcattgacaatgctattgaaggaaaagatactagattatttttattctagaatagtatattattgcaatgaatgtgaaatgacccacccatggagaggacttacatttttcggcgacttcacaaataggtgcaacacatgtatgtgtgggtgcgaccaaaatatagaagcaaaagacgaagatgattacgccttgcctaaataccacaaacctggagtatattgcaaattgcctggtagatattttgcagtcagaaaactggatatcttaagcacaagattcttgatagttgttttcttagtattaatttcctcatcgatagtctatgcaacagatacatgctcaaaggtgaaagacaatacagcaatatccaacccgcttcagtgctctgtttggtatagattgcctggcacatgtgataacacattaactatgaaagattttatgaaaactatcaaattgcctcaagaagacatatctgcagctgaaaaaatgtcagcaaacctggaggcaatgttacttgagtctgagaaatttaagactgctattgggtcattcttaatagaaagtagtgccttaaaattgcactgtaatgaactaagcgaggcaaagaaaaaaacaggcaggcagaacgagatcctagggaaagcgttaaagaaatctgctattgaagtttgtgcaagtggggacttagctgatctgtgcaaatgcttcaggaatgaaccaaattgcaatgcaaatggagacactgctaaagcaataacatattataagggtcataaccaagcattcagggatgacgtttctaaaattatcactgcaattatgcgcatatatccaggcattttggctcgtgaatttggactgtcacttaaggcagacaatttttcaaaggtaaaagagatagcaacaaacatgaaaggtaaatttggcaatgcagaatcaattacagcctgtatgaattatttggaaaaaatgttggcagaaaatgagcttgttaagttgaaccccaagattagcttatccaaagatgttgtaccatatagtcaaacaaggaccaatatctttgataatatggctgatgcacctacaatcaccaaggtatgcgaatctcccaaaatatacaagtgctcttacttgatagcatctaggtttagattttttataacttgtggcacatccactactcatttctacaacatgccagatctaggcttatcttaccagataggctccagcgataagctttgcgttgccgatcctttttgtgaacaaaatttcggcccagtaaacatctcagaaaaagatgaacttgcaactttaacatgtacacagaaaacgaatactaattttaattttgcaaaaatgaacccgcttactaaatgccacaaaatttctgctcaaacatgtgaatataaacaaaaaaataccacatttatagagtgcaaaaacacttacttttatgaatataccacaatacatcagtcaccaggtgatgacatcggaatatattgttttagtcctgactgtagaaaggtctcaacacctcaccatgttgccaatctcataggttgcagacttcatgcagagtctgtagagagcaggaaactaaaggagattatttatgaaaatattgaacaattaaagcatagtatacaagaaacaataaaaacagacttaatagaacataaataccggttgaccatgaatctccctaaggttaatccgtcatttaaagcgttatcaattatggggactgagacagatggcggtgttgagagtgcgtatattgaaacaaatatcttagctaaaacaggggtgtctacaggtgttactctacatacgaaaaagggtgaaaagttatttgacatgatcctttttgtaaaatctgctcattatgagtctgtgtcagatctcatatatgaaacaggaccaactgtaggcatcaatatgcaacatgatgaacagtgtacaggcacgtgccctaatgatttaaaaaagccaggttggttatcattttcgaaagagcacactagcacctggggatgtgaagagtttggatgcttagcaataggaagtggctgtctttatggacactgcagagatattgtgaaacctgaaatatcagtttataaaagatctagcgaagaaataccaaaaatatcgttgtgtatatcaacacctgatgaaacatattgccatgatattgatagctttaaccccattataacagaaaaattagaaattcaatttttatctaatgaggctggaaaatcacctaaaatatttgggtataaatcaaataaggttttaacaggtatgatcaatgataaaggttcgtttgctaaaatgtgtggcagtgttcagatatatggtaaagaagtctggggggctggtaatcccaaatttgattatatatgtcatgctgcaagaaggaaggatgtaacaatatcaagatgctttgacaacttctatgaaggttgtcagttgctgaagcctgaaaaagatctaatatttgatgataaaacatcaaagttgctactgttaaacaaacttatgggagaaatcaggataaaattaaaactgggcgacatcaaatacaaaatttttgaaaagaatccatcaatggatgctaaagcagtatgtgtcggatgcattgcatgcaccaaaggattggattgcgaattagatataataagcagcagtgacactatatgtcccttgaaatccaactgccaattatatactaacaatttaaaaattgaatctaacacccaaaaatatggcattaaggcaaaatgcgatagcccatcaatatcatttacaatttgcacaaaggaaatagatgctcaaattacaattctagaaaagaaggaaataatagaggtcggcaatagcgaccagacctattttgtaaaagagaaggacatgaaatgtgggacgtggctgtgtaaagtcagtgagcaaggtatatcttctatattttctcctttcttaagtatttttggctcttatgccaaaatagcattttacacaatcctagcagtgatatgcattgttattattggttacttattatttcctgtatgtgtcaggttcaaagatgtcttgaagaaaaatgagatagaatacgagagagagatgtatgggtataaacctttaaaaagatattga

SEQ ID NO: 13165 - DNA, 15 bp, unidentified
  misc_feature 1..15: note = Synthetic
  source 1..15: mol_type = other DNA
attctggttcgctag

SEQ ID NO: 13166 - DNA, 240 bp, unidentified
  source 1..240: mol_type = other DNA
  misc_feature 1..240: note = Synthetic
atggacatgatcgcgctggagaacctgaaggcgctgctgctgatcgtgcgccgcagcggccggtacgtgggcgacgcggagatcggcgttgcggagatgcagaaggcctacgagctggtgcgagaaaaaatatcgcggctgacggcgtactactcgagcatcggcgagatgtactggaacaacatgaagcgcaacctcaacctccggtcggatggcgccgtttcttttgacagtgagtaa

SEQ ID NO: 13167 - DNA, 36 bp, unidentified; identical to SEQ ID NO: 1478
  source 1..36: mol_type = other DNA
  misc_feature 1..36: note = Synthetic

SEQ ID NO: 13168 - DNA, 42 bp, unidentified; identical to SEQ ID NO: 4954
  misc_feature 1..42: note = Synthetic
  source 1..42: mol_type = other DNA

SEQ ID NO: 13169 - DNA, 120 bp, unidentified
  misc_feature 1..120: note = Synthetic
  source 1..120: mol_type = other DNA
atggctgtatctttcataatgctacacattgtcaaatttgtcacgctgttcctccatgggaaaaggaaaatgtgtcagattttaatgattttgatgactgtaataaagagcagtaaataa

SEQ ID NO: 13170 - DNA, 2676 bp, unidentified
  misc_feature 1..2676: note = Synthetic
  source 1..2676: mol_type = other DNA
atgatgcctattaagtcaatagttactcttgatcaattagaggactctgaatatctatttcgtatagtttctaccgttcttccacatctatgtctagattacaaagtatgtgatcaacttaaaacaaccttcgttcatccgttcgatgtatttcttaataactcattaggatccgtaactaaacaagatgagcttcaggctactatatccaaattgggcattaattatttaattgataccacgtcacgtgaattaaaactgtttaatgttacacttaacgctggaaatatagatattattaatcatccaattaacattagttcggaaactaaccctattattaatactcacagcttttacgatcttccacctttcactcaacaccttcttaatattagattgacggatacagaatacagagctagatttatcggtggttatattaaaccagatggctccgactcaatggatgttctagcagaaaagaaatacccagatcttaactttgataatacttatttgtttaacatcctctataaggatgttattaatgcaccaataaaagaattcaaggcaaaaattgttaacggtgtattaagcagacaagattttgataatcttataggtgttagacaatatataacagcacaagatcaaccccgctttgacatcacttataacatcacagatgctgctagacattatggagttaatcttaatacattgccattaccaaacgtcgatctcactactatgccaacatataaacatctcatcatgtatgaacagtactttgtcaatgattatgatagagtaccaatttattacaatggtaacagagtaatctacaatgatgagattataaactttactatttctatgcgatatcaatctcttattcctagactggtagatttctttccagatataccagtaaacaataacattgtacttcatactcgcgatcctcaaaatgctgcagtgaatgtaaccgtggcgcttccaaacgtgcaatttgtggacataaatagaaacaacaaattctttattaatttctttaacctgttggcgaaggaacaaagatctacggctatcaaagttaccaaatccatgttttgggacggtatagattacgaggaatacaagtctaaaacccttcaggacatgatgtttataaattctacctgttatgtattcggtctttataatcacaataatactacttattgctctatcctttctgatattatctccgcagagaaaacacctattagagtatgtttgttacccagagtagtcggaggtaagactgttactaatcttatttcagaaactttgaagagtatttcatctataactatacgagagtttcccaggaaagataaatctatcatgcatataggactttctgagacgggattcatgcgattctttcaactactcaggctcatggctgataaacctcatgaaacggctattaaagaggttgttatggcttatgtgggtataaagttgggtgacaaaggtagtccgtactatattagaaaggagtcataccaagactttatctatctgctattcgcatcaatgggctttaaggtgactactagaagatccattatgggaagcaataatatctctatcatcagtattagaccaagagtaactaaacaatacatcgtcactacattgatgaaaactagttgtagtaaaaacgaggcagaaaaattgattacttcagcgtttgatcttctcaatttcatggtatcagttagtgactttagagattatcagagttacagacagtatagaaactattgtcctagatatttctatgcaggatctcccgaaggagaggaaaccattatctgtgactcggaaccgataagtatcttggatagaattgatactcgtggtatcttttctgcgtatactattaatgaaatgatggacactgatatcttttctccagagaataaggcatttaagaataatctgagtagatttatcgagagtggagatattacaggagaagatattttctgcgcaatgccatacaacatcttagataggattattacaaatgctggtacgtgtaccgtatccataggtgatatgttggataacattacaacccagtcagactgtaatatgactaacgaaatcacagatatgataaacgcctcattgaagaatacaatttctaaagataataatatgctagttagccaagcattggactctgtagctaatcgttctaaacaaacgattggagacttgagacaatcatcatgtaagatggcattgttgtttaaaaatcttgctacatccatctacacaatagaacgtattttcaatgctaaagtatgtgatgatgttaaggcatcgatgttggagaagtataaagcattcacagatatttccatgtcattatataaagacttgatagctatggagaatctcaaagcgatgctatacattattcgacgaagcggatgcagaatagatgatgcacaaattactactgacgatctagtcaaatcttactcattgatccgtcctaaaattctaagtatgataaactattataatgaaatgagtagaggatactttgaacacatgaaaaaaaatctaaatatgacagatggtgactctgtctcttttgatgatgaataa

SEQ ID NO: 13171 - DNA, 2679 bp, unidentified
  source 1..2679: mol_type = other DNA
  misc_feature 1..2679: note = Synthetic
atgatgcctattaagtcaatagttactcttgatcaattagaggactctgaatatctatttcgtatagtttctaccgttcttccgcatctatgtctagattacaaagtatgtgaccaacttaaaacaaccttcgttcatccgtttgatgtatttcttaataactcattaggatccgtaactaaacaagatgagcttcaggctgctatatccaaattgggcattaattatttaattgataccacgtcacgtgaattaaaactgtttaatgttacacttaacgctggaaatatcgatattattaataccccaattaacattagttcggaaactaaccctatcattaatactcacagcttttacgatcttccacctttcactcaacaccttcttaatattagattgacggatacagaatacagagctagatttatcggtggttatattaaaccagatggctccgactcaatggatgttctagcagaaaagaaatacccagatcttaactttgataatacttatttgtttaacatcctctataaggatgttattaatgcaccaataaaagaattcaaggcgaaaattgttaacggtgtattaagcagacaagattttgataatcttataggtgttagacaatatataacagcacaagatcaaccccgctttgacaacacttatgccatcgcggatgctgctagacattatggagttaatcttaatacattgccattaccaaacgtcgatctcactactatgccaacatataaacatctcatcatgtatgaacagtactttgtcgacgattatgatagagtaccaatttattacaatggtaaccgagtaatcttcgatgatgagattattaacttttgtatttctatgcgatatcaatctcttattcctagactggtagaattctttccagatataccagtaaacaataacatcgtacttcatactcgagatcctcaaaatgctgcagtgaacgtaacggtgggacttccaaatatgcaatttgtggacataaatagaaacaacaaattctttattaatttctttaacctgttggcgaaggaacaaagatctacggctatcaaagttaccaaatccatgttttgggacggtatggattacgaggaatacaagtctaaaaaccttcaggacatgatgtttataaattctacctgttatgtattcggtctttataatcacaataatactacttattgctctatcctttctgatattatctccgcagagaaaacacctattagagtatgtttgttacccagagtagtcggaggtaagactgttactgatcttatttcagaaactttaaagagtatttcatctatgactatacgagagtttcccaagaaagataaatcttctatcatgcatataggactttctgagacgggattcatgagattcttccaactacttaggctcatggctgataaacctcatgaaacggctattaaagaggttgttatggcttatgtgggtataaagttgggtgacaaaggtagtccgtactatattagaaaggagtcataccaagactttatctatctgctattcgcatcaatgggctttaaggtgactactagaagatccattatgggaagtaataatatctctatcatcagtattagaccaagagtaactaaacaatacatcgtcactacattgatgaaaactagttgtagtaaaaacgaggcagaaaaattgattacttcagcgtttgatcttctcaatttcatggtatcagttagtgactttagagattatcagagttacagacagtatagaaactattgtcctagatatttctatgcaggatctcctgaaggagaggaaaccattatttgtgactcggaaccaataagtatcttggatagaattgatactcgtggtatcttttctgcgtatactattaatgaaatgatggacactgatatcttttctccagagaataaggcatttaagaataatctaagtagatttatcgagagtggagatattacaggagaagatattttctgcgcaatgccatacaacatcttagataggattattacaaatgctggtacgtgtaccgtatccataggtgatatgttggataacattacaacccagtcagactgtaatatgactaacgaaattacagatatgataaacgcctcattgaagaatacaatttctaaagataataatatgctagtcagccaagcgttggactctgtagctaatcattctaaacaaaagattggagacttaaggcaatcatcatgtaagatggcattgttgtttaaaaatcttgctacatccatctacacaatagaacgtattttcaatgctaaagtaggtgatgatgttaaggcatcgatgttggagaagtataaagtgttcacagatatttccatgtcattgtataaagacttgatagctatggagaatctcaaagcaatgctatacattattcgacgaagcggatgtagaatagacgatgcgcaaattactactgacgatttagtcaagtcttactcattgatccgtcctaaaattctaagtatgataaactattataatgaaatgagtagaggatactttgaacacatgaaaaaaaatctaaatatgacagatggtgactctgtctcttttgatgatgaataa

SEQ ID NO: 13172 - DNA, 6693 bp, unidentified
  source 1..6693: mol_type = other DNA
  misc_feature 1..6693: note = Synthetic
aaggatatcatgtcggatttgttgatggaacgccacaactattttggtagagaagtgtgccaatacttagacatagagtttaggaatgatacacctgctcaagatatactttttgacttcttgccacctggcgctgtcttcactgtgaggaactgcagcccagacaactacatcatattcaatgggaagttatatattatagattacaaagtttctgttgatgccagttatgggttgtcaacaaagacaaagtacgaagaaatatttggtgatgctttagctccttttggtttggactttgaagttgttataatcagggcagatcctattcgagaaatggtacatattgatagtcaagatttcatcaatgcatttggcaatatttatattgacttagatttcacatggtttttcaatttgcgcacattactttatgataaattcaaggacaatgatcggttcttagaaattgttaatcaaggcgaattcacaatgacttcaccatggatagaagaaaatacgccagaattgtacactcatcctatatttagagaattctataactcattgaatgatgaagaaaaaaatacatttaatatcagtttggaattcgatgccaccaagtcagagaaatggaaccataatttgatagcgatcatccaaaagtatgagccattttataagaaattttgtaatattgcagcatcaggcgtatttaagtgcacaggcgattatcctgcgcctagtaaagatcagatctcaaagggctgggatgatatgtacgaaagagttaaacttgaaagagatttaaccgatgatctgtctaaacagaaaccaagtttccattttatatggtcgcctcctgatcccgaaagaccaaatgagaatatctctaaaatactaacattggctaaagcactccaaaaaatacaaggtgattctacatttattaacagcttccgggcattgggcttactaatggatttttcgtcaaatattggtttgtatgaatcacatgttagtaaacttaaaaacacagcacgacaaacttccaaaaagatcgatcagaaattagaagaggtggagattggaagtgcaactgtcctgtgggagcaacaattcaaattcaacacaaagataatgaatgcttatgataagtcacatctcttcaaagatttcctcggaattggtggccataaatcatttagcaagaaatcaatagatgatttagatacagaaaagcctaaaatattagattttaactcgaaaaatgttcaagatgcctgcaatagaatttatcgtcaagtcaagaatatcttatcaaatgttaattctttgaaaaaaatggggtgttatctagaagaatacggatacaatatatcaaatgcttccccagacatgtgggagagagttcaagaagtatgttccacaaacttctgggctgcaatcttggattattcaactctgatgaaaaatatgttagctgcatctcaatacaaccgccacaacacatttagagttgtcacttgtgcaaacaataatctttatggaatagttatgccttcttcggatattaaaacaaaacgatcaactctttgctactttataatagctttacatgataagagagaagatgttgctcattctggctcaatacattcaactttccaatcaggttctaaatatgtatcaatttcaaagggatttaggcttgacaaagaaagatgccaaagaattgtatcatcaccaggtttgttcttgatgacttcttgtctatttttatctgataacaaatcactgaacacaaatgatgttttaaattttagttttcacacatctgtttcaataacaaaggcaatgttgtcactaactgaaccatccaggtatatgattatgaattcacttgcaatttcaagtcatgtacgtgaatatatggctgaaaaatttagcccatatactaagacagcattttctgtagttatgacgcaaattattaagcgtgcatgctatgaggcatttgatcaaaaggagaagatagagctaaaaaacatacatctaacagattatgaaataacacagaaaggtgtcaaaccacagagagatctaaaatctatttggtttccaggacaagtaaatttaaaagaatatataaatcaggtatatatgccattttatttcaactctaaaggactgcatgaaaaacaccatgttatgattgatctagcaaaaactatattagaaattgaaaaagaccagcgtttgaatatacctggaatctggtctgatattccgaagaagcagacagttaatattagagtcttgatctactcacttgcaaagacattaaacatggacacatcaagacataactatatacgatctaggatagaaaataataacaatctaaagagatctataaccaccatatctacatttactagttctaaatcatgcattaagattggagactttagtgaatttaaaaccgtaagaaaaaagatgattgacagtatgaaaaaggaaataaataaatacacagttgcaaatccagaatttgcagaagatctagatacatcttatgccatacatcatgctgattatgcagatgtgcgtaaagctataccgaattatgctgattgtatatcaacaaaggtttttgacgcattgtatgaaaagataaaaaacggcgagattgatgataaaccaacagtatcacatatacttgagataatgaaaaaacataaacagttttattttagtttctttaacaaggggcaaaaaacagcaaaagatagagaaatctttgttggtgaatttgaggctaagatgtgcttatatttaattgaaagaatctctaaagaacgttgtcgtctaaacccagaagaaatgatcagcgaaccaggagattctaaattaaaaaaactcgaagatctggcagaagcagaaatacgatatacagcacagacgctaaaaaaccttaatcggaaaattcaaaaagatatgtttggatcagaaattgacattgatatgaaattgcatgctttaaaaatagaaataaatgctgatatgtcaaaatggagtgctcaagatgttttatacaaatatttttggctctttgtcttagaccctgtcctgtataaatatgagaaagagagaatcttatatttcctatgcaattatatgcaaaaaagactgattctaccagatgatctaattgcaaatattttagatcaaaggatccagcgccaagacgacatcatatatgagatgagtaatggactcactcagaattgggttgagattaagaggaattggctccaaggcaacttaaattacactagtagctatttgcatacatgctcaatgaatgtttacaaagatataataaaaagatctattgatttgcttgaaggggaaacactagttaattcaatggtacattcggatgataatcatacatcactggttatagtccaaaataaattaaatgacaatattttaattgagttctcaataaaattatttgaaaagatatgcttaacatttggaaatcaagctaatatgaaaaaaacatatttaacaaattttatcaaagaatttgtttcattatttaacatatatggtgaaccattttcagtatacgggcgtttcttactaacagctgtaggtgactgtgcttacttaggaccttatgaagattgtgctagtaggttatcagcaacacagactgcaataaagcatggctgcccgccatcacttgcatggatcagcatagctttgaatcaatggatcacacataacacatataatatgcttcctggtcaaaataatgatccatgtaatatattaccatgctataacagatttgaggttcctatcgaattgtgtgggttattgaattgctctttgcctagcattgcaatagcaggtttagaagcagataatcttgaatttttagttaggacatcacggaaactgtcatctgtaatgtaccaacgtgagccgatacaagtgcaatatgaacacattttagattgggatataagccaattaactgaaatagaaacaatcaggtttaaaatgttacgattcatggccctagactcttctatgtcttcagatgatggaatgggtgaaacaagtgacatgagatcaagatctctgcttactccaagaaagtttacaacacaagcatcactatcaaggctagtatcttataatgattatcaacagattatacaggatcaaactaaaattgacgaattgttaggctattttatacagtgcccacagttattagtcacaaaaggcgaaaatgtagaagaattctgccaatctataagatttaggtatactagcaggaaatttaaagaatcattatcaatacaaaatccagctcaactgtttatagagcaaatactatttgcaaataaaccaatgattgactatacaagtatccatgataaattatttggtattcaagatgaccctaatatatccgataccacatgcattattggaaagaaaactttccctgaaacttataatcagatcaaatgtgatttagagagatttgccctaacaagtgatgatattaaaacagtttatagctattgcttaatgaacgatcctatattaatagcatgtgcaaataatataatattgtctatgaaaggcatgtctattgatagatcggctatgacatgtgcacagatgccggagattaaaagcctaaaagtaatctaccatagcccagctatggtcttgagagcatatgtaactggtgatatgaacattcggggggcagaaccagatgagatgaggagggatatataccaccttgaagaattcatagaaaaaacaaatattagaaacaagatgagagaaaggattaacaaaaacgaaatcaaatccaatggtagagatatcaaatttgaaattaaggaattgaccaaatattatcaaatatgttatgactatatcaaatctactgagcataaaataaaaatatttattttacctaaaaggccagttactccttctgacttttgttctatagtagctggcaatttgatgttagacaataaatggattacaatacaccacttaaagcagataacttcgcaaacaaagaaagcacaaatagcaacctcaaccgatttagaattgcagctagcatacgaatgctttcgcttaattgcacattttgcagattcctttttagcagagaattctagaaagcaatttcttaaaaaagttgttgaagagttctcttataaaggggtttcagttaaaaatttgtatgataaaataaagcattcaagactgagatcaaagatagttcccatattgtattatatgaatgacctagatcagctagatctagacaggcatgatgctgaaaaagcagaagagcaaattacatggaataactggcaaacatcaagagaatttcagacaggtccgatagatttatcaataaaaggatatgggcgtactatccgaattataggcaataattctaaactaactgcagcagaacttcaaataagtagaatacgtgatgatataatatctagacatagccaagcattgctaaacaaaaatcatggactaaaatttgaacttatggaagaatacaaagatctagaccctaagttgttttatatatgctatcaacttagggctaaaaaaaggtatcattataatatattatcagttccacatataacagagcacaataggcgaacacaggaatccaaaataagatctacaaattattgggtgccagtgtgcccagtagcaatctctaagttaatatataatgataagcctcaattagcattgattaagcgattaaacatggacagtataaagttgacatcaatacaagtagctgtcgaagactatgcaatgattaggaaatgcaactttgccaagatgcaattttttgatggcccggaactaccatgtggtggtatagatatctcaaaaatgatgaaatctcaaaatgtactaaatctgcaggttgacactttacagagtatatcacttattgaattgtgccgaatttttaattgtaaaggtaccaaagaagacaacaacgcttttgaattcttatctgatgaagttcttgatgaggagatagatgaagaacttgattcctcaccagtgttaaaaataacatacacaaagaagtcgatgagaaataatacatataaaaatataattgtaaaggcactaatacgcgaatgtgacaaatttgaagaatgttttgacataaccgatgagggtttcacgtcagatagtaacctagagattctagaatctctggtatggattttgaaagaattacatacaaaccaatggtcaacagagttgatgcagtgcattcatatggcattgtatagaaatgaaatggatcacctgtttcacagattcactataccagaacaatttgtagacaatccaatatcgctaaactataaatggtcaaatgtaatagaattcctagtaacattaatgcagatagactataaacaggaaccatgggtttcgattatggcacattcattaaataaagcagttgaatatgcaactgaaaggaaaattcaggaatcagctaaagagaacaaactccaaaagtttataaaagggaagaagatgggtggaaaatctaagtttgacttttaa

SEQ ID NO: 13173 - DNA, 45 bp, unidentified; identical to SEQ ID NO: 4965
  misc_feature 1..45: note = Synthetic
  source 1..45: mol_type = other DNA

SEQ ID NO: 13174 - DNA, 729 bp, unidentified
  source 1..729: mol_type = other DNA
  misc_feature 1..729: note = Synthetic
atggggagcgcgcacaaaggaccgtcaggcgccggcatggagcgtcgccgaggtacggtaccgctgggatgggtgttttttgttctttgcttatctgcctcttccccgtgtgctgttgatctgggtagcaagtcctccaactcgacctgccgcttgaatgtgactgagttggcctcgatccatcctggggaaacgtggacgttacacgggatgtgtatttctatctgctactacgagaatgtgaccgaggacgagataatcggcgtggcttttacttggcagcataacgagtctgtggttgacctgtggttgtaccagaacgacacggtgatccgcaatttcagcgacatcaccactaacatcttgcaagacggactgaaaatgcgaaccgtccctgtgactaaactgtacaccagccgcatggtcactaatcttaccgtgggccgctatgactgtttacgctgcgagaacggtacgatgaaaataatcgagcgcctctacgtccgattgggctcgctatatccgagaccgcccggatccgggctcgccaaacacccctccgtaagcgccgacgaggaactgtccgcgaccttggcgagagacatcgtgttggtctcagccatcactctgttcttcttcttgttggccctacggatcccccagcgactgtgtcagcggctgcgcattcgcctgccgcatcgataccagcggttacgcaccgaggactga

SEQ ID NO: 13175 - DNA, 30 bp, unidentified; identical to SEQ ID NO: 4968
  misc_feature 1..30: note = Synthetic
  source 1..30: mol_type = other DNA

SEQ ID NO: 13176 - DNA, 195 bp, unidentified
  misc_feature 1..195: note = Synthetic
  source 1..195: mol_type = other DNA
acggggagtagttttgatatattcgctaatatcctctttaataatatccacacacgccaattgttcggctatactcgatgcgtgagtcttgcattcatctccagatatctgagtaagggtcagatccaaatattgagaagccttataattatcgtattcgaaatcaataataaactgaccatccttatccactga

SEQ ID NO: 13177 - DNA, 24 bp, unidentified
  source 1..24: mol_type = other DNA
  misc_feature 1..24: note = Synthetic
atttatattttagtgaaaaattaa

SEQ ID NO: 13178 - DNA, 48 bp, unidentified; identical to SEQ ID NO: 4972
  misc_feature 1..48: note = Synthetic
  source 1..48: mol_type = other DNA

SEQ ID NO: 13179 - DNA, 177 bp, unidentified
  source 1..177: mol_type = other DNA
  misc_feature 1..177: note = Synthetic
atgtacaaaggtcgagcccccaaccttgagctgtttgctgctgctgaaagttatgcacggacattgagagagaacaacaagatcaacctagcggccttagggctcactgatgatgagagggaagcagcaacatcctacctagggggagatgatgagagatcatccaaatttgagtaa

SEQ ID NO: 13180 - DNA, 258 bp, unidentified
  misc_feature 1..258: note = Synthetic
  source 1..258: mol_type = other DNA
atttattctacatggcccagtacattgtccgattcatcaggtagggtcatcgttatgccagataatagatcattcacgtttaaggaagggtttaaattagatgaatcgataaaatctatattgttggtaaacccgtcgtctatagatctattaaagattagagtatataaacatcgcataaaatggatgggtgatatattcgtattatttgagcaagaaaatatcccaccaccttttcgtctagtaaatgataagtaa

SEQ ID NO: 13181 - DNA, 258 bp, unidentified; identical to SEQ ID NO: 13180
  source 1..258: mol_type = other DNA
  misc_feature 1..258: note = Synthetic

SEQ ID NO: 13182 - DNA, 210 bp, unidentified
  misc_feature 1..210: note = Synthetic
  source 1..210: mol_type = other DNA
atcgttatgccagataatagatcattcacgtttaaggaagggtttaaattagatgaatcgataaaatctatattgttggtaaacccgtcgtctatagatctattaaagattagagtatataaacatcgcataaaatggatgggtaatatattcgtattatttgagcaagaaaatatcccgccaccttttcgtctagtaaatgataagtaa

SEQ ID NO: 13183 - DNA, 36 bp, unidentified; identical to SEQ ID NO: 4976
  source 1..36: mol_type = other DNA
  misc_feature 1..36: note = Synthetic

SEQ ID NO: 13184 - DNA, 42 bp, unidentified; identical to SEQ ID NO: 4977
  misc_feature 1..42: note = Synthetic
  source 1..42: mol_type = other DNA

SEQ ID NO: 13185 - DNA, 18 bp, unidentified
  source 1..18: mol_type = other DNA
  misc_feature 1..18: note = Synthetic
ttggatcggcgggattag

SEQ ID NO: 13186 - DNA, 144 bp, unidentified
  source 1..144: mol_type = other DNA
  misc_feature 1..144: note = Synthetic
atgtcctcgcgcgcctcaatctgctcctcgacctcgatgcgcacttccaggcgcgagaagagaacggactgctctgcggccaagctgcgcgaagtgcggcccaggctctcggccatggcctcgcgcagatttcgagccatttag

SEQ ID NO: 13187 - DNA, 1440 bp, unidentified
  source 1..1440: mol_type = other DNA
  misc_feature 1..1440: note = Synthetic
atgaataggaatcctgatcagaatactcttcctaatattacattaaagattatagaaacctatttaggcagagtacctagtgtgaacgaatatcatatgttaaaattacaagctagaaatattcaaaaaataactgtttttaacaaagacatatttgtatctttagtaaaaaagaataaaaaaagatttttttccgatgttaatacatctgcatcagaaataaaagatcgtatacttagctacttttctaaacagactcaaacatataatataggtaaattatttacgattatagaactacaatctgtattagtgaccacatacacggacatattaggagttcttactattaaagctccaaatgtaatttcatctaaaatttcttataatgtaacatcaatggaagaattggcaagagatatgctaaattctatgaacgtcgcagtaatagacaaggcaaaagtaatgggacgtcataatgtatcttccctagtcaaaaatgttaataagttgatggaagaatatcttagacgccataataaaagttgtatatgttacggatcatattctctatatctaattaatccaaatatacggtacggcgatatagatattcttcagactaattctagaacttttcttatagatttggcctttctaataaaatttatcacgggaaataatattatattaagtaaaatcccatatcttagaaactatatggtgataaaagatgaaaacgataatcatatcattgatagttttaatattcgccaggataccatgaacgtagttcctaaaatctttatagataatatctatatagtggatccgacgtttcaactattgaacatgataaaaatgttttctcaaatagatagattggaagatctatccaaagatcctgaaaagtttaatgcgcgtatggcaaccatgctagaatacgttagatatacacatggtatagtctttgatggtaagcgtaataatatgccgatgaaatgtatcatcgatgaaaataatcgcatagttactgtcactactaaagactattttagctttaaaaaatgtctagtgtatctagatgaaaatgtgttatcgagtgatatattagatcttaacgccgacacatcgtgtgatttcgagagtgttacaaattctgtatatctaattcatgataatatcatgtatacatatttctcaaatactattctccttagtgataaggggaaggtacatgaaataagtgccagaggtttatgtgcacatatattgttgtatcagatgctgacatctggagaatacaaacaatgtttatcggatctcttaaattcgatgatgaatagagataaaatacctatctattcacatactgaaagagataaaaaacctggacgacacggatttattaatatcgaaaaggatataattgtattttag

SEQ ID NO: 13188 - DNA, 1440 bp, unidentified
  misc_feature 1..1440: note = Synthetic
  source 1..1440: mol_type = other DNA
atgaataggaatcctgatcagaatactcttcctaatattacattaaagattatagaaacctatttaggcagaatacctagtgtaaacgaatatcatatgttaaaattacaagctagaaatattcagaaaataactgtttttaacaaagacatatttgtatcgttagtaaaaaagaataaaaaaagatttttttccgatgttgatacatctgcatcagaaataaaagatcgtatacttagctacttttctaaacagactcaaacatataatataggtaaattatttacgattatagaactacaatctgtattagtgaccacatacacggatatattaggagttcttactattaaagctccaaatgtaatttcatctaaaatttcttataatgtaacatcaatggaagaattggcaagagatatgctaaattctatgaacgtcgcggtaatagacaaggcaaaagtaatgggacgtcataatgtatcttccctagtcaaaaatgttaataagttgatggaagaatatcttagacgccataataagagttgtatatgttacggatcatattctctatatctaattaatccaaatatacggtacggcgatatagatattcttcaaactaattcgaggacttttcttatagatttggcatttctaataaaatttattacgggaaataatattatattaagtaaaatcccatatcttagaaactatatggtgataaaagatgaaaacgataatcatatcattgatagttttaatattcgccaggataccatgaacgtagttcctaaaatctttatagataatatctatatagtggatccaacgtttcaactattgaacatgataaaaatgttttctcaaatagatagattggaagatctatccaaagatcctgaaaagtttaatgcgcgtatggcaactatgctagaatacgttagatatacacatggtatagtctttgatggtacgcgtaataatatgccgatgaaatgtatcatcgatgaaaataatcgcatagttactgttactactaaagactattttagctttaaaaaatgtctagtgtatctagatgaaaatgtgttatcgagcgatatattagatcttaatgccgacacatcgtgtgatttcgagagtgttacaaattctgtatatctaattcatgataatatcatgtatacatatttctcaaatactattctccttagtgataaggggaaggtacatgaaataagtgccagaggtttatgtgcacatatattgttgtatcagatgctgacatcgggagaatacaaacaatgtttatcggatctcttaaattcgatgatgaatagagataaaatacctatctattcacatactgaaagagataaaaaacccgggcgacacggatttattaatatcgaaaaagatataattgtattttag

SEQ ID NO: 13189 - DNA, 69 bp, unidentified; identical to SEQ ID NO: 4983
  misc_feature 1..69: note = Synthetic
  source 1..69: mol_type = other DNA

SEQ ID NO: 13190 - DNA, 36 bp, unidentified; identical to SEQ ID NO: 4984
  source 1..36: mol_type = other DNA
  misc_feature 1..36: note = Synthetic

SEQ ID NO: 13191 - DNA, 72 bp, unidentified; identical to SEQ ID NO: 4985
  misc_feature 1..72: note = Synthetic
  source 1..72: mol_type = other DNA

SEQ ID NO: 13192 - DNA, 69 bp, unidentified; identical to SEQ ID NO: 4986
  source 1..69: mol_type = other DNA
  misc_feature 1..69: note = Synthetic

SEQ ID NO: 13193 - DNA, 1002 bp, unidentified
  source 1..1002: mol_type = other DNA
  misc_feature 1..1002: note = Synthetic
atggacactctaattgatttccaaaaaatcctgcatgatgaagagtacaagtacaattatacgtgtattacgccaacagtacggaaagcccaaagacttgaaagcgtaattaacggaattatgctaacgctgatacttcctgttagtactgttgtcatatgcactctgctaatctactacaaatggacaaaacagacaattacttctccatatcttatcacactctttattagtgattctttacattcattgactgtgttacttctcacattgaaccgagaagctctcacaaaccttaatcaggctttgtgtcaatgtgtgctttttgtatacagtgcgtcctgcacatacagtctgtgcatgctagcagtaatatccacaatacgctatcgaaccctgcaaagaaggacattaaacgacaaaaacaataatcatattaaaaggaacgttggaattttatttctgtcttctgccatgtgtgccattccagcagtattatatgttcaagtggaaaagaaaaaaggcaattatggaaaatgtaatatacacatctcaacgcaaaaagcatatgacttgtttataggaattaaaattgtctattgttttctctggggaatttttccaactgtcattttcagctatttttatgtgatttttggtaagaccttgcgtgccttgacccaaagtaaacataacaaaactctgtcattcattagcttactgatactatcctttttatgtattcaaataccaaatctcctagtaatgtctgtggaaattttttttttgtatatagcaaatacttcctgcttaggcaccatacaaagagaaattgtgcaaataatatctagattaatgccagaaatacactgcttgtctaatccgctagtatatgcattcactagaacagatttccgattacgattttacgatttcattaaatgtaatttgtgtaattcatctttaaagagaaagagaaatcctctgacaataaaaaattga

SEQ ID NO: 13194 - DNA, 72 bp, unidentified; identical to SEQ ID NO: 4988
  misc_feature 1..72: note = Synthetic
  source 1..72: mol_type = other DNA

SEQ ID NO: 13195 - DNA, 1446 bp, unidentified
  source 1..1446: mol_type = other DNA
  misc_feature 1..1446: note = Synthetic
atggcctgtcgtaagttctgtggggtctaccgtagacccgacaagagacaggaggcgtccgtcccgccggagacaaacacggccccggccttcccggcgagcaccttttatacccccgcggaggatgcgtacctggcccccgggcccccggaaaccatccacccttcccgcccaccgtcccccggcgaggctgcgcgcctgtgtcagctgcaggagatcttggcccagatgcacagcgacgaggactaccccatcgtggacgccgcgggtgcggaggaggaagacgaggccgacgatgacgccccggatgacgtggcctacccggaggactacgcggaggggcgttttctgtccatggtttcggccgcccccctgcccggagccagcggccatcctcctgttccgggccgcgcagccccccccgacgtccggacctgcgacagcggtaaggtgggggccacggggttcaccccggaagagctcgacaccatggaccgggaggcacttcgggccatcagccgcgggtgcaagcccccttcgaccctggcaaaactggtgaccgggctgggattcgcgatccacggagcgctcatcccggggtcggaggggtgtgtctttgatagcagccacccgaactaccctcatcgggtaatcgtcaaggcggggtggtacgccagcacgagccacgaggcgcggctgctgagacgcctgaaccaccccgcgatcctacccctcctggacctgcacgtcgtttctggggtcacgtgtctggtcctccccaagtatcactgcgacctgtatacctatctgagcaagcgcccgtctccgttgggccacctacagataaccgcggtctcccggcagctcttgagcgccatcgactacgtccactgcgaaggcatcatccaccgcgatattaagaccgagaacatcttcatcaacacccccgagaacatctgtctgggggactttggggcggcgtgctttgtgcgcgggtgtcgatcgagccccttccattacgggatcgcaggcaccatcgatacaaacgcccccgaggtcctggccggggatccgtacacccaggtaatcgacatctggagcgccggcctggtgatctttgagaccgccgtccacaccgcgtccttgttctcggccccgcgcgaccccgaaaggcggccgtgcgacaaccagatcgcgcgcatcatccgacaggcccaggtacacgtcgacgagtttccgacgcacgcggaatcgcgcctcaccgcgcactaccgctcgcgggcggccgggaacaatcgtccggcgtggacccgaccggcgtggacccgctactacaagatccacacagacgtcgaatatctcatatgcaaagcccttacctttgacgcggcgctccgcccaagcgccgcggagttgctgcgcctgccgctatttcaccctaagtga

SEQ ID NO: 13196 - DNA, 435 bp, unidentified
  source 1..435: mol_type = other DNA
  misc_feature 1..435: note = Synthetic
atgcgtacctggcccccgggcccccggaaaccatccacccttcccgcccaccgtcccccggcgaggctgcgcgcctgtgtcagctgcaggagatcttggcccagatgcacagcgacgaggactaccccatcgtggacgccgcgggtgcggaggaggaagacgaggccgacgatgacgccccggatgacgtggcctacccggaggactacgcggaggggcgttttctgtccatggtttcggccgcccccctgcccggagccagcggccatcctcctgttccgggccgcgcagccccccccgacgtccggacctgcgacagcggtaaggtgggggccacggggttcaccccggaagagctcgacaccatggaccgggaggcacttcgggccatcagccgcgggtgcaagcccccttcgaccctggcaaaactggtga

SEQ ID NO: 13197 - DNA, 159 bp, unidentified
  misc_feature 1..159: note = Synthetic
  source 1..159: mol_type = other DNA
atggccccttttataccccagccgaggacgcgtgcctggactccccgcccccggagacccccaaaccttcccacaccacaccacccagcgaggccgagcgcctgtgtcatctgcaggagatccttgcccagatgtacggaaaccaggactaccccatag

SEQ ID NO: 13198 - DNA, 24 bp, unidentified
  misc_feature 1..24: note = Synthetic
  source 1..24: mol_type = other DNA
atggtcagtcttaggaaagtttag

SEQ ID NO: 13199 - DNA, 114 bp, unidentified; identical to SEQ ID NO: 4995
  source 1..114: mol_type = other DNA
  misc_feature 1..114: note = Synthetic

SEQ ID NO: 13200 - DNA, 162 bp, unidentified
  misc_feature 1..162: note = Synthetic
  source 1..162: mol_type = other DNA
aggcaaagaaagagaagaagagcccgactcagaaaaacagagtaccaaatcagacagctccaaagtagaatttgggaagccttggagcaaagagcaaatcagagattggctgaagacttcaaggggctacgtgtggctgaagaatctacaagcagtaattga

SEQ ID NO: 13201 - DNA, 684 bp, unidentified
  misc_feature 1..684: note = Synthetic
  source 1..684: mol_type = other DNA
atgagcaaggagattcccacaccttacatgtggagctatcagccccagatgggcctagccgcgggcgcctcccaggactactccacccgcatgaactggcttagtgccgggccctcgatgatctcacaagtcaacgggatccgtaaccatcgaaaccagatattgttggagcaggcggcggtcacctccacgcccagggcaaagcttaacccgcgtaattggccctccaccctggtgtatcagaaaatccccgggccaactaccgtactacttccgcgtgacgcactggccgaagtccgcatgactaactcaggtgtccagctggcgggcggcgcttcccggtgtccgcccagacccgacttaggtataaaaacactgctgatccgaggcaaaggcatacaacttaacaacgagttggtgagctcttccattggtctgcgacccgacggagtgtttcaactagccggagccgggaaatcgtccttcactcccaaccaggcctacctgaccttgcagagcagctcttcgcagcctcgctccggaggcattggaactctccagttcgtggaggagtttgtgccctcggtttactttaaccccttttcaggctccccaggcctctaccccgacgagttcataccgaacttcgacgcagttagagaagcggtcgacggctacgactga

SEQ ID NO: 13202 - DNA, 84 bp, unidentified; identical to SEQ ID NO: 4999
  misc_feature 1..84: note = Synthetic
  source 1..84: mol_type = other DNA

SEQ ID NO: 13203 - DNA, 138 bp, unidentified
  misc_feature 1..138: note = Synthetic
  source 1..138: mol_type = other DNA
atgctgaagaaacagaagaaaatgatgacttcaaccccgtttacccttttgacccatttgacacatcagacgtaccctttgttacacccccttttacttcttccaatggtcttcaagaaaaaccaccaggtgtattag

SEQ ID NO: 13204 - DNA, 33 bp, unidentified; identical to SEQ ID NO: 5002
  misc_feature 1..33: note = Synthetic
  source 1..33: mol_type = other DNA

SEQ ID NO: 13205 - DNA, 549 bp, unidentified
  source 1..549: mol_type = other DNA
  misc_feature 1..549: note = Synthetic
atggatgtgtggagtattcttggggaatttaacaagacacgccggcttgtggaggatagttcagacgggtgctccgggttttggagacactggtttggaactcctctatctcgcctggtgtacacagttaagaaggattatagcgaggaatttgaaaatctttttgccgactgttctggcctgctagattctttaaattttggccaccagtcccttttccaggaaagggtactccacagccttgatttttccagcccagggcgcactacagccggggttgcttttgtggtttttttggttgacaaatggagccaggacacccaactaagcaggggctacattctggactttgcagccatgcacctgtggagggcctggatgaggcagcggggacagagaatcttgaactactggcttttacagccagcagcgtcgggtcttcttcatctacacagacaaacatccatgttggaggaagaaatgagggaggccatggacgagaacccgaggagcggcctggaccctccgtcggaagaggagctggattaa

SEQ ID NO: 13206 - DNA, 102 bp, unidentified; identical to SEQ ID NO: 5005
  source 1..102: mol_type = other DNA
  misc_feature 1..102: note = Synthetic

SEQ ID NO: 13207 - DNA, 1032 bp, unidentified
  source 1..1032: mol_type = other DNA
  misc_feature 1..1032: note = Synthetic
atgtggtcgcgtgtggtctttttaaggagctctgaaacacagacaggtatggggggtggccggctgccgccgctgtggctgccgctgctgatcgcctggagcgagtggggcaactgctgtctcgatgcgcctccggtggtgcgttcgccctgtctgcagccggtgcgcgaccgcaaccgcgagcggaacccgggctcaccgcagttgctgccttacggcgaccgtctggaggtggcctgcatcttccccgcgcacgactggccagaggtctctatccgagtccacctctgctactggcccgagatcgtgcgttcgctggtggtggacgcacgcagcggtcaggtgttacacaacgacgccagctgttacatcgccggcgggcgctggcgtttcgaggacggcggcgcggcgcagcggctgagcctctcgtttcgtctcatcaccgagaccgcgggcacctacacctgcgtgctgggcaacgagacccacagcctggcgaccgagaccacggcgctggtggccgacgtgcacgacctgcgccactcggaccgctcctgcgacctggctttcggatcgcgctcacagacgcggtacctgtggacgcccgatccctccaggttgcgcagtataaactgcggttgggagggtgaacggcaccgcgtagtccactacatccccggcacctcgggtctgctgccctcgtgcgaggaggacgagcgcgaactgtgcgtgcccttcatcagccagagcatcgcggacaacaactgcagccgccggcatcgggtagacggcgctaggcggcgctatcatctgcggagggattactggctgacggatccgaagatcgggctgctggccgcgggatcggtggccctgacctccctctgccacctgctgtgctactggtgttccgaatcgtaccggcgtctgaacaccgaagaggaaaacgaggcggcggaggaaactgccgcgggagaagcctctgcggtagcggcggcggccgtctctgaggaagagcagcagcgggagtaa

SEQ ID NO: 13208 - DNA, 975 bp, unidentified
  misc_feature 1..975: note = Synthetic
  source 1..975: mol_type = other DNA
ctgtttcacgcttccttaaacaacatggctatgccatttgagatagaggtattgttaccaggagaactatccccggcggaaacatctgcattacagaaatgtgagggaaaaattattaccttctcaaccctgcgtcatcgagcttcactggtggatatagcgctgtcgtcatattacattaacggtgctccaccagacacgctctcgctgttagaggcataccgaatgcgattcgcggcagttataacacgggtcatcccgggaaagttgttggcgcatgccattggcgtgggtactcctacacccgggttgtttattcaaaatacatcccccgttgatctttgtaatggcgattacatctgcttacttcctccggttttcgggtccgcagactcaattcgcttggactctgtaggactggaaattgttttccctttaaccatcccccagaccttaatgcgagaaatcatcgccaaagtggttgcacgggccgttgagcgcacggccgcgggtgctcaaattttaccccacgaagttctacgaggcgcggatgtcatttgttacaatggaaggcgttatgaactcgaaacaaatttacaacatcgggacggatcggatgcggctattcgcacattggttttaaatctaatgttttccataaacgagggatgtctgcttttattggcgctgattccaactttgttagtccaaggagcacacgacggttatgtaaatttattgatacaaacggccaattgcgttagagaaaccggccagttaattaatataccgccaatgccgcggattcaagacggccatcgccgatttcccatatatgaaactatttcatcttggatatcaacatcatctagactgggggataccttgggaactcgcgcaattttacgcgtctgtgtgtttgatggaccctctactgttcatccgggagaccgcacggccgtgattcaagtgtaa

SEQ ID NO: 13209 - DNA, 621 bp, unidentified
  misc_feature 1..621: note = Synthetic
  source 1..621: mol_type = other DNA
atgagtagttcaagtaacgagcccacccctaagcccaagccccctgctcccatgactcaggaggagtttaacaaagaagtagagaaacgaagagaacaaaaaaaggaaaaatctagaaccgttgaacgtgagtcagaaaccgtaactgtgtctgccgacggaacagagaaaacaaggacctacgagcgcgagtctgtgaaaacaaccgaatcagaaaagaacaacaatccgtcaaccaatgataataaggacaaagtgaccgacaatcagccaaaagaagacgataagaaacttgaggaaactcccaaggacagtgagaagcctacaccaactgaaaagcccgcaaacacctcttctggtgataataagaaagagggggaagaagcaacccttgagagtcaacccacgcctgcacctactcagccatcaaacagcgaagcacccactcaacctccaagcagtgagactccacccactcaacctccaagcagtacaccctccactcaacctccaagcagtacaccatccactgaacctactccagagccagctccttctaccgaaccaacaaccaacgccaacggtacacctgccgccactacttcagaaaccactgcctaa

SEQ ID NO: 13210 - DNA, 324 bp, unidentified
  misc_feature 1..324: note = Synthetic
  source 1..324: mol_type = other DNA
aggatgatacattggaaatatctcccctgttttacagaacaagcaataagacaagccctgctaggaaagagactaacagtgtgctacttccactggggacataaagggaaggtagggagcctgcagtacttggctttgctaagttatacagcctactgtaacaatggcagaaggggccccagagatcccagaaggagcaggagaggtggatctaaatacctggttggaaagatctctggagaaaatcaatcaggaggcaagattacacttccacccagagttccttttccgtctctggaacgcatgcatagaacactggcatga

SEQ ID NO: 13211 - DNA, 147 bp, unidentified
  misc_feature 1..147: note = Synthetic
  source 1..147: mol_type = other DNA
acggacatcaaagacgaattaaaaaaaatcaaatcagtcttaactatgatcgaccaaattaattctttgaccaacgagaaaacgtattttgttgtctgtgacgtttccgcagataacagaatggctacatgtatttataaaaattaa

SEQ ID NO: 13212 - DNA, 591 bp, unidentified
  misc_feature 1..591: note = Synthetic
  source 1..591: mol_type = other DNA
acgcgtattcaccgacccccccctcgcaacatgacaacgacgcccctctcgaacctgtttttacgggccccggacatcacccacgtcgcccccccgtactgtctgaatgccacgtggcaggccgaaaacgccctgcacacgaccaaaacggaccccgcgtgcctggccgcgcggagttatttagtccgcgcctcctgctcgaccagcggccccatccactgttttttctttgcggtgtacaaggactcgcagcactcccttccgctggttaccgagctccgcaacttcgcggacctggtcaaccacccgcccgtcttgcgcgaactagaggataagcgtggggggcggctgcggtgcacgggcccattcagctgcggaaccatcaaggacgtctccggtgcatcccccgcgggggaatacacgataaacggtatcgtgtaccactgtcactgtcggtatccgttctccaaaacctgctggctcggggcatccgcggccctacaacaccttcgctctataagctcaagcggcacggccgctcgcgcggcagaacagcgacgccacaaaatcaaaatcaaaatcaaggtataa

SEQ ID NO: 13213 - DNA, 228 bp, unidentified
  source 1..228: mol_type = other DNA
  misc_feature 1..228: note = Synthetic
atgtccgattttttaaaaattggatgtctgcgttataatgagaatcgtcggttgcatacgcaatggtttacgcaagatacggactatattaagcaggtggatgagatgttttctagagacgtcctctgtcctctccgtgagcactgtcagaggtcgcgccgagagcgaggattattaaagatatgtacgtctctagtcaggggggttaattgtattgaaagagggtag

SEQ ID NO: 13214 - DNA, 90 bp, unidentified; identical to SEQ ID NO: 5026
  misc_feature 1..90: note = Synthetic
  source 1..90: mol_type = other DNA

SEQ ID NO: 13215 - DNA, 546 bp, unidentified
  source 1..546: mol_type = other DNA
  misc_feature 1..546: note = Synthetic
gtggatcccgtggcggctcctgaaaaagactgtatgcccaaggccagacggcagcgaactcgtcgcacacgcagcaacagaccaccaacaccatggcccactttccaggtttcggacagagcctcctctatggatacccagtctacgtgtttggcgattgtgttcaagccgattggtgtcccgtttcaggtgggctttgttccacccgcctgcaccggcatgcccttctcgccacctgcccggagcaccagctcacctgggaccccatcgatggacgcgttgtcggctctcctctccaataccttatccctcggctcccctccttccccacccagagaacctccaagaccctcaaggtcctcactccccctaccactcctgtctcccccaagattccacccgcctttttccaatccatgcgtaaactctccccctaccggaacgggtgcctatacccaactctcggagaccagctcccctcccttgccttccccgaccccggtctccggccccaaaacatctacaccacctggggaagaaccgtag

SEQ ID NO: 13216 - DNA, 216 bp, unidentified
  misc_feature 1..216: note = Synthetic
  source 1..216: mol_type = other DNA
gtggatcccgtggcggctcctgaaaaagactgtatgcccaaggccagacggcagcgaactcgtcgcacacgcagcaacagaccaccaacaccatggccgctcccttctgcgctgctccttctcctcgcgttgtttcagaatttccatgatttccttctgctcttccgccagcgccctccggcgaccatcccgtacatcctctccgaccgaccctga

SEQ ID NO: 13217 - DNA, 81 bp, unidentified; identical to SEQ ID NO: 5033
  misc_feature 1..81: note = Synthetic
  source 1..81: mol_type = other DNA

SEQ ID NO: 13218 - DNA, 234 bp, unidentified
  misc_feature 1..234: note = Synthetic
  source 1..234: mol_type = other DNA
ctgccgttttttcagatggctcttacttgccgaatgcgcatacccattccaggatacagaggacgaccccgccggaggaaagggctgaccgggaacggtcgatttcggcggcgtagtatgcgcagacgcatgaagggtggggtgctgcccttcctaattccacttattgctgcggccattggagccgttcccggaattgcctcagtagccttgcaggcttctcgaaaaaattaa

SEQ ID NO: 13219 - DNA, 27 bp, unidentified
  misc_feature 1..27: note = Synthetic
  source 1..27: mol_type = other DNA
atgtcgccatcagacatttcgtattaa

SEQ ID NO: 13220 - DNA, 912 bp, unidentified
  source 1..912: mol_type = other DNA
  misc_feature 1..912: note = Synthetic
atggccagttccagcaattataatacgtatatgcaatacctgaaccctcccccttatgctgatcatggtgcaaatcagttaatcccagcagaccagctatcaaatcaacatggtataactccgaattatgtgggcgacttgaatctagatgatcagtttaaagggaatgtttgtcacgccttcactttggaagcaataattgatatatctgcttataatgagcggacggtcaaaggagtcccagcgtggctgcctcttgggatcatgagcaattttgaataccctttagcccacactgttgctgcattgcttacagggagctacacgattacccaattcacgcacaatggacaaaaatttgttcgtgttaatcgacttgggacaggaatcccagcacatccactcagaatgctgcgggaaggaaaccaagcttttgtccaaaacatggtgattcccaggaacttttctacaaatcagtttacgtacaatcttactaatctagtattgagcgtgcaaaagcttcctgatgatgcttggcgcccgtccaaagacaaattaatcggaaacaccatgcaccctgcggtttctgtacacccaaacctgccgcctattgtcctaccaacagttaaaaaacaagcctatcgtcagcataagaatcctaacaatggaccactgctggccatatctggcatccttcatcaactgagggttgaaaaagtcccagagaagacgagcttattcaggatttcacttcctgccgacatgttctcagtaaaagagggcatgatgaagaaaagaggagaaggttctccggtagtttatttccaagcgcctgagaattttcctttgaatggcttcaacaaccggcaagttgtgctagcatatgctaacccgacactcagtgctgtttaa

SEQ ID NO: 13221 - DNA, 258 bp, unidentified
  source 1..258: mol_type = other DNA
  misc_feature 1..258: note = Synthetic
ttggagtacctcttcgtggtctcgctgtatcggctcgttgtcatgcgtgcacactggcgctttcgcgagttcgtgagcaagatgattaactgctttctcgagggcttcggcgtttgcttctgcgccatgcgcgtgaacgactgcgtggacaacgagctcgcagaatacatgcaggacaacggcgcgcccttccacacctaccacctctacgccaaggtaatactagtaatcttggagcacctaaatggaactcgctaa

SEQ ID NO: 13222 - DNA, 210 bp, unidentified
  source 1..210: mol_type = other DNA
  misc_feature 1..210: note = Synthetic
gtgcgcagacgaatggctgagtttatgccgctggtggtagacacgaacagagctgagtgtctaaccgcctgggcgggtgccggagctcctgagagcggagtcaaggggcctatcgggcaggcggtaatccagcggaaccgggcccccctcgatggaagaaagatggctgacggtagcgtactgcgcacacggattattctgcagctgtaa

SEQ ID NO: 13223 - DNA, 219 bp, unidentified
  misc_feature 1..219: note = Synthetic
  source 1..219: mol_type = other DNA
acggtaaacaacacttttatttttgagcacatgtgcaataccgccatgttcatgagcaggcagtaccatatgtggcccccacggaaagagaatatcgtggtcttctccatcgcttacagcttgtgcacggtgctaatcaccgcgatcgtgtgcctgagcattcacatgctcatcgctattcgccccagaaataatgctgagaaagagaaacagccataa

SEQ ID NO: 13224 - DNA, 42 bp, unidentified; identical to SEQ ID NO: 5048
  misc_feature 1..42: note = Synthetic
  source 1..42: mol_type = other DNA

SEQ ID NO: 13225 - DNA, 48 bp, unidentified; identical to SEQ ID NO: 5049
  source 1..48: mol_type = other DNA
  misc_feature 1..48: note = Synthetic

SEQ ID NO: 13226 - DNA, 126 bp, unidentified; identical to SEQ ID NO: 5052
  source 1..126: mol_type = other DNA
  misc_feature 1..126: note = Synthetic

SEQ ID NO: 13227 - DNA, 126 bp, unidentified; identical to SEQ ID NO: 5052
  source 1..126: mol_type = other DNA
  misc_feature 1..126: note = Synthetic

SEQ ID NO: 13228 - DNA, 228 bp, unidentified
  misc_feature 1..228: note = Synthetic
  source 1..228: mol_type = other DNA
atgggtgccctctggtctctttgccgacgacgagtcaactccataggcgacgtggacgggggaataatcaacctgtataatgactatgaggagtttaacctggagactactaagctaatagcggccgaagaagggagggcctgcggggaaaccaacgaggggctcgaatatgatgaggactctgaaaatgatgaattgctgtttttgccaaataaaaaaccaaactaa

SEQ ID NO: 13229 - DNA, 228 bp, unidentified; identical to SEQ ID NO: 13228
  misc_feature 1..228: note = Synthetic
  source 1..228: mol_type = other DNA

SEQ ID NO: 13230 - DNA, 39 bp, unidentified; identical to SEQ ID NO: 5054
  misc_feature 1..39: note = Synthetic
  source 1..39: mol_type = other DNA

SEQ ID NO: 13231 - DNA, 39 bp, unidentified; identical to SEQ ID NO: 5054
  misc_feature 1..39: note = Synthetic
  source 1..39: mol_type = other DNA

SEQ ID NO: 13232 - DNA, 144 bp, unidentified
  source 1..144: mol_type = other DNA
  misc_feature 1..144: note = Synthetic
atgtataataagatcaagaactcacaaaatccaagtccgaatgtaaacttgcctcctccagaaacaagaaataccaggtttgtaaataatctggaaaaggatcatattagttcattgtataatctagttaaatcttctgtataa

SEQ ID NO: 13233 - DNA, 48 bp, unidentified; identical to SEQ ID NO: 5056
  source 1..48: mol_type = other DNA
  misc_feature 1..48: note = Synthetic

SEQ ID NO: 13234 - DNA, 528 bp, unidentified
  source 1..528: mol_type = other DNA
  misc_feature 1..528: note = Synthetic
atgtggccgcttctaaaaaacaacgtagtccggacgggtcgcagatacgcggtttttcaacctcgacggtttacgcctcgcccccaacatgacgcgttcgggacgaaagacgacgtcaggggattcacggtatttagccatgcagcgtgcggcgcctctctcatggatccactgtcaccgtcgcgatgggaggtagccctgttccccagctcaccaccgtcactcaaggactcatgccatctgtgcgcatggactttcgggctcgccggcccttgcgccgcttggctttctacgcgccgcgagctcgtcggaggcttttccagaatcatatacatccagaacagcgccgagtgctggtcggtgagggagatgaagagatgttgccggatctgccgatggagatcgacatcgtcatcgaccgacctccgcagcaacccctacccaatccgctggtgctactgctggacgatgttcccccccatgtacccggttttgctccctaccgcgtcccccgtccccaccccatga

SEQ ID NO: 13235 - DNA, 6753 bp, unidentified
  source 1..6753: mol_type = other DNA
  misc_feature 1..6753: note = Synthetic
atcggtgtccctgccgccggcctcgccatgaaagtcacacaggccagctgccaccagggcgacatcgctcgctttggagcgcgagcgggcaatcaatgcgtctgcaacggcatcatgttcctacacgccttgcacctgggtggaacgagcgccgtcctgcagaccgaggcgctggacgccatcatggaagagggcgcgcgtctggacgcgcggctagagcgcgagttgcaaaagaagctgcccgccggcgggcggctgccggtctacagactgggcgacgaagtgccgcgccgcctggagtcgcggttcggccggaccgtgcacgcgctctcgcggcccttcaacggcaccaccgagacgtgcgacctggacggctacatgtgtccgggcatcttcgactttctgcggtacgcgcacgccaaaccgcgtcccacctacgtactcgtcaccgtcaactcgttggcgcgcgccgtggtcttcaccgaggaccacatgttggtctttgatccgcacagctccgcggaatgtcacaacgccgccgtgtatcactgcgagggtctccatcaggtgctgatggtgctcacgggcttcggcgtgcagctgtcgcccgctttctactatgaggccctttttctctacatgctggatgtggcgaccgtaccagaggctgagatcgccgcgcgtttggtctccacctatcgcgaccgcgatatcgacctcaccggcgtcgtccgagaaagcgcggacacggcagcgacaacgaccaccgccgcaccttccttacctccgctgcccgaccccatcgtcgacccgggttgccctcctggcgtggcgcccagcattcccgtctacgatccctcgtcctcacccaaaaaaacacccgagaaacgccgcaaggacctcagcggtagcaaacacggaggcaaaaagaaacccccgtccacgacgtccaaaacactggccaccgcctcctcctccccctcagcgatagcggcggcctcttcttcgtccgcggtaccaccgtcctacagctgcggcgaaggggccctgccggccctgggccgctaccaacagctggtcgacgaggtagagcaggagttgaaggctctgacgctgccgccgttgcctgccaacaccagcgcctggacgttgcacgcggcgggtaccgaaagcggcgctaacgcggcaacggccacggcgccgtccttcgacgaagctttcctcaccgatcgtctccagcagctcatcatccatgccgtcaatcagcgctcgtgtctgcgtcgcccctgcggtccgcaatcggcggcgcagcaggcggtacgcgcctatctgggcctatccaagaaactggatgcctttctgctcaactggctgcaccacggcctggatctgcagcgcatgcacgactacctgagccacaagaccaccaaaggcacgtactcgacgctggatcgcgcactgctggagaaaatgcaagtcgtcttcgatccctacggacgtcagcacggcccggcgctcatcgcctgggtggaggagatgctgcgctacgtggaaagcaagcccactaacgaactgtctcaacgactgcaacgtttcgtaaccaagcgaccgatgcccgttagcgacagcttcgtctgcctgcgacccgtagactttcagcgtctgacgcaggtcatcgaacagcgacgtcgggtgttgcaacgtcaacgcgaggaataccacggcgtttacgagcacttggccggcctcatcaccagcatcgacattcacgacctagacgccagcgatctgaaccgacgcgaaattctgaaagcgctgcagccgttggacgacaacgccaagcaggaactctttcgcctgggcaacgccaaaatgctagagttgcagatggacctggaccgtctgagcacgcagctgctgacgcgcgtgcacaatcacatccttaacggctttttgccggtagaggacctgaagcagatggaacgcgtcgtcgagcaggtactgagactcttttacgacctgcgcgacctgaaactgtgtgacggcagctacgaagagggattcgtcgtcatacgcgaacaactgagctacctcatgacgggcactgtgcgcgacaacgtaccgctactgcaagagatcctgcagctgcgacacgcgtaccagcaagccacgcagcaaaacgagggtcgcctcacgcagatccacgacctgcttcatgtcatcgagacgctggtgcgcgacccgggcagccgcggctcggcgctgacactggccttggtacaggagcagctagctcagctggaagcgctaggcggcctgcagctacccgaagtgcagcagcgcctacagaacgcgcaactcgcgctaagccgcctctacgaagaggaagaggaaacgcagcgtttcctcgacggactctcgtacgacgatccgcccaccgaacagaccatcaagcgacacccacaattacgcgagatgttacgtcgcgacgaacagacgcgtctgcgactcatcaacgccgtactgagcatgttccacacattagtgatgcgactggcgcgcgacgagtcgccgcgaccgacgttttttgacgccgtcagtctgttattgcagcaactgccacccgactcgcatgaacgtgaggatctgcgtgccgccaacgccacgtacgcgcagatggtcaagaaactggagcagatcgagaaagccggtaccggcgcatccgaaaaacgcttccaagcgttacgggagttggtttactttttccgtaatcatgaatatttctttcaacatatggttggacgactgggcgtcggacctcaggtaacggaactctacgagcgatatcaacacgagatggaagaacagcacctggaacggctggaacgtgaatggcaagaagaggccggcaagctcacggtaacttctgtggaggacgtgcagcgtgtcttggcccgggcaccgagccatcgtgtcatgcatcaaatgcaacaaacgttaaccaccaagatgcaagactttttagacaaggagaaacgtaaacaggaagaacagcaacggcagctactggacggctaccaaaaaaaggtacagcaggatttgcaacgcgtggtggacgccgttaagggcgagatgctctccaccatcccgcaccaaccactggaggccacactcgagctgctcttgggcctagatcaacgcgcccaaccgctactggacaagttcaaccaggacttgctgtcggcgctgcagcagctgagcaaaaaactagacgggcggatcaacgagtgtctgcacggcgtgctaacgggtgatgtagagcggcgctgtcacccgcaccgagaagcggctatgcaaacccaagcctcgctaaaccacttggaccaaattttgggtccacaactcctgatccatgagacgcagcaggccctgcaacacgccgtccatcaagcgcagttcatcgagaagtgtcaacagggcgatccaactacagccatcacgggtagcgaattcgagagcgactttgcacgctaccgcagcagtcaacagaagatggagggacaattacaagagactagacaacagatgaccgagactagcgagcggctagatcgctcgctgcgccaggatcccgggagcagctccgtcacgcgtgtacccgagaaacctttcaagggtcaggagctggcgggtcggatcacgcccccgcccgccgacttccagcggcccgtcttcaaaacgctgctagatcagcaggccgacgcggcccggaaagcgctcagcgacgaggccgatctgctgaatcagaaagtacagacgcagttgcgacaacgcgacgagcagctgagcacggcgcagaacctgtggactgatctggtcacgcgccacaaaatgagcggcggactggacgtgaccacccccgacgccaaggcgctgatggaaaagccgctggagacacttcgcgagctgttgggcaaagccacgcaacaactgccgtacctgtcggcggagcgcacggtgcgctggatgctggcttttctggaggaagcccttgcgcaaatcaccgcggaccctacgcacccgcatcacggaagcaggacccactaccggaacctgcaacagcaagctgtcgagagcgccgtgacgctagcgcatcaaatcgaacaaaacgcagcctgtgaaaattttattgcacagcatcaagaggcgactgccaacggcgcgtccacgccgcgggtcgacatggtccaggcggtggaagcggtctggcagcgactggaacccggacgcgtagccggcggcgccgcgcgtcatcaaaaagtgcaggaactgttgcagcgcttgggtcagacgctaggcgacctagaactgcaggaaacgttggcgacggaatactttgcgctgttacacggcatccagaccttcagctacgggctggactttcggtcgcagttggaaaagatccgcgatctgcggactcgttttgcggaactggccaagcgatgcggtacacgtctctccaacgagggagccctgcccaacccacggaaaccgcaggcgacgacttcgctgggcgcctttacacgcgggttgaacgcactggaacgacacgtccagctgggtcaccagtatctgctcaacaagctcaacggctcatcgctagtctataggctggaagacattcctagcgtgcttccgccaacacacgagaccgaccccgcgctgatcatgcgcgaccgcctgcgtcgtctatgcttcgcgcgtcaccacgacacctttcttgaagtggtagacgtcttcggcatgcggcaaatcgtcacgcaggccggcgagcccatttacctggtcaccgattacggcaacgtagcctttaagtacttggcgctgcgagacgatggccgacccctggcatggcggcgccgctgtagcggcggaggactcaagaacgtcgtcaccacacgttataaagccatcacggtagccgtggccgtctgtcagacattgcgcactttctggccgcagatctcgcagtacgacctacggccctacctcacgcagcatcagagccacacgcaccccgcggagactcacacgttacataaccttaagctcttttgttatctggtgagcaccgcctggcaccagcgcatcgacacgcagcaggagctgacggccgccgatcgcgtaggcagcggcgaaggtggtgacgtaggggaacagagaccgggccgcggcaccgtgctgcgtctgagtctccaagagttttgtgtactcatagcagctctgtaccccgagtacatctacaccgtcctcaagtacccggtgcagatgtcgctaccctccctcacagctcacctacatcaggatgtaatacacgcggtagtcaataacacacacaaaatgccccccgaccacctccccgaacaggtcaaggctttctgtatcacccccacccaatggcccgccatgcagctcaataaactgttttgggaaaataaactggtgcagcaactgtgccaggtaggcccgcaaaaaagcacaccatccctaggcaagctatggctctacgccatggccacgctggtctttccacaagacatgctgcagtgtctgtggctagaactgaaaccccagtacgccgagacctacgcctcggtgtccgaattggtacagacgttgtttcagattttcacgcaacaatgcgagatggtgaccgaggggtacacgcaaccgcagctccccaccggagagccggtgcttcagatgatccgcgtgcgacgccaagacacaaccaccacagacacaaacacgaccacagagccaggacttttagatgtttttattcaaacagaaaccgccctagactacgcgctgggctcctggcttttcggcatacccgtgtgtctcggcgtgcacgtagccgacctgctgaaaggccaacgtgtattagtagcgcgccacctcgaatacacgtcgcgagaccgcgacttcctccgcatccaacgctcccgggacctcaatctcagtcaactgctccaggacacgtggaccgaaacgccgctggagcactgctggctacaagcccaaatcagacggctacgcgattacctgcgtttccccacccgcttagagtttattcccctagtcatttacaacgcacaggaccacaccgttgtacgcgtgctgcgaccgccctccacgttcgaacaggaccacagtcggctggtgttggacgaggccttccccaccttcccgctgtatgaccaagatgataacacatccgcggacaacgtcgctgcgtctggcgccgctccaacaccgccggtacctttcaaccgcgtaccagtcaatattcagtttctgcgtgaaaacccgccacccatcgcacgagttcagcagccgccgcgccgacatcgtcatcgagcggccgcggccgcagacgacgacggacagatagatcacgcacaagacgatacatcaaggacagccgactctgcattagtctccaccgcctttggcgggtccgtctttcaagaaaaccggctgggagaaacaccactatgtcgagatgaacttgtggccgtggcacccggcgccgccagcaccagtttcgcctcgccgcctatcacggtgctcacgcagaacgtcctcagtgctctagaaatattgcgactagtgcgattggacctgcgacaactggcgcaatccgtacaggacactattcaacacatgcggtttctctatcttttgtaa

SEQ ID NO: 13236 - DNA, 234 bp, unidentified; identical to SEQ ID NO: 12547
  misc_feature 1..234: note = Synthetic
  source 1..234: mol_type = other DNA

SEQ ID NO: 13237 - DNA, 234 bp, unidentified; identical to SEQ ID NO: 12547
  source 1..234: mol_type = other DNA
  misc_feature 1..234: note = Synthetic

SEQ ID NO: 13238 - DNA, 234 bp, unidentified; identical to SEQ ID NO: 12547
  misc_feature 1..234: note = Synthetic
  source 1..234: mol_type = other DNA

SEQ ID NO: 13239 - DNA, 63 bp, unidentified; identical to SEQ ID NO: 5062
  misc_feature 1..63: note = Synthetic
  source 1..63: mol_type = other DNA

SEQ ID NO: 13240 - DNA, 297 bp, unidentified
  source 1..297: mol_type = other DNA
  misc_feature 1..297: note = Synthetic
atgaccagcaacgccctgtatgagctgtttcgacgtcggttaccgcgtgcccccgtcaacacggtcatgtttctcacgcgacgcactcgtgatgggttctgcggtcggttgacgtccatcgccacgaattcccactacactatgttcgtgttagatcacggatccgtgcgcatcgagcgaccgagtcagtcagaagtggattgcgccagtttaatggaaacgctgaagcggattcggttacgaaattcgtgggtagcgtcagaagacgagctagatgtgagtcgcagggacgcgtga

SEQ ID NO: 13241 - DNA, 102 bp, unidentified; identical to SEQ ID NO: 5064
  source 1..102: mol_type = other DNA
  misc_feature 1..102: note = Synthetic

SEQ ID NO: 13242 - DNA, 51 bp, unidentified; identical to SEQ ID NO: 5068
  source 1..51: mol_type = other DNA
  misc_feature 1..51: note = Synthetic

SEQ ID NO: 13243 - DNA, 51 bp, unidentified; identical to SEQ ID NO: 5068
  source 1..51: mol_type = other DNA
  misc_feature 1..51: note = Synthetic

SEQ ID NO: 13244 - DNA, 18 bp, unidentified
  source 1..18: mol_type = other DNA
  misc_feature 1..18: note = Synthetic
atgagtatgtcaaaatag

SEQ ID NO: 13245 - DNA, 132 bp, unidentified
  misc_feature 1..132: note = Synthetic
  source 1..132: mol_type = other DNA
attttggccaccagtcccttttccaggaaagggtactccacagccttgatttttccagcccagggcgcactacagccggggttgcttttgtggtttttttggttgacaaatggagccaggacacccaactaa

SEQ ID NO: 13246 - DNA, 765 bp, unidentified
  source 1..765: mol_type = other DNA
  misc_feature 1..765: note = Synthetic
atgcaggcgcaggaggctaacgcgctgctgctctcccgcatggaggctctcgagtggttcaaaaagttcaccgtatggctgcgcgtgtacgccatcttcatctttcagctggctttcagcttcggcttgggaagcgttttttggttggggttcccacaaaaccgcaacttttgcgtcgagaactacagcttctttctcaccgtgctcgtgcccatcgtctgcatgttcatcacgtacacgttgggcaacgaacaccctagtaacgccacggtgcttttcatctatctgttggccaacagcctgacggcggccatcttccaaatgtgctctgaaagccgcgtactagtaggttcctacgtgatgaccctggcgttgtttatctcctttacggggctggcgtttctaggtggccgtgaccgacgtcgctggaaatgcatcagctgcgtctacgtggtgatgctgctttcgttcctcacgctcgctctgctaagcgacgccgattggctgcagaagatagtggtgacgttgtgcgccttctctatcagcttctttttgggtattctggcctacgacagtctcatggtcatctttttctgcccacctaaccaatgcatccgtcacgccgtctgtctctacctggacagcatggccatctttctcacgttgttgctcatgctctcgggtccccgttggattagtctttcggacggcgcgcctttggacaacgggactttgacagccgccagtacgacggggaagtcctaa

SEQ ID NO: 13247 - DNA, 21 bp, unidentified
  misc_feature 1..21: note = Synthetic
  source 1..21: mol_type = other DNA
gtgcgaaaatcaatgctttaa

SEQ ID NO: 13248 - DNA, 273 bp, unidentified
  misc_feature 1..273: note = Synthetic
  source 1..273: mol_type = other DNA
atgactctgtccgccagcagacctcggtacattcccgggaaggcgtatcgcaatctaacaaaaaatgatatggagaacatgctagacaattgggagatttcgcgcaccaatcttaagacttgcaaagaactacgtaaagccctcaccgaggcctcgagagcaaggcggaaacaaacaatttataaactgcaaggctcggatataagcctctccgttagtgaagttggagttttcgggcaacatgcatctccgggggtgtgcgtgtcatcttag

SEQ ID NO: 13249 - DNA, 273 bp, unidentified
  misc_feature 1..273: note = Synthetic
  source 1..273: mol_type = other DNA
atgactttgtccgccagcaaacctcggtacatcccgggaaaggcgtatcgcaatctaacaaaaaatgatctggagaacatgctagacaattgggagatttcgcgcaccaatcttaagacttgtaaagaactacgtaaagccctcaccgaggcctcgagagcaaggcggaaacaaacaatttataaactgcaaggctcggatataagcctttccgttagtgaagttggagtttttgggcaacatgcatctccgggggtgtgcgtgtcatcttag

SEQ ID NO: 13250 - DNA, 18 bp, unidentified
  misc_feature 1..18: note = Synthetic
  source 1..18: mol_type = other DNA
acgacgcccagctgttga

SEQ ID NO: 13251 - DNA, 1776 bp, unidentified
  source 1..1776: mol_type = other DNA
  misc_feature 1..1776: note = Synthetic
atgatcgtcttaccgaataaagttcgtattttcatcaatgatcggatgaaaaaggatatctacttgggaatttctaatttcggattcgagaatgatatagatgaaatcttgggaattgctcacttgttggaacatctacttatatcctttgattctactaattttttagcgaatgcttctacatctagaagttatatgagtttttggtgtaaatccattaattcagcgacggagtcagacgcaatcagaacattagtttcgtggttcttttctaacggaaaactcaaagataatttttccctttctagtatacgatttcacattaaagaattagaaaacgaatactattttagaaatgaggtattccattgtatggatatactaacgtttcttagcggaggcgatttatataacggtgggagaatagacatgatagataatcttaatatagttcgtgatatgctggtaaatagaatgcaaaggatatcgggatcgaatatcgtaatttttgtcaagagattaggacctggaacattggatttcttcaaacagacatttgggtctttaccagcatgcccggagattattccttcatatattccagtaagtacaaacggtaaaatagttatgactccgtctccattttatacagttatggtaaagattaatccaacattagataatattttagggattctgtatttgtacgaaacttaccacttaatagactatgagactatcggcaaccagttatatttaacggtatcctttatcgatgaaactgaatacgagagctttcttcgtggcgaggctatattacaaattagtcaatgtcaaagtattaatatgaattatagcgacgattatatgatgaacatctatttgaattttccttggctatcacatgatttatatgattacattacacgtattaatgacgatagcaagtcgatactaatatccttgacgaatgaaatatatgcatctataattaatagagatatcatagttatttacccaaactttagtaaggccatgtgtaacactagagatacccaacaacatccgatagtagttcttgacgcaaccaatgatggactgattaagaaaccttatagaagtatacccctaatgaagcgtctaacatctaatgaaatatttatacgatacggagacgcgtctctcatggacatgataactttatcattatctaaacaagatatatcattaaaaagaaatgccgaaggaatacgtgtaaaacatagtttttcggcggatgatatacaggccattatggaatctgattcgtttttaaagtatagtagatcaaaaccagctgcgatgtatcaatatatatttctatcattttttgctagtggtaattccatagatgacatattggcaaatagagattctaccttagaattttctaaaagaactaaaagtaaaattttgtttggtaggaataccaggtacgacgtcactgcaaaatctagttttgtatgtggtatagtacgaggtaaatcattggataaaacgtctttggttgaaatgatgtgggatctcaagaagaaaggattaatatattctatggaatttaccaatttattgagcaagaataccttttatctgttcacatttactatctacactgatgaagtatacgattatctaaataataataaacgtttttctgcaaaatgtttagtcgtgtctacaaaaggagatgtggaaaatttttcatctctaaaaaaagatgtggtaattagagtttga

SEQ ID NO: 13252 - DNA, 69 bp, unidentified
  misc_feature 1..69: note = Synthetic
  source 1..69: mol_type = other DNA
atgaaatcttgggaattgctcacttgttggaacatctacttatatcctttgattctactaattttttag

SEQ ID NO: 13253 - DNA, 258 bp, unidentified
  misc_feature 1..258: note = Synthetic
  source 1..258: mol_type = other DNA
atgatatcttacagggagacctcgactcagacggaatgctcacggaaagagcttatgagagaattactggagataatagatgtgaccagccaaccagaatgggggatgtcccccatagggtcccccccagaaagcgagtcagattcagactctctgatagaaaactccagcacaggaagcgggagctcatcagaattttattgggaagacgagaccaacccagggggggagggtccccccctagtccccccccagtag

SEQ ID NO: 13254 - DNA, 177 bp, unidentified
  source 1..177: mol_type = other DNA
  misc_feature 1..177: note = Synthetic
aggctgccctgctccactatgttgaccctgataccggtcggaatcttggggaattcaaagcataccctgatggtttcctcacttgtgtccccaatggggctagctcgggtccacaacagctgccgatcaatggggtctttgtctttgtttcatgggtgtccagattttatcaattaa

SEQ ID NO: 13255 - DNA, 177 bp, unidentified; identical to SEQ ID NO: 13254
  source 1..177: mol_type = other DNA
  misc_feature 1..177: note = Synthetic

SEQ ID NO: 13256 - DNA, 513 bp, unidentified
  source 1..513: mol_type = other DNA
  misc_feature 1..513: note = Synthetic
atgcccaagaccagacgccagcgaactcgccgagcacgccgcaacagaccaccaacaccatggcccatttcccaggatttggacagagcctcctatatggataccccgtctacgtgtttggcgattgtgtacaggccgattggtgtcccgtctcaggtggtctatgttccacccgcctacatcgacatgccctcctggccacctgtccagagcaccaactcacctgggaccccatcgatggacgcgttgtcagctctcctctccaataccttatccctcgcctcccctccttccccacccagagaacctcaaggaccctcaaggtccttacccctcccaccactcctgtctcccccaaggttccacctgccttctttcaatcaatgcgaaagcacaccccctaccgaaatggatgcctggaaccaaccctcggggatcagctcccctccctcgccttccccgaacctggcctccgtccccaaaacatctacaccacctggggaaaaaccgtag

SEQ ID NO: 13257 - DNA, 195 bp, unidentified
  source 1..195: mol_type = other DNA
  misc_feature 1..195: note = Synthetic
atgtcgaacacctcctgctttgcacgcgtgtggttgcttgcatgttctctttgttcctgcggaacgcgcatggttgtgcttgttctctttaacgcgtgcggtgacttgccgtgttctaaggagcgagaagacattgccttttgcacagtgtgccgagagcatgctgtctctgtccctgcatacacttcctgctag

SEQ ID NO: 13258 - DNA, 546 bp, unidentified
  source 1..546: mol_type = other DNA
  misc_feature 1..546: note = Synthetic
ctgccatccatggaggtttgggctatcttggaagacctcagacagactaagctactgctagaaaacgcctcggacggagtctctggcctttggagattctggttcggtggtgatctagctaggctagtgtttaggataaaacaggactacagggaagaatttgaaaagttattggacgatagtccgggactttttgaagctcttaacttgggtcatcaggctcattttaaggagaaggttttatcagttttagatttttctactcctggtagaactgctgctgctgtagcttttcttacttttatattggataaatggatccgccaaactcacttcagcaagggatacgttttggatttcatagcagcagctttgtggagaacatggaaggctcgcaggatgaggacaatcttagattactggccagtgcagcctctgggagtagcagggatactgagacacccaccgaccatgccagcggttctgcaggaggagcagcaggaggacaatccgagagccggcctggaccctccggtggaggagtag

SEQ ID NO: 13259 - DNA, 57 bp, unidentified; identical to SEQ ID NO: 5095
  misc_feature 1..57: note = Synthetic
  source 1..57: mol_type = other DNA

SEQ ID NO: 13260 - DNA, 57 bp, unidentified; identical to SEQ ID NO: 5095
  misc_feature 1..57: note = Synthetic
  source 1..57: mol_type = other DNA

SEQ ID NO: 13261 - DNA, 120 bp, unidentified
  source 1..120: mol_type = other DNA
  misc_feature 1..120: note = Synthetic
atggagttttcttatggattattaagggtcagcttgaaggatgatgttaatgacataaaggggcgtggcttccaaaaatgggtggctaacctgtccaaaatatgggaacactggagataa

SEQ ID NO: 13262 - DNA, 120 bp, unidentified; identical to SEQ ID NO: 13261
  misc_feature 1..120: note = Synthetic
  source 1..120: mol_type = other DNA

SEQ ID NO: 13263 - DNA, 1776 bp, unidentified
  source 1..1776: mol_type = other DNA
  misc_feature 1..1776: note = Synthetic
atgatcgtcttaccgaataaagttcgtattttcatcaatgatcggatgaaaaaggatatctacttgggaatttctaatttcggattcgagaatgatatagatgaaatcttgggaattgctcacttgttggaacatctacttatatcctttgattctactaattttttagcgaatgcttctacatctagaagttatatgagtttttggtgtaaatctattaattcagcgacggagacagacgcaatcagaacattagtttcgtggttcttttctaatggaaaactcaaagataatttttccctttctagtatacgatttcacattaaagaattagaaaacgaatactattttagaaatgaagtattccattgtatggatatactaacgtttcttagcggaggcgatttatataacggtgggagaatagacatgatagataatcttaatatagttcgtgatatgctggtaaatagaatgcaaaggatatcgggatcgaatatcgtaatttttgtcaagagattaggacctggaacattggatttcttcaaacagacatttgggtctttaccatcatgtccggagattattccttcatctattccagtaagtacaaacggtaaaatagttatgactccggctccattttatacagttatggtaaggattaatcccacattagataatattttagggattctgtatttgtacgaaacttaccacttaatagactatgagactatcggcaaccagttatatttaacggtatcctttatcgatgaaactgaatacgagagctttcttcgtggcgaggctatattacaaattagtcaatgtcaaagtattaatatgaattatagcgacgattatatgatgaacatctatttgaattttccttggctatcgcatgatttatatgattatattacacgtattaatgacgatagtaagtcgatattaatatccttgacgaatgaaatatatgcatctataattaatagagatatcatagttatttacccaaactttagtaaggccatgtgtaacactagagatacccaacaacatcagatagtagttcttgacgcaaccaatgatggactaattaagaaaccttatagaagtatacccctaatgaagcgtctaacatctaatgaaatatttatacgatacggagacgcatctcccatggacatgataactttatcattgtctaaacaagatatatcattaaaaagaaatgccgaaggaatacgtgtaaaacatagtttttcagctgatgatatacaggcaattatggaatctgattcgtttttaaagtatagtagatcaaaaccagctgcgatgtatcaatatatatttctatcattttttgctagtggtaattccatagatgacatattgacaaatagagattctaccttagaattttctaaaagaactaaaagtaaaattttgtttggtaggaataccaggtacgacatcactgcaaaatctagttttgtatgtggtatagtacgaggtaaatcattggataaaacgtctttggttgaaatgatgtgggatctcaagaagaaaggattaatatattctatggaatttaccaatctattgagcaagaataccttttatctgttcacatttactatctacactgatgaagtatacgattatctaaataataataaacttttttctgcaaaatgtttagtcgtgtctacaaaaggagatgtggaaaatttttcatctctaaaaaaagatgtggtcattagagtttga

SEQ ID NO: 13264 - DNA, 69 bp, unidentified; identical to SEQ ID NO: 13252
  source 1..69: mol_type = other DNA
  misc_feature 1..69: note = Synthetic

SEQ ID NO: 13265 - DNA, 75 bp, unidentified; identical to SEQ ID NO: 5097
  misc_feature 1..75: note = Synthetic
  source 1..75: mol_type = other DNA

SEQ ID NO: 13266 - DNA, 1731 bp, unidentified
  source 1..1731: mol_type = other DNA
  misc_feature 1..1731: note = Synthetic
atgaaaaaggatatctacttgggaatttctaatttcggattcgagaatgatatagatgaaatcttgggaattgctcacttgttggaacatctacttatatcctttgattctactaattttttagcgaatgcttctacatctagaagttatatgagtttttggtgtaaatccattaattcagcaacggaatcggacgcaatcagaacattagtttcgtggttcttttctaacggaaaactcaaagataatttttccctttctagtatacgatttcacattaaagaattagaaaacgaatactattttagaaatgaagtattccattgtatggatatactaacgtttcttagcggaggcgatttatataacggtgggagaatagacatgatagataatcttaatatagttcgtgatatgctggtaaatagaatgcaaaggatatcgggatcgaatatcgtaatttttgttaagagattaggacctggaacattggatttcttcaaacagacatttgggtctttaccagcatgtccggagattattccttcgtctattccagtaagtacaaacggtaaaatagttatgactccgtctccattttatacagttatggtaaagattaatccaacattagataatattttagggattctgtatttgtacgaaacttaccacttaatagactatgagactatcggcaaccagttatatttaacggtatcctttatcgatgaaactgaatacgagagctttcttcgtggcgaggctatattacaaattagtcaatgtcaacgtattaatatgaattatagcgacgattatatgatgaacatctatttgaattttccttggctatcgcatgatttatatgattacattacacgtattaatgacgatagcaagtcgatactaatatccttgacgaatgaaatatatgcatctataattaatagagatatcatagttatttacccaaactttagtaaggccatgtgtaacactagagatacccaacaacatccgatagtagttcttgacgcaaccaatgatggactgattaagaaaccttatagaagtatacccctaatgaagcgtctaacatctaatgaaatatttatacgatacggagacgcgtctctcatggacatgataactttatcattgtctaaacaagatatatcattaaaaagaaatgccgaaggaatacgtgtaaaacatagtttttcagctgatgatatacaggcaattatggaatctgattcgtttttaaagtatagtagatcaaaaccagctgcgatgtatcaatatatatttctatcattttttgctagtggtaattccatagatgacatattggcaaatagagattctaccttagaattttctaaaagaactaaaagtaaaattttgtttggtaggaataccaggtacgacgtcactgcaaaatctagttttgtatgtggtatagtacgaggtaaatcattggataaaacgtctctggttgaaatgatgtgggatctcaagaagaaaggattaatatattctatggaatttaccaatctattgagtaagaataccttttatttgttcacatttactatctacactgatgaagtatacgattatctaaacactaataaacttttttttgcaaaatgtttagtcgtgtctacaaaaggagatgtagaaaatttttcatctctaaaaaaagatgtggtcattagagtttga

SEQ ID NO: 13267 - DNA, 69 bp, unidentified; identical to SEQ ID NO: 13252
  source 1..69: mol_type = other DNA
  misc_feature 1..69: note = Synthetic

SEQ ID NO: 13268 - DNA, 24 bp, unidentified
  source 1..24: mol_type = other DNA
  misc_feature 1..24: note = Synthetic
ctggcagaaccactgcagcagtag

SEQ ID NO: 13269 - DNA, 2022 bp, unidentified
  misc_feature 1..2022: note = Synthetic
  source 1..2022: mol_type = other DNA
ttgtcctgtttgtctcgcgcatacgaaattttcacaagactgagacgaagaatggcaaccgcaaggctgagcgctatgaaaccgccgagatcttgtgcgctgatatttttgtgcgcgttttcgatggcgacggccccaacgaacgctacggcccaccgacgtgcgggaaccgtgaaatccacaccgcctccagaggataaacatagctataccgcaaaatactatgacaaagacatttattttaacatttacgaaggtagaaattctacgccgaggagacggacgctatcggaaatcatttctaaattttctacctccgaaatgttaagtttaaaaagagttaaagctttcgttcccgtagatgaaaacccgactactaccttagaagatatagcagacatcctgaactacgctgtttgcgatgacaatagctgcggttgtaccatagagacacaagcacgcatcatgttcggagatatcataatctgcgttcctctctcggctgacaacaaaggagtgagaaattttaaagatagaataatgcctaagggtctatcgcaaattctctctagtagcctaggccttcacctgtctctgctttatggcgctttcgggagcaactataatagtttggcctatatgaggcgcttgaaaccactgaccgcgatgacggcgatagctttctgtccaatgactactaaattagagctacgccaaaactacaaagtgaaagagactctatgtgaactgatcgtcagtatcgagattttgaaaatacgaaacaatggcggacagactatgaagacgttaacctcgtttgcgatcgttcgaaaagacaacgacgggcaagattgggaaacctgcacgcgctttgcgcccgttaatatagaggacatattgaggtataaacgtgtcgctaatgatacgtgttgtcgtcaccgagacgtgcagcatggtcgtcgtacgttagaatcttctaactcatggactcagactcaatatttcgaaccgtggcaagatatcgttgacgtatacgtgcctataaacgatacccattgtccaaacgatagctacgtcgtgtttgaaacactgcaaggtttcgaatggtgttcacgtttaaataaaaacgagacgaagaattatttatcttccgtactagggtttagaaatgcactgtttgaaactgaggaactgatggaaaccatcgcaatgcgacttgcctcacaaatattgtcaatggtcggacagcaaggaacaactatacgcgacatagatcctgccatcgtaagcgcattgtggcactctttgccagaaaacctgacaacgactaatataaaatacgatatagccagtccgacacacatggctcccgcattatgcaccatatttgtacagaccggaacttcaaaacaacgttttagaaatgcgggattattgatggttaacaacatcttcacagtccaagggagatatactacacaaaatatgttcgaaagaaaagaatatgtatataaacacctcggacaagctttatgtcaggacggtgaaattctgtttcaaaatgaaggccagaagttttgtcgacctctcacggacaatagaacaattgtatataccatgcaagaccaagttcaaaaacccttgtccgtaacgtggatggatttcaatctagtcattagtgactacggaagagatgtgataaacaatttaaccaaaagtgctatgttggcacgcaaaaacgggccaagatatctacagatggaaaacgggccaagatatctacagatggaaacgtttatatcggatttattccgacatgaatgttatcaagataattattatgtgttagacaaaaaactacaaatgttttatccgactactcatagtaacgaattacttttttatccctcggaagctacgttgccctcaccttggcaggaacctccgttttcctcaccttggccggaacctacgtttccctcacgttggtattggctcttattaaattacacaaattactga

SEQ ID NO: 13270 - DNA, 33 bp, unidentified; identical to SEQ ID NO: 5109
  misc_feature 1..33: note = Synthetic
  source 1..33: mol_type = other DNA

SEQ ID NO: 13271 - DNA, 228 bp, unidentified
  source 1..228: mol_type = other DNA
  misc_feature 1..228: note = Synthetic
atgtccctattttaccgtgcggtagctctgggcacactaagcgctctggtgtggtacagcactagtatcctcgcagagattaacgaaaattcctgctcctcatcttctgtggaccacgaagattgcgaggaaccggacgagatcgttcgcgaagagcaagactatcgggctctgctggccttttccctagtgatttgcggtacgctcctcgtcacttgtgtgatctga

SEQ ID NO: 13272 - DNA, 21 bp, unidentified
  source 1..21: mol_type = other DNA
  misc_feature 1..21: note = Synthetic
atgttactgaagaatatatag

SEQ ID NO: 13273 - DNA, 216 bp, unidentified
  source 1..216: mol_type = other DNA
  misc_feature 1..216: note = Synthetic
gtgtttatatttttaacaataacactaagtaacgatatggcaaatcttgttaccggaataaacgatctaatatgtagtattatttttttaatagtatacacagttgtaatgttaacttctatatgcttttctgtgtttgttgtagcaatagttgttgattttttattagaagcaaaagaaaaaaattcatttttaacaataagagaaatagtataa

SEQ ID NO: 13274 - DNA, 228 bp, unidentified
  source 1..228: mol_type = other DNA
  misc_feature 1..228: note = Synthetic
atgtcagattttttaaaaattggatgtctgcgttataatgagaatcgtcggttgcatacgcaatggtttacgcaagatacggactatattaagcaggtggatgagatgttttctagagacgtcctctgtcctctccgtgagcactgtcagaggtcgcgccgggatcgaggattattaaagatatgtacgtctctagtcaggggaattaattgtattgaaagagggtag

SEQ ID NO: 13275 - DNA, 51 bp, unidentified; identical to SEQ ID NO: 5122
  misc_feature 1..51: note = Synthetic
  source 1..51: mol_type = other DNA

SEQ ID NO: 13276 - DNA, 2052 bp, unidentified
  misc_feature 1..2052: note = Synthetic
  source 1..2052: mol_type = other DNA
atattgtggggcaacaacacaatgggcgttacaggaatattgcagttacctcgtgatcgattcaagaggacatcattctttctttgggtaattatccttttccaaagaacattttccatcccacttggagtcatccacaatagcacattacaggttagtgatgtcgacaaactagtttgtcgtgacaaactgtcatccacaaatcaattgagatcagttggactgaatctcgaagggaatggagtggcaactgacgtgccatctgcaactaaaagatggggcttcaggtccggtgtcccaccaaaggtggtcaattatgaagctggtgaatgggctgaaaactgctacaatcttgaaatcaaaaaacctgacgggagtgagtgtctaccagcagcgccagacgggattcggggcttcccccggtgccggtatgtgcacaaagtatcaggaacgggaccgtgtgccggagactttgccttccataaagagggtgctttcttcctgtatgatcgacttgcttccacagttatctaccgaggaacgactttcgctgaaggtgtcgttgcatttctgatactgccccaagctaagaaggacttcttcagctcacaccccttgagagagccggtcaatgcaacggaggacccgtctagtggctactattctaccacaattagatatcaggctaccggttttggaaccaatgagacagagtacttgttcgaggttgacaatttgacctacgtccaacttgaatcaagattcacaccacagtttctgctccagctgaatgagacaatatatacaagtgggaaaaggagcaataccacgggaaaactaatttggaaggtcaaccccgaaattgatacaacaatcggggagtgggccttctgggaaactaaaaaaaacctcactagaaaaattcgcagtgaagagttgtctttcacagttgtatcaaacggagccaaaaacatcagtggtcagagtccggcgcgaacttcttccgacccagggaccaacacaacaactgaagaccacaaaatcatggcttcagaaaattcctctgcaatggttcaagtgcacagtcaaggaagggaagctgcagtgtcgcatctaacaacccttgccacaatctccacgagtccccaatccctcacaaccaaaccaggtccggacaacagcacccataatacacccgtgtataaacttgacatctctgaggcaactcaagttgaacaacatcaccgcagaacagacaacgacagcacagcctccgacactccctctgccacgaccgcagccggacccccaaaagcagagaacaccaacacgagcaagagcactgacttcctggaccccgccaccacaacaagtccccaaaaccacagcgagaccgctggcaacaacaacactcatcaccaagataccggagaagagagtgccagcagcgggaagctaggcttaattaccaatactattgctggagtcgcaggactgatcacaggcgggagaagaactcgaagagaagcaattgtcaatgctcaacccaaatgcaaccctaatttacattactggactactcaggatgaaggtgctgcaatcggactggcctggataccatatttcgggccagcagccgagggaatttacatagaggggctaatgcacaatcaagatggtttaatctgtgggttgagacagctggccaacgagacgactcaagctcttcaactgttcctgagagccacaactgagctacgcaccttttcaatcctcaaccgtaaggcaattgatttcttgctgcagcgatggggcggcacatgccacattctgggaccggactgctgtatcgaaccacatgattggaccaagaacataacagacaaaattgatcagattattcatgattttgttgataaaacccttccggaccagggggacaatgacaattggtggacaggatggagacaatggataccggcaggtattggagttacaggcgttataattgcagttatcgctttattctgtatatgcaaatttgtcttttag

SEQ ID NO: 13277 - DNA, 1116 bp, unidentified
  misc_feature 1..1116: note = Synthetic
  source 1..1116: mol_type = other DNA
atattgtggggcaacaacacaatgggcgttacaggaatattgcagttacctcgtgatcgattcaagaggacatcattctttctttgggtaattatccttttccaaagaacattttccatcccacttggagtcatccacaatagcacattacaggttagtgatgtcgacaaactagtttgtcgtgacaaactgtcatccacaaatcaattgagatcagttggactgaatctcgaagggaatggagtggcaactgacgtgccatctgcaactaaaagatggggcttcaggtccggtgtcccaccaaaggtggtcaattatgaagctggtgaatgggctgaaaactgctacaatcttgaaatcaaaaaacctgacgggagtgagtgtctaccagcagcgccagacgggattcggggcttcccccggtgccggtatgtgcacaaagtatcaggaacgggaccgtgtgccggagactttgccttccataaagagggtgctttcttcctgtatgatcgacttgcttccacagttatctaccgaggaacgactttcgctgaaggtgtcgttgcatttctgatactgccccaagctaagaaggacttcttcagctcacaccccttgagagagccggtcaatgcaacggaggacccgtctagtggctactattctaccacaattagatatcaggctaccggttttggaaccaatgagacagagtacttgttcgaggttgacaatttgacctacgtccaacttgaatcaagattcacaccacagtttctgctccagctgaatgagacaatatatacaagtgggaaaaggagcaataccacgggaaaactaatttggaaggtcaaccccgaaattgatacaacaatcggggagtgggccttctgggaaactaaaaaaacctcactagaaaaattcgcagtgaagagttgtctttcacagttgtatcaaacggagccaaaaacatcagtggtcagagtccggcgcgaacttcttccgacccagggaccaacacaacaactgaagaccacaaaatcatggcttcagaaaattcctctgcaatggttcaagtgcacagtcaaggaagggaagctgcagtgtcgcatctaa

SEQ ID NO: 13278 - DNA, 915 bp, unidentified
  source 1..915: mol_type = other DNA
  misc_feature 1..915: note = Synthetic
atattgtggggcaacaacacaatgggcgttacaggaatattgcagttacctcgtgatcgattcaagaggacatcattctttctttgggtaattatccttttccaaagaacattttccatcccacttggagtcatccacaatagcacattacaggttagtgatgtcgacaaactagtttgtcgtgacaaactgtcatccacaaatcaattgagatcagttggactgaatctcgaagggaatggagtggcaactgacgtgccatctgcaactaaaagatggggcttcaggtccggtgtcccaccaaaggtggtcaattatgaagctggtgaatgggctgaaaactgctacaatcttgaaatcaaaaaacctgacgggagtgagtgtctaccagcagcgccagacgggattcggggcttcccccggtgccggtatgtgcacaaagtatcaggaacgggaccgtgtgccggagactttgccttccataaagagggtgctttcttcctgtatgatcgacttgcttccacagttatctaccgaggaacgactttcgctgaaggtgtcgttgcatttctgatactgccccaagctaagaaggacttcttcagctcacaccccttgagagagccggtcaatgcaacggaggacccgtctagtggctactattctaccacaattagatatcaggctaccggttttggaaccaatgagacagagtacttgttcgaggttgacaatttgacctacgtccaacttgaatcaagattcacaccacagtttctgctccagctgaatgagacaatatatacaagtgggaaaaggagcaataccacgggaaaactaatttggaaggtcaaccccgaaattgatacaacaatcggggagtgggccttctgggaaactaaaaaacctcactag

SEQ ID NO: 13279 - DNA, 438 bp, unidentified
  misc_feature 1..438: note = Synthetic
  source 1..438: mol_type = other DNA
atggacagtgttgatcggctcaagacttacttagctacttatgataatttggattctgccttgcaggatgccaatgaatctgaagaaagacgagaggataaatatctccaagacctcttcatcgaagatcaaggagataaaccaactccgtcatattatcaggaagaagaatcgtcagattcagatactgactataatgctgaacatcttacgatgctgtcgccggatgaaagaatagacaagtgggaagaggacttgcctgaattagaaaatattgatgatgatataccggtgacctttcctaattggacacagcctgtaatgaaggaaaatggaggagagaaatcattgtctctgttccctccagttggactaacaaagattcaaacagagcaatggagaaaaaccattgaggcagtttgtgagagctcaaaatat

SEQ ID NO: 13280 - DNA, 171 bp, unidentified
  misc_feature 1..171: note = Synthetic
  source 1..171: mol_type = other DNA
atgccaatgaatctgaagaaagacgagaggataaatatctccaagacctcttcatcgaagatcaaggagataaaccaactccgtcatattatcaggaagaagaatcgtcagattcagatactgactataatgctgaacatcttacgatgctgtcgccggatgaaagaatag

SEQ ID NO: 13281 - DNA, 36 bp, unidentified; identical to SEQ ID NO: 5132
  source 1..36: mol_type = other DNA
  misc_feature 1..36: note = Synthetic

SEQ ID NO: 13282 - DNA, 36 bp, unidentified; identical to SEQ ID NO: 5132
  misc_feature 1..36: note = Synthetic
  source 1..36: mol_type = other DNA

SEQ ID NO: 13283 - DNA, 39 bp, unidentified; identical to SEQ ID NO: 5133
  misc_feature 1..39: note = Synthetic
  source 1..39: mol_type = other DNA

SEQ ID NO: 13284 - DNA, 84 bp, unidentified
  misc_feature 1..84: note = Synthetic
  source 1..84: mol_type = other DNA
atacatatgaacgtagatcctaataatataataccgacgttagaaaaatactatcccaactctggaagagcacaaataaattaa

SEQ ID NO: 13285 - DNA, 57 bp, unidentified; identical to SEQ ID NO: 5137
  misc_feature 1..57: note = Synthetic
  source 1..57: mol_type = other DNA

SEQ ID NO: 13286 - DNA, 90 bp, unidentified
  misc_feature 1..90: note = Synthetic
  source 1..90: mol_type = other DNA
attatgatacatatgaacgtagatcctaataatataataccgacgttagaaaaatactatcccaactctggaagagcacaaataaattaa

SEQ ID NO: 13287 - DNA, 24 bp, unidentified
  misc_feature 1..24: note = Synthetic
  source 1..24: mol_type = other DNA
atgttattgcgtctgatgccgtag

SEQ ID NO: 13288 - DNA, 90 bp, unidentified; identical to SEQ ID NO: 13286
  source 1..90: mol_type = other DNA
  misc_feature 1..90: note = Synthetic

SEQ ID NO: 13289 - DNA, 12 bp, unidentified
  source 1..12: mol_type = other DNA
  misc_feature 1..12: note = Synthetic
ctgggtgtgtga

SEQ ID NO: 13290 - DNA, 24 bp, unidentified
  source 1..24: mol_type = other DNA
  misc_feature 1..24: note = Synthetic
ttggaggcaattagatctaagtga

SEQ ID NO: 13291 - DNA, 1458 bp, unidentified
  source 1..1458: mol_type = other DNA
  misc_feature 1..1458: note = Synthetic
gtgaccaagaagacgagggtgaggatggaggctctcagcgaccgtttcaatgcactgcaagacaagttaatgacaatttatgaaagagctagtgaatccttaaaagatcaaattgaacattggaacttgttaagacaggagcaggtgttatttcattatgccagacaaagaggagtattgcgccttggttatcagccagtacctgcattaactatttcagaggctaaagctaaggaagccattgctatggttttacatttagaagcattgcaaagatcaccttacaaaaatgaaaaatggacattagtaaatacaagtgtagaaacgtttcgcacacccccagaaaattgttttaaaaagggccctaagactattgaaatagtgtatgatggcaatcctgaaaatacaatgttatacactatttggacacatatatattttgaagatgacgaaggcaactggcaaaagactgagggacatttggactatcatggtgcctattttatggatggattaaataaacaatactatatcagatttgctcaagacgcacgcagatttagtgaaactggagaatgggaagttaagtttaacaacgaaattttgtttgctcctgttaccagctccaccaactccgaagaagaaagggaccgacccgcccctgccacagaccccggctccctttcgcagacatccggaggacagtcccctgtacccactcaacggaagcaaccatctaaaggaaggtacgggcgaaaagactctggtgctacaaccgcctccagggggatccaaagacgaccgaaagcgtcaccgaggagatcacgatcgcggtcaggatcgagatcgggatcacaaggagacgcgcggaccctcctcacagtcagacgcggagaacgggaacggggacaaggaaggggacaaggaagccggggtcggggaaggagcggggacagaagcaggagcgggagcagaagcaggagcgggagcaggagaaggagcaggagcaggggcaggagcaggaacggaagggaacgggggagagcagcctccagaggccgtagagggtacagcaacaggaggtcaagatccaaatctgttggcacaagtggcataccacctgagcaagtgggaagcagcctacaaggtgttggtagacaacatagtggacgacttgcgagattattggacgacgctagggatcccccagtaattttgttgaaaggacaagccaatactcttaagtgttatcgctacagggctaaagaaaagtataaaggctattatgattgcttcagtactacatggtcatgggtcagtgcaggtagcaacgatagaataggacgctctagaatgattattagctttaccagtaaatctcaaagacaaatgtttttaagtattatgaaattaccaaagggcgttgattggtctcttgggtgctttgactctatttaa

SEQ ID NO: 13292 - DNA, 24 bp, unidentified
  source 1..24: mol_type = other DNA
  misc_feature 1..24: note = Synthetic
ttggacacaattagagctcagtga

SEQ ID NO: 13293 - DNA, 1467 bp, unidentified
  misc_feature 1..1467: note = Synthetic
  source 1..1467: mol_type = other DNA
atggaggcactcaacgctcgtttcaatgtactacaagagatgttaatggacatttatgaatcagggaaagaggatcttgaaacacaaatagaacattggaaactgttaagacaggaacaagctttattattttttgcacgtaaacacagcataatgagactggggtatcaacccgtacctccgatggcagtatctgaaaccaaagccaaacaagctattggcatgatgctaactttgcaaagcttgcaaaagtctccttttggaaaagaaaagtggactttagtaaacacaagtcttgaaacatacaatgcaccaccagcacagtgctttaaaaaaggtccttataatatagaagttatatttgatggagatcctgaaaatctaatggtatatactgcttggaaagagatttattttgtagactcagatgatatgtggcaaaaggtgcaaggtgaggtggattatgcaggtgcatattataaggatggaactatcaaacagtattatgttaccttcgctgatgatgctgttagatatgggacatctggacaatatgaagtccgcattaacaacgaaactgtgtttgctcctgttactagctccaccccaccatccacggggctacgagaatcctccaacgccagccccgttcacgacaccgtcgacgagacacccaccagcaccacagcaaccaccaccaccttcagcaccaccacagccacagccacagccacaggagcacctgaactctcatccaaaaccggtaccaggaaaggaaggtacgggcgaaaagactctagtcctacagcagcctccaactccaggaaagaggtctcgcgacgacgatccaggtctagaaccaggacccgcagacgggaagcgagcacctcaaggtcccaaaaagccagccgttccagatccagatccagatccacttccagaggatccagagggtccggaggatctgtcacaacctccagagattccagccccaagagaacccgcaggggcagagggaggggagggagaagtagaaggtcacccacccccacctccaccagtaaacgggaaagaaggcgcagccggtcaagggggggagagcctgtttctggaggggttggcatctcgcctgacaaggtgggatcaagagtacaaacagttagtggacgacatcttggacgacttggaaggttactggaggaggctagcgatcctccagtaatacttttgcgaggagacccaaatattttaaaatgttacagatacagagataagaagcgtaaattaggtttagtaaaacattatagtaccacctggtcatgggttggtgtagatggcaatgaaagaataggtagatcacgtatgcttttaagttttacttcaaacagcactagatcacagtatgttaaaattatgaagctccctaaaggtgtggaatggtcttttggtaattttgataagctttaa

SEQ ID NO: 13294 - DNA, 27 bp, unidentified
  misc_feature 1..27: note = Synthetic
  source 1..27: mol_type = other DNA
atgttagatgccagttatccattttaa

SEQ ID NO: 13295 - DNA, 165 bp, unidentified
  misc_feature 1..165: note = Synthetic
  source 1..165: mol_type = other DNA
gtggcaatttcgcaccagcgaatgaaaggtgtattgtacaagggaatatgtaccgtctttgcatccgatcagcaaaaagacaaagaaaaaaaaaaccaaacgtcatacagaaaaaacagcaaacgtcattcagaagagggaagacgttcccggcaccaagtgtag

SEQ ID NO: 13296 - DNA, 6267 bp, unidentified
  source 1..6267: mol_type = other DNA
  misc_feature 1..6267: note = Synthetic
atggaagaaatactaaacaaacaacaaatccccgagggggtaggattgtttagaccagagataaagcaatacgatgattctatcatggatgttgagataccattcttccacataactaagtgtgatggatacatgaaaatagatttggatctaaataacggtgttgattattccactattgggtcatcattgatatccaccattgaagttccagataagtctcttcccaatcttgtccatgatgtggtcttctcacatcttgccagcagcactgatgtgaggttctcatcagtgtttggagtgtatgctgattcttatgatcatctgtcccctgacttcattctaaaaacagctgccggatctcatcatgttgttgaatttacgactaacaggggtggagagagaggggcttttcaggcatgcaaagacaagttttctaaatatcacattccttgtgagaatagagctgttggaggcagggtatctctttttgtagtttctgtttatgttaggggtgtgtggtcaaatcttgatttaacagatgatgaagtcaatgaacttgtgtttagatttagactggcagtggccataatggaggaggcaaaaagatactatcctgaattaacagaagatgaaagtgagatgaccaagcaagagagagaaattcttggtattgtgtcttcaatacaaatggactggaaagagactagcctgaagtttccacacttcaaagaaaaagtatttgaggatttcttgacaatgtctgcagatgaggaatatctctctggcataatatctgaggagattaccgcatgtcaagaggatatgatggaatcaggattcattgggaaagtgacaggcattgatgagaggctcaaactgaatgaatcagagtgtaataaaatgattgacagttacttgaagagtagaggacccaactgcagagacaaattggatagtaaatccacagtccagattccgccatgggtgatgactgagtatttagatgggaaatctgtgtcttgtttgtcaggattcgaagtagagggagatcacccgatgtgcaaaatatggagatccgtcacaatcgcagctgctatgggtgacatagatcgtgctgatgatgatcctgagactgagctcaaaaaggccttagatggcagcatacaaaagagtgatgagagaagtagatatcatcgtataaaactaaatttatctaatgaagagataatttatggtgcaactttgggtgttgaagggaaatctcataaaagcaatgcccaagttgaagagtcgagaaagagaagcaaacttggattttctctagaccacgacattacaaacttggaagaatttattaataaacatgatcttgagttatttgcagaatccgatgattattttaaccctttccagattgactttgacctgagagagtcagctcagaagatacatcagccagacttgatcatggaccaaggtgaaaatgagttcctagcaaaccacaagaaattgtgcatgtctaagctaggctcttggtgtcaaatggtttcactgattggtgcggaattatcagcatcagttaaacagcatgtggggaaaggacaatttgtgatcaaaagagtattgaattctcctcttttcatgctaatcaaacccacatcttctgttagtcatatttttgtttcttttgcactcgtgaaatctagtcacatgggagatctgtgggataatggtgtcttcaagcattacatcgatgcaggagacttgttcatcactgattttatttcttacaagcttagcaaactgaccaatctttgtaagtgtttccctcttatggagagtgcaatctgtttctggactgaaatatttggttttgagccttggaattccacatacataatgtctacagacaggagtgggagttcaaaagaagcagcttcaatgatcaaactgactctgctaacacttatggaagataaagcagtcactgaagagattcagaccattcaaagatacataattatggaagggttcgtttctttgccagaactgccaaaaccacacaaaatgttgtcaaaactaccagctgtgctaaggtcagagttgcaagtgtatctagtcttaaggtctctgagaacaatggaaagaatatctagacatccttttaggctgcagaaaaaacatagccaaatctcctggtcagggctgttcaatcctttaactggaaactccctcagggagctccaaccactaattagcatatgttataatggatatttcaaaaacaaggaggaagaaactgaaccctctgcattatcaagattatacaagaaaattattgaactagagcatctatgcccaactgatgacatctatttaggatcaggcgacccaaaagagccaaagatgcatgagtttagcaggtcatttctaaaaaaatgtactgatcatgggaaaaccatattaagaaaaatctatggtcagaattttatgcagcagatagacactcagattatgagggagattagtaccatcactcttgaaaaacttgcaacattgaaagctagtagtaattttgatgagaagtggtatgactatgagaagtgcaacaaagaagactatcatcgtgagaaggctattgttaagatgtctgaatttgctgcatctgggaagacattagctatagaagtctttgatgaatgtatgaaatttgtggagaaaagaggcaacatgcacatctgtctttttaagaagcaacagcatggtggagatagggagatttatgtcttgggtagagaagaaagaataattcaatctatagttgaggcaatatctaggtcaattggtagattctttccctcagatactctgtgcaatcctggcaacaagattaaaatacctgaaacacacggaataagagctagaaaacactgtaaaggtgctgtgtggacttgttccacatctgatgacgctaggaaatggaatcaaggtcactttgttacaaaatttgctttaatgctgtgcgagttcacccttcctaaatggtggccaatcatcattaggggatgctcgatgttcaccaacaaatacatgatgatgaacatgaggtatatcagcattttaagcaggcacaaggaattggatattgaagatgagttttctagaactatattcaaagcttttcatggtgaggtgacagtgccatggatggatgcaggggccacctttctgaaaacaaaaacagggatgatgcaagggatattacatttcacctcttctctcttacacacacttcaccaagaattcattaggtcattatcttttaaaatcttcaacaccaaagtgaggccagaaatgtcgcaatcagtagtgattgacatgatgcagggctctgatgatagcagcatgatgatcagcttcccatgttctaatgaagatcaactaatgaagtgtaagatagctgctgctatttgcttcaggataaagaaaagattaggagtcttcttagccatttatccttcagaaaaatccacttctaatactgactttgtgatggaatataattcagagttcttcttccactctcagcatgtccgtccaacagttaggtggatagctgcatgctgtaaccttcctgaagtagagactttagttgcaaggcaagaagaggcttctaacttgatgacttctgtgtcagaaggagggggctcattttccttagcagcttgtatccagcaggctcaatgtaccctgcattacatgttgatggggatgggggtcagttctttatttgaagaatacaaaaaagcaatcatacggtggaaggatcctggcctaggtttcttcttgctagataatccttactgtgcaggattaggaggattcaggttcaacctgtataaagccattgcccagacaccactaaaatgtctttattcatactttatgaagaaggtcagacacggtttagagaccaatgatgggacaataccagagagctgctcagtcagtccaggtggtgctattgtgttgagttcagcacttaggtggggctcaaaacaaaagttttacaaacttagagataagttgaatatccctgaagactggattgatcaaattaatcaaaatccatctatattatacagagctcccagatctggtgaagaagtcattcttaggattgctgaaaaagtgcattcacctggagttgtttcatccttatcaacaggcaatgcagtggccaaggtcattgcctcatctgtgtatttcctaagtgcagccatattccaggactctggcagacaagaattctccattttagatgactcaaagtacagcttattgcaaaagctgagtaagctagaaggaattaatctaaccaatgcaatcagtgatgaagatctattgttcttatttccaaacattgaagatctgcaatctcttgatagtttggtgtataatcgaggagctattgagattgtaaaaagaaaacagataaaagaaaacacacagtctagagttatcgtctttgagggaaacagaaatctcagaacccctgctgagtatttaataagtgataaatggtttgggactcagaaaagcaaaattgggagaacagcatttgaccaagagtgggtcaaggttacatcaatcatcccctggctaagagaaagcccacaagaaactcttcagagctctccactggacaatcacatccaaataagaaatttcttctctaggatggatcaaaagccgagggtagttagagtaacaggtgcaccaataaagaaaaggtcaggagtcagcaagttgtcgatggtcataagagataacttctcaaaattaggatttattagagacatagaagatataactggaacaagtagaacaaattctgcagagttgctcaaacacttcatgttttgtgctctacagggtccatattcccaggagagaaaacttcagatggtgatagacctcttaaataaatcaaatcctataggcatcaaagacagtgatggaaaatcacgatcaaacattttagctattttacagagttatgtgtatagagaaccacatattgcacgacaaattgaagatgctggtgctggaattatcggagggtttgtggttcctcaaaaaccaaaaaagattgaaaacacaatatattattatggttatggtgtatggagaggagtgatggatggaaaacaagtgcaaatcgaacttgacaatgcagtgggcagccctcctgttataatatctgtcactatggaagagtctgctgaaccctggcaaatatgcaagagtataaggtcatgggctgaggatgtgggtgcaaaaaacaatttggatatttccccaaagataaaaaagaggacttgcaaatactggatgtttgactttaaaacattctcttcagacaaagcatatggtgctcctgtttacatgacgaagaagaagatggttgattttagactaattgatgatgcagaaataagtataaaagttaggaaatccaccgtgaatttgtatgtcagaagtgatggcagagatgtccacatactctcttactcagcatcagactcagatctcagccctgcaagcttgaggattaatgatgagtccaaggatgaaatgatggaattattcaataaagagcctagcaagtcttgggcgtcatgctcaccaatcccggctatcatgatgcacaagatcatcaaagttgtccaaggggaacttaaaatatcatcgttagacagtggtagactgggagagatcatgaaattgtgctgtgaatcatctttgcgatccagaattgggactttattttctgctcttccaagtgtgcaaaacacctctagggttgatgtcgatgacctgatagatattgttttgactgactcaaagacagctggcttcagagaaattgtgcagtcactagaaaatgacataaaagatgagtacgaggtggaagactttgacttatctgatatagacttattcggaccagcacattataaagaattgtcagacctgaacaccataagtcatcccttaatggatgactatgtagagttctgtatatcaacagttggtcgaaaggagctgagacggatattggagaccaatagatgtaaaactaaagacttacaattgtctaaggatctctttttggtattaggcaggaatccagatgatattaaagtggatgaatataacttaagagagcaaatggcagtggaagacgacatgataggataa

SEQ ID NO: 13297 - DNA, 168 bp, unidentified; identical to SEQ ID NO: 5150
  source 1..168: mol_type = other DNA
  misc_feature 1..168: note = Synthetic

SEQ ID NO: 13298 - DNA, 3891 bp, unidentified
  source 1..3891: mol_type = other DNA
  misc_feature 1..3891: note = Synthetic
attaatacgactcggagaatcatgtcggtggtggcgcgcgtgtcgtacagcctgtactcgcagagcgagataagcgccacggacgtggtcatcagccagttgaagaacgacgaggacctgggcacggtgaaggacccgcgcctgggcgcctcggacgggtccatatgccgcacctgcgggctcacggagatggagtgtttcgggcactggggcaaggtgcgcatctacgagtcctacatcgtgcgccccgagtacatccccgaggtggtgcggctgctcaaccacctctgcgtgcgctgcgggctgctgcgctcgcgcgacccgtacacggcggacgtggccgcgctcagcgtgcacgagatgcgcaagatgaaggaccgcatgatgtccaagaagaaggcctgctggaacagcaagtgtctgcagccgtaccagaagatcgtcttctccaagaagaagatctgcttcgtgaacaaggtggacgagatacccgtccccaacgcgctcatctaccagaagctgacctccatccaccgcaagttctggccgctgctggaggtgttccaggaccccgcgaacctgttctacaaggagtacatgcccgtcccgccgctgctcatccggccggcgatcagcttctggatagacaacatccccaaggagaccaacgagctcacctacctgctgggcatgatcgtgaagtactgctccatgaacgccgaggagcaggtcatccagcgcgccgtgatcgagtacgacaacatcaagatcatctcctctaactctagcagcatcaacctctcctacatcatcgcgggcaagagcaacatgctgcgcagcttcgtggtagcgcggcgcaaggaccagaccgcgcgctcggtcatcgggcccgactccgcgctctcggtgtgcgaggtcggcatccccgactacatccggaacacgctcacgcagaaggtgttcgtgaactacctcaccagcaagcgcgtgcgcgcgctgttcgaggaccgcgcggtcaagttctacttcaacaagcggctgcgccagctcacgcgcatcaaggagggcaagttcatcaaggacaagatccacctgctgcccggcgactgggtggagatccccatgtccgagggcacgaacgtgatattcggccgccagccctcgctgcaccgacacaacgtcatatcctcgaccgcacgcgcctcgcccggctacaccatcaagatcccgcccgggatcgcgaactcgcagaacgcggacttcgacggcgacgaggagtgggccgtgctcgagcagaaccccaagtccgtgatcgagcagagcgtgctcatgtacccggtgactattttcaaacacgacgcgcacggcgcgccggtgtacgggtccatccaggacgagatcgtggctgcgtactcgctgttccggcaccagaacctctcgctggacgaggtgctgaacctgctcgggcgctacgggcgagacttcgtgccggagcctggccagaagaccttctcgggcgccgacgtcttccgattcatgataggcgcggacataaacttcaagggcgtgctcgagaacgggcgcgtggtggcgccgaacgtcgacagcgacctcgtggtggccatgcgcgcaacatcgctagcggggctgatcgcggactacgccacgaacgtggagggcgtgcgcttcgtggacatggcctcctacgtgtacaagcggtacctggccatctacggcttcggcgtgaccttccgcgacctgcgcccggacccgagtttggttcgccgcctgcacgcgctgaacaccgagaagatagagcagatcaaggacgcgtactcgcggtacctgcaggacgtcgcggacgggaagctggtgccgatggcgcccgcggacgaagccgacgcgctggactcgctgctgtccaacctgaccaacctcaacgtgcgcgagatcaacgagtacatgcgcgagacgctggagcgcgaccccgataacaacctgctcaagatggcgcgcgccgggtacaaggtcaaccccacagagctcatgtacctgctgggcacctacgggcagcagcgcgtgaacggcgccgtcgccgagaccaagatatacgggcgcgtgctcccgtacgcgttccccgactccgcggacccagaggcgcgcggctacatcatcaactcgctcatgaacggtctctccggctcgcagttctacttcgcgatgctggtggcgcgctcgcagtccacggacatcgtctgcgagacctcgcgcacgggcacgctcgcgcgcaaggtcatcaagaagatggaggacacggtcgtggacgggtacggacagatcgtgagcggctcggtactactcaagtacgcggccaactacgcgaagatcccggggtccaccaccaagcccgtggagctgctcttcccgcacgagagcatgacctggttcctggagatcagcgcgctctggtcgaagatccggcacgggttcgtgcgcatgcaccggcagcgcctggccaccaagatcctggcgccgttcaacttcctggtcttcgtgaaaccggcgccctcggaggcggaggcgctctccgcgcgggacctgtaccacatgatccagcgcgtgatgaacgacgtgcgcgagaagtacttcttctcgctggcgaacgtggacttcatggagtacgtcttcctcacgcacctgaacccctcgcgcgtgcgcatcacgcgcgcgaccgccgagctcatcttccgcaagctgtaccagaagctgaacgcgctgctcggcggcggcacgcccgtgggcatcatgtccgcgcaggtgctctgcgagaagttcacgcagcaggcgctctcgagcttccacaccaccgagaagagcggcgccgcgaaggtgaagctgggcttcaacgagttcagcaacctcatcagcatgagccgcaaccacaccgagatagtggcgctgaccgcgtcgagcgcggacaagctgatgccgctgaaggtaaactttgagttcgtgtgtttgggcgagctcgtgcccgagatcgagacccggccctcgggacggccctccgtgcaccgcgtggacatcacggtgcaccgcctgcgcatcaagcgcgcgcacctgaccgaggtcctggtggacaccatcatcgagcgcttcgtgtccttcaacgtgctcgtgaaggagtggggcagcgacatgaccgtggagggcgaccgcgtcacgtacacgctgctgctgcgcttcgtggagccggaacagctcaacttccacaagttcatgctggtgctgcctggcgccgcgaacaagggcaaggtgagcaggttcaagatcccgatcaccgagaccacggtctacgacgacttcgacgccgcgcgcaaggcgtaccgcatgaacatcgagctcatgagtctgaaggagctggggatattcgacctcgaggacgtgaacgtggtccccggcatgtggaacaccttcgacatattcggcatcgaggccgcgcgcgggcacctctgcgagagcatgctggacacctacggcacgggcttcgactacctgtttccctcctgcgacctgctcgcgagcctgctctgctccgggtacgagcccgagtccgtgaacaagttcaagttctggaacgcgagcgcgctgaagaaggccaccttcggcgacggccgcgcgctgctgaacgcggcgctgcacaaccgcaccgacgcggtcgcggacaacagcagctgccacttcttcagcaagacgccctgtgtgggcacgggatactacaagtacttcgtgaacgtggagatgtttatgcgcatggagcgcgagatccaggcgcgcgtggcggctcgcaagatggaggagatcgaggaggccgccgaggaggagttctag

SEQ ID NO: 13299 - DNA, 1398 bp, unidentified
  source 1..1398: mol_type = other DNA
  misc_feature 1..1398: note = Synthetic
atgaagaccaatccgctacccgcaaccccttccgtgtggggcgggagtaccgtggaactcccccccacaacacgcgataccgcgggacagggcctgcttcggcgcgtcctgcgccccccgatctctcgccgcgacggcccagggctccccagggggtcgggaccccggagggcggccagcacgctgtggttgcttggcctggacggcacagacgcgccccctggggcgctgacccccaacgacgataccgaacaggccctggacaagatcctgcggggcaccatgcgcgggggggcggccctgatcggctccccgcgccatcatctaacccgccaagtgatcctgacggatctgtgccaacccaacgcggatcgtgctgggacgctgcttctggcgctgcggcaccccgccgacctgcctcacctggcccaccagcgcgccccgccaggccggcagaccgagcggctgggcgaggcctggggccagctgatggaggcgaccgccctggggtcggggcgagccgagagcgggtgcacgcgcgcgggcctagtgtcgtttaacttcctggtggcggcgtgtgccgcctcgtacgacgcgcgcgacgccgccgatgcggtacgggcccacgtcacggccaactaccgcgggacgcgggtgggggcgcgcctggatcgtttttccgagtgtctgcgcgccatggttcacacgcacgtcttcccccacgaggtcatgcggtttttcggggggctggtgtcgtgggtcacccaggacgagctagcgagcgtcaccgccgtgtgcgccgggccccaggaggcggcgcacaccggccacccgggccggccccgctcggccgtgatcctcccggcatgtgcgttcgtggacctggacgccgagctggggctggggggcccgggcgcggcgtttctgtacctggtattcacttaccgccagcgccgggaccaggagctgtgttgtgtgtacgtgatcaagagccagctccccccgcgcgggttggagccggccctggagcggctgtttgggcgcctccggatcaccaacacgattcacggcaccgaggacatgacgcccccggccccaaaccgaaaccccgacttccccctcgcgggcctggccgccaatccccaaaccccgcgttgctcggctggccaggtcacgaacccccagttcgccgacaggctgtaccgctggcagccggacctgcgggggcgccccaccgcacgcacctgtacgtacgccgcctttgcagagctcggcatgatgcccgaggatagtccccgctgcctgcaccgcaccgagcgctttggggcggtcagcgtccccgttgtcattctggaaggcgtggtgtggcgccccggcgagtggcgggcatgcgcgtga

SEQ ID NO: 13300 - DNA, 156 bp, unidentified
  misc_feature 1..156: note = Synthetic
  source 1..156: mol_type = other DNA
ataccgcgggacagggcctgcttcggcgcgtcctgcgccccccgatctctcgccgcgacggcccagggctccccagggggtcgggaccccggagggcggccagcacgctgtggttgcttggcctggacggcacagacgcgccccctggggcgctga

SEQ ID NO: 13301 - DNA, 24 bp, unidentified
  source 1..24: mol_type = other DNA
  misc_feature 1..24: note = Synthetic
atgagactagcttcaaatttgtag

SEQ ID NO: 13302 - DNA, 24 bp, unidentified
  source 1..24: mol_type = other DNA
  misc_feature 1..24: note = Synthetic
atggcaagcactgaattagaataa

SEQ ID NO: 13303 - DNA, 60 bp, unidentified
  source 1..60: mol_type = other DNA
  misc_feature 1..60: note = Synthetic
atgacggacttggaaaaggtgttaaacgaaaactttttgccgaagatagctctccgttaa

SEQ ID NO: 13304 - DNA, 60 bp, unidentified
  misc_feature 1..60: note = Synthetic
  source 1..60: mol_type = other DNA
atgagggactcggaaaaggtgttaaacgaaaactttttgccgaagatagctctcccttaa

SEQ ID NO: 13305 - DNA, 477 bp, unidentified; identical to SEQ ID NO: 11785
  source 1..477: mol_type = other DNA
  misc_feature 1..477: note = Synthetic

SEQ ID NO: 13306 - DNA, 69 bp, unidentified; identical to SEQ ID NO: 5164
  source 1..69: mol_type = other DNA
  misc_feature 1..69: note = Synthetic

SEQ ID NO: 13307 - DNA, 999 bp, unidentified
  misc_feature 1..999: note = Synthetic
  source 1..999: mol_type = other DNA
attctcacaatgtgggactcatcatacatgcagcaagtcagcgaagggttgatgactggaaaagtacccatagatcaagtgtttggtgccaatcccttagagaagttatacaagagaagaaaaccaaaaggcacagttggactacaatgtagcccttgtctaatgtcaaaggcgacaagtactgatgatattatttgggaccaactgatcgtgaagagaacactagctgatctacttataccgataaataggcagatatcagacattcaaagcactctaagcgaagtaacaacaagagtccatgaaattgagcggcaattacatgagattaccccagttttaaaaatgggaaggacactggaagcaatttccaaggggatgtcagaaatgttagccaaatacgaccaccttgtaatttcaactggaagaaccactgcaccagctgctgcctttgatgcctacttaaatgagcatggtgtccctccccctcaacccgcgattttcaaagatcttggggttgcccaacaagcttgtagtaaggggaccatggttaaaaatgcaacaacagatgcagccgacaagatgtcgaaggttcttgaactcagtgaggaaacgttctccaagccaaacctttcagctaaggatttagcccttttattgtttacccatctacccggcaacaacactccattccatatcctagctcaggtcctttcaaaaattgcttacaagtcaggaaaatccggagcattcttggatgcatttcaccagattctaagtgaaggagagaatgctcaggcggcattaactcgactaagcagaacatttgacgctttccttggagtggttcctccagtgataagagtcaaaaacttccaaacagtccctcgtccatgtcaaaaaagtcttcgggctgtccctccaaatccaacaattgacaaaggatgggtctgtgtttattcatctgagcaaggtgaaacacgggcccttaaaatctaa

SEQ ID NO: 13308 - DNA, 2262 bp, unidentified
  misc_feature 1..2262: note = Synthetic
  source 1..2262: mol_type = other DNA
aaggccgccacgtcccggaaccactgcaggcgcggcacctgcgtgacgtcgagctgctgctgcgagagctctcggatgcgtgcgatgattggttggaccccgtgcatggacgtaaaatttaaaaacgcctcgtccctgaaccgcacggcgggtctggccccgggctgctgtgggggcggacctggtgcccggacgtcccgcgagccctccccgccggacgccgccatggccgcacagcgcgcgcgggcgccggcgatgcggacgcggggcggcgacgcggcgctatgcgcccccgaggacggctgggtgaaggttcaccccacccccgggacgatgttgttccgcgagattctcctcgggcagatggggtacaccgagggtcagggggtgtacaacgtcgtccggtccagcgaggccgccacccgacagctgcaggcggcgatcttccacgcgctcctcaacgccacgacgtaccgggacctggaggaggactggcgccgccacgtggtggcccgcggcctccagccgcagcggctggttcgcaggtaccggaacgcccgggagggcgatatcgccggggtggccgagcgggtgttcgacacgtggcgatgcacgctcaggacgacgctgctggactttgcccacggggtggtagactgctttgcgccgggcggcccaagcggaccgaccagcttccccaaatatatcgactggctgacgtgtctggggctggttcccatattgcgcaagacgcgcgagggggaggcgacgcagcgcctgggggcgtttctcaggcagcacacgctgccccggcagctggccacggtcgccggggccgcggagcgcgccggcccggggcttctggatctggccgtcgcgttcgactccacgcgcatggcggaatacgaccgcgtgcacatctactacaaccatcgccggggggagtggctggtgcgcgacccggtcagcgggcagcgcggcgagtgcctggtgctgtgcccccccctgtggaccggcgaccgcctggtcttcgattcgcccgttcagcggctgtgccccgagatcgtcgcgtgccacgccctccgggaacacgcgcacatctgccgtctgcgcaacaccgcgtccgtcaaggtgctgttggggcgcaagagcgacagcgagcgcggggtggctggcgccgcgcgggtcgtcaataaggcgctgggggaggatgacgagacgaaggccggctcggccgcctcgcgtctcgtgcggctcatcatcaacatgaagggcatgcgccacgtgggcgacatcaacgacacggtacgcgcctacttggacgaggcgggggggcacctgatcgacacccccgccgtcgaccacaccctccctgggttcggcaagggcggcaccggccgcgggtcggcgccccaggacccgggggcgcgaccgcagcagcttcgccaggcgtttcagacggccgtggtcaacaacatcaacggcatgctggagggctatatcaataatctctttggaaccatagaacgcctgcgagagacgaacgcgggtctggcgacccagctgcaggcgcgcgaccgcgagctgcggcgcgcccaggcgggggcgctggagcgggagcagcgcgcggcggaccgggcggccgggggaggcgcgggccgcccggcggaggcggatcttctccgggccgactacgacattatcgacgtcagcaagtccatggacgacgacacgtacgtggccaacagtttccagcaccagtacatccccgcgtacggccaggacctcgagcgcctgtcgcgcctctgggagcacgagctggtgcgctgcttcaagattctgcgccaccgcaacaaccagggccaggaaacgtcgatctcgtactctagcggggcgatcgcctccttcgtggccccgtatttcgagtacgtgcttcgcgccccccgagcgggcgcgctcatcaccggctccgatgtcatcctaggggaggaggagttatgggaggcggtctttaagaaaacccgcctgcagacgtacctgacagacgtcgcggccctgttcgtggcggacgtacagcacgcggctctgccccggcccccctccccaacccccgccgatttccgggcgagcgcgtccccgcggggcgggtcccggtcccggacccggacccgatcccggtcgcccgggagaacgccgaggggtgcgccggaccagggctggggcgtcgaacgcagggatggccgaccccacgcccgccgatga

SEQ ID NO: 13309 - DNA, 1230 bp, unidentified
  source 1..1230: mol_type = other DNA
  misc_feature 1..1230: note = Synthetic
attatggatttgaggtcgcgtacagacgatgctttggacatggaattgcatgcgggttttgacgccccagaaatcgccagagctgttttaacggaaaaaacgcttactggtttaatttcgtctatatcacctctggttaatagactaagggattctattttaatattcagcgacgaaggattaattattcactgtagtttggaaacagaacaactgtatattcctataccggcaaatatgtttgaccagtataattggactgggccgagaatggttgtactcgcggcaacggagggacggtcctcgcttattgacgcgtttcgccatacaaaagatccgtcgaccccaacacggttatattttaaatttaccggacaaccccccgagcggagtattatccaaacgatggtatggcaacgcccgggtgattgtggtccagatgatcaagtacaatgttacaaacaagttgtaaaacgtgaactcgcttgttatacaatgatgtttccaaatctaactccagatataagcatttgcttaaaacgcgatcaattcacccgtttacagcgactacttaaaacttttgggtttacaacatgcttcattctaacagccacggatatgtacatccagaccgccgggggtggttttatctcatttaatgtttccttggatataaacggaagcaagcctacaccatataatttaatacgctcaatcacaaattcaaaaaggatccttaataatgttgtttatggcagcgggagtatgcgtgaatttggagtattattggaaacacacagtggattccgttctgccgtacaaaatcttaagttaacacgggatgagacgtgttatattaatttttatctcgccttaactaactcccccatggttggattgtatatccaacgttccgcacccgtgcattcttttttttatgcaacgttcttaagtcccaaagaccttaaagaaaaattaacctcgatgcaattatttgcgaacatggaatctgtgaaggatgaaccaccattaaaaaaaagacgcaatttattaacaaaaagaaacgaaaaaaataccggaaataaaatgggggggaaactccccgaaaccacatggcaggagggaatcggaattcgcgaatattgtgtggctcctccagtggaccctgcaggaaccctggattattctgaattatcacgtgaatctgacgtaatatgtacagttaaataa

SEQ ID NO: 13310 - DNA, 39 bp, unidentified; identical to SEQ ID NO: 5170
  misc_feature 1..39: note = Synthetic
  source 1..39: mol_type = other DNA

SEQ ID NO: 13311 - DNA, 48 bp, unidentified; identical to SEQ ID NO: 5172
  source 1..48: mol_type = other DNA
  misc_feature 1..48: note = Synthetic

SEQ ID NO: 13312 - DNA, 24 bp, unidentified
  source 1..24: mol_type = other DNA
  misc_feature 1..24: note = Synthetic
atgtaccaatacggtcccacttga

SEQ ID NO: 13313 - DNA, 705 bp, unidentified
  misc_feature 1..705: note = Synthetic
  source 1..705: mol_type = other DNA
atgtcccatcgccgaggaagcaagaagttgaaggtgcagctgtcgcccccagaggatatgaaggaagactgggacagtcaggcagaggaggagatggaagattgggacagccaggcagaggaggtggacagcctggaggaagacagtttggaggaggaagacgaggaggcagaggaggtggaagaagcaaccgccgccaaacagttgtcatcggcggcggagacaagcaagtccccagacagcagcacggctaccatctccgctccgggtcggggggcccagcggcggcccaacagtagatgggacgagaccgggcgattcccaaacccgaccaccgcttccaagaccgcccctactgcagtcagcaagtcccggcaaccccgacagaaaaatacagcagcgacaacggtgaccagaaaaccagcagttagaaaatccacaacaagtgcaccaggaggaggactgaggatcacagcgaacgagccagcgcagaccagagagctgaggaaccggatctttccaaccctctatgccattttccagcagagtcgggggcaagagcaggaactgaaagtaaaaaaccgatctctgcgctcgctcaccagaagttgtttgtatcacaagagcgaagaccaacttcagcgcactctcgaggacgccgaggctctcttcaacaagtactgcgcgctgactcttaaagagtag

SEQ ID NO: 13314 - DNA, 600 bp, unidentified
  source 1..600: mol_type = other DNA
  misc_feature 1..600: note = Synthetic
atgtcccatcgccgaggaagcaagaagttgaaggtgcagctgtcgcccccagaggatatgaaggaagactgggacagtcaggcagaggaggagatggaagattgggacagccaggcagaggaggtggacagcctggaggaagacagtttggaggaggaagacgaggaggcagaggaggtggaagaagcaaccgccgccaaacagttgtcatcggcggcggagacaagcaagtccccagacagcagcacggctaccatctccgctccgggtcggggggcccagcggcggcccaacagtagatgggacgagaccgggcgattcccaaacccgaccaccgcttccaagaccggtaagaaggagcgacagggatacaagtcctggcgtggacataaaaacgctatcatctcctgcttgcatgaatgcgggggcaacatatccttcacccggcgatacctgctcttccaccacggtgtaaacttcccccgcaatatcttgcattactaccgtcacctccacagcccctactgcagtcagcaagtcccggcaaccccgacagaaaaatacagcagcgacaacggtgaccagaaaaccagcagttag

SEQ ID NO: 13315 - DNA, 1653 bp, unidentified
  misc_feature 1..1653: note = Synthetic
  source 1..1653: mol_type = other DNA
atcagactaaatatggagcagcttaagacaccccaaaatcaaaaaacacgtccaagaaatatgcttcctaaaaaaaaaggaaaagaacttaaaaaaaggccttgtaaagtaaaacgtaaattatttggttccgaaaacatcagacctaacaaaaaaatacctctggcttcagacgtggataacgaattggaaaaaaaacggggctcgatgatacgaaaacggtctgagacggacttatgtccagatccatctgtaacagacctcctatgtcatgaatctttgactgtatctccaaagtttgaacgagatggattgagtgcatgcacggaatttgagaattttatggatacaaggaaaatcgtgttaagtcgaaatgaaaagtctgtgacagatttaagtgcacattaccccgttttatgtaatcttggaatttttgagcgtattcattcaccctttttgttttcaatacacattgatactcagtcattttcagttgtctatgttccacataaggaaagttcctgttctcagttttgcgagccagaaaaaaacatggcacggattttaggaagcggatcatatggaatggtatatgatttgaacaatgttgcaattaaagcttctgatgacttagagagctgcatttcttcttatgtgtctggagtagttcgtgcaaaagccggagctcaattaacctcacgcgaatgcgtgtttaaaagtcttttgatatgtaattctgtctgcctgaaccataaaatctccctttccaaaacttatgatacagatttatataaatttacagactggaaattggaaaacgttgaaaattattactctattttttgcaaccttgcagaagctgttcgttttttaaacatggtgtgtaaaatcaaccattgtgatatttcactagcaaatattttgatacaccacaaggaaggtattattttggaggctgtgttagctgattacagtttagctgaagtacacccacagtataatggaaaatgtggaatactaagacaatttgatcataggatccagattgtgcctaaaagttataataaattgtgtgacatgtttaatccaggtttcagacccatgatagctcacaaaataattttggtcgaagtttatgcagaatttgatggtaagggcaatccagtgagacattgtaatctagatctttgtgcactagcgcaagtatttttattatgtgtcatcagaatgttggatgaacgcggatgccgtgaggcgcaaaaatattatgaaaatcgattgttcacgtactcaaatgaagcttgtactttgaatccaatcaaataccctttagaatataaagatgcttgttgcaaagttttagctgagcacttagttttatttggcattcttttttatcgtgaggtggtggatatgtttgaaaacttgtatgactttctgcacgcaagtggtgatttaagcgtaagagatttactcgaggaaacatatgtaaatgacagtagagatgttagaagacaaccaatcaggtataggcacgcccaattacaaagacacgaaattggtcaaatacttttaaatgatctgcaacaattgctttccattataactatttcagatttagagaaggatccatattctgtatttcgggtgtaa

SEQ ID NO: 13316 - DNA, 114 bp, unidentified; identical to SEQ ID NO: 5180
  source 1..114: mol_type = other DNA
  misc_feature 1..114: note = Synthetic

SEQ ID NO: 13317 - DNA, 114 bp, unidentified; identical to SEQ ID NO: 5180
  misc_feature 1..114: note = Synthetic
  source 1..114: mol_type = other DNA

SEQ ID NO: 13318 - DNA, 18 bp, unidentified
  source 1..18: mol_type = other DNA
  misc_feature 1..18: note = Synthetic
atgtcaggaaaaaattga

SEQ ID NO: 13319 - DNA, 234 bp, unidentified; identical to SEQ ID NO: 9989
  source 1..234: mol_type = other DNA
  misc_feature 1..234: note = Synthetic

SEQ ID NO: 13320 - DNA, 21 bp, unidentified
  source 1..21: mol_type = other DNA
  misc_feature 1..21: note = Synthetic
atggacactcatttaacgtga

SEQ ID NO: 13321 - DNA, 69 bp, unidentified; identical to SEQ ID NO: 5194
  misc_feature 1..69: note = Synthetic
  source 1..69: mol_type = other DNA

SEQ ID NO: 13322 - DNA, 561 bp, unidentified
  misc_feature 1..561: note = Synthetic
  source 1..561: mol_type = other DNA
atgatgataaatcatcaaccacatgcaatacagacaactggggaccctttttaccatcaaaagggactggtactggtgtcacaaagcaatatgactcaatttctttttggtttcgctatcgcttcaaatttaaggtctctggagactctatctacacaagaatccccagcaggacagcaacggaggtcatcagtgaagcgccaggacctcagtcaaaaatacaggctcgctccatactcaagaccagacctccagaccttggggacatacttgcaggagacctcgacgaggacggcatcctcacggatgagagtcttgaacgaattattagatctcatccaggaagacagccagccggagtggaagccgatccggaccagctcaagcaaagacgtgtccgacttcgacacgaccccggggtcagaaagcgaagactccgacgtctcctatctggattgggattgggaagacgaacccaatccgggggggaagggcccccccctagtcccccccacccctgggcctaaagcccaggggtacccacctcacttcctcttttga

SEQ ID NO: 13323 - DNA, 66 bp, unidentified; identical to SEQ ID NO: 5197
  misc_feature 1..66: note = Synthetic
  source 1..66: mol_type = other DNA

SEQ ID NO: 13324 - DNA, 33 bp, unidentified; identical to SEQ ID NO: 5198
  source 1..33: mol_type = other DNA
  misc_feature 1..33: note = Synthetic

SEQ ID NO: 13325 - DNA, 75 bp, unidentified; identical to SEQ ID NO: 5199
  misc_feature 1..75: note = Synthetic
  source 1..75: mol_type = other DNA

SEQ ID NO: 13326 - DNA, 126 bp, unidentified; identical to SEQ ID NO: 5202
  source 1..126: mol_type = other DNA
  misc_feature 1..126: note = Synthetic

SEQ ID NO: 13327 - DNA, 72 bp, unidentified; identical to SEQ ID NO: 5203
  misc_feature 1..72: note = Synthetic
  source 1..72: mol_type = other DNA

SEQ ID NO: 13328 - DNA, 60 bp, unidentified; identical to SEQ ID NO: 5204
  misc_feature 1..60: note = Synthetic
  source 1..60: mol_type = other DNA

SEQ ID NO: 13329 - DNA, 81 bp, unidentified
  source 1..81: mol_type = other DNA
  misc_feature 1..81: note = Synthetic
ataccgacggacatgaaccaaatgcaaccgcagccgatcagcaagaacgagaatccaccaaccccacacacggatgtgtaa

SEQ ID NO: 13330 - DNA, 1122 bp, unidentified
  misc_feature 1..1122: note = Synthetic
  source 1..1122: mol_type = other DNA
atgcatcctgtcctgcgacaaatgcgacctcagcccagggcaaccacggcctcagcagcggtggcgctttcgggctctggcgaacaggaagagcctcaatgtcctacattggagttggaagaaggagaaggcatagcccgattgggcgcccactctcctgagcgtcacccaagggtgcagctcgcccgggacagtcgcgtggcatttgtgcctcgtcagaacatgtttcgcgacaacagcggggaggaagctgaggaaatgcgagactgcaggtttagggccggtcgcgagctgcgccgcggatttaatcgcgagcgactgctgcgtgaggaggactttgagccagatgaacattcggggattagttctgcacgggcccatgtatcagcagccaacttagtaacagcatatgaacaaacggttacagaggaacgtaactttcaaaaaagctttaataaccatgtgcgcacactaatagcgcgagaagaagtagccattggtttaatgcatctttgggactttgtagaagcttatgtacataatccagcaagtaaacccctaactgcccagctgttcttaatagttcaacatagtagagacaatgaaacttttagggatgcaatgcttaacatagctgaaccccagggtcggtggttactcgatttaattaacattctgcagagcattgtggttcaggaacgcagtcttagtttggcagacaaggtggccgccattaattactccatgttaagtttgggaaagttttatgctcgtaaaatctacaaaagtccgtatgttcccattgacaaggaagtgaagatagacagcttttatatgcgcatggctttaaaggtactaacattaagcgacgatcttggagtgtaccgcaatgaccgaatccacaaagcagtaagcgccagtcgccgcagagagctaagcgacaaagagcttatgcatagcttacaaagggcgctgacgggagcaggaacagaggacgagtcgttctttgatatgggcgcagacctacggtggcagccaagcgctcgcgctttggaggcagctggagtggcgtctgctgacgtcactggcgatgacgatgacgaagaccagtacgaggactga

SEQ ID NO: 13331 - DNA, 1506 bp, unidentified
  source 1..1506: mol_type = other DNA
  misc_feature 1..1506: note = Synthetic
aagaagacgagggcgacaatggagagtctcagcgagcgtttcagtgctctgcaagaccaactaatgaacatatatgaagctgcaaaaaacactcttgagtctcaaatagagcattggcaattgctacggaaagaagctgttctattatactatgctaggcagaagggtgttataaggcttggataccaacctgtgcccacacaggcaatttctgaaggcaaggctaaggaggcgataggcatggtgctgcatttacaagcactgcaaaagtcacagtttggagcagaaccgtggacattggtagataccagtgcagagacatttagaagtgctccagaaggtcactttaaaaaaagtccccaacaagtagaggttgtgtatgacaacgatccagacaatgtcaacgtgtacactatgtggagacatgtgtattatgtggatgcagatgacatgtggcataaggctgaaagtggggtgaaccggacagggatatattttatgcaagggaactttagacattattacattttgtttgcggacgatgcgcgtagatatagtacatctggacaatgggaggtgaagcttaataaggaaactttgtttgctcccgttaccagctccaacacaggaggaagcagcatcaccaccaccaccaacaccgcggccgagcagcctgacactaccaaaccccgaaaacccaacgaaagcaacagacggaggtacgggcgaagagcctccagcccaatcccaaggagaccagagccgcaaacgcaccaggggcggcagcagcggaggcggaggtcgcggtctaggtctaggtctaggtccaggtcgcctaggcggcagttggggggtggtcctgaaaccgacaccagacagagatccagctcccggtcatccgccacctccacctccacctccagagccgaaaccccacaacggtcacgatcaaggtcacggcgagaaggaagacgcagagggggaggagggagccgtggggggagcagaggagggagccgcgggaggcacagaagcaggagcctcgggggggtcggaggagggcgccgtggggggagcagaggagggagcagggggcaagggcgagggcggaggcacgggtcagtctctccatccccagagcggcctgttgggcggcgtggcgtctctcctgcggacgtgggaacagcagttcggtcagttggtagacaacattcacgaggacttgacagactactggcggaagctgtcgatcccccagtaattttatgcaaaggagaggcaaacactttaaaatgctttcgcaaccgggctaaagctaagtatttaggactgtacagagcctttagcactacgtggtcttgggtggctggacaaggaacagagcgtctaggcaggtccaggctgctaattagtttcgagtcctatagccagcgatcacacttccatcgctttgttaagttccctaaaggcgtggagtggtgcttaggaagcttggacagtttgtag

SEQ ID NO: 13332 - DNA, 24 bp, unidentified
  misc_feature 1..24: note = Synthetic
  source 1..24: mol_type = other DNA
ttggacacaattagacctgagtga

SEQ ID NO: 13333 - DNA, 1425 bp, unidentified
  source 1..1425: mol_type = other DNA
  misc_feature 1..1425: note = Synthetic
aagaagacgagggggaggatggaggctctgaaccagcgtttcaatgctctagaagaccagctcatggacatatatgaacaagggagtgataaattagaagatcaaataaaacattggaactttttaagaaaagaacagattttattgcattatgccaggaggcgaggcattatgcgtttggggtacactcctgttcctagtttagcagcttcagaaacaaaagctaaagatgttatttacatggttcttcaactagagaaattaagagactcaccttacaaagatgaaccttggacattgattaacaccagtttagaaacatatagagctcctcctgttaactgctttaaaaaaggtcctcaaaatgtagaggttatttttgatgcagatcctgaaaatattatgttatacacatcctggcagttcatttactttgaagacactgatggacattggcaaaaaactgaagggcgtattgattatgctggtttatattatttggaagggcaattaagacattattacgtggaatttaaagtagatgctcgcagatttggaactagtggagaatgggaagtgcgttttaacggggaaactatctttgctcctgttaccagctcctcgccgtcctcatacgaagaggtcagagaacgggctgagccccccgacgtccccgaggtcggaaccgcccctgactccggcaccctacagactgggagacctggaaccgaaaccgccaaagggcgaaggtacggacgaaaagaatctagtcctacagttgcctccctcagggtcaggcaaaaagtatcacgatctactacacggaaagccgaagaacgacggtcccggagtccatcgtcagggacagagcaagccggtgcacggggacggggacaacggggaaccagggcccgttccagaaccagaagcaggagcaggcgccggagcaggagcagcagcagagccagaagcaggagggcaagggaacactcagaatcgaggggagggagaggtagaggggcgtacgccacaagatccagaagtagatctgcagagtgcagatctattgaccagtgtggcattccagcttcacaagtgggaaggtcagttcaatcagttggtagaaacaattcttcgagacttaagagattactggatgaagctctcgaccccccagtgatattgttaagaggggaaccaaatactttaaaatgttatcgctacagggtgaaagacaaacttagaggctcttttgataaaattagtacaacatggtcatgggtggcttcacaaggtaatacacgcataggtagagctcgcatgctgcttagctttgtttcagaagatcagagggaaaaatttatcaatgttatgaaattacctaagggtgttgattggtcctttggtagctttgatagtctttaa

SEQ ID NO: 13334 - DNA, 24 bp, unidentified
  misc_feature 1..24: note = Synthetic
  source 1..24: mol_type = other DNA
atggcttataggattcgattttga

SEQ ID NO: 13335 - DNA, 15 bp, unidentified
  misc_feature 1..15: note = Synthetic
  source 1..15: mol_type = other DNA
ctgaagaatatatag

SEQ ID NO: 13336 - DNA, 261 bp, unidentified
  source 1..261: mol_type = other DNA
  misc_feature 1..261: note = Synthetic
attacagctaacgatccagtacttgcatcgaattttacaatgcagcctacttttaaaatagccgataagaaagttgtactcagagatcataattacattgcagtcaaagattttgttctatcaaggtctttcatgcattgcattcgatgtcaggaaaaaattgaaaagaagacatccgatagcattagagcatattccattaagccagatttcatgttttatgactcagacgacgaagttcgttcgtcaccatttttataa

SEQ ID NO: 13337 - DNA, 24 bp, unidentified
  source 1..24: mol_type = other DNA
  misc_feature 1..24: note = Synthetic
atggtgacttatgaagatgagtag

SEQ ID NO: 13338 - DNA, 24 bp, unidentified
  misc_feature 1..24: note = Synthetic
  source 1..24: mol_type = other DNA
atggtgacttatgaagatgagtag

SEQ ID NO: 13339 - DNA, 966 bp, unidentified
  source 1..966: mol_type = other DNA
  misc_feature 1..966: note = Synthetic
ctgtcaaacttaaacggaatttttgcggaaagtcattatttcgtattcaaaatcattatgaataacgttaagggtatgcttcaagagttatgtgttaaacgtggattggaactgcctgtttacgaaaaattgtctaaagttggtcctgaccatgcaccaaccattactgttaaattaacagctaatggtattgaagtgattgaggccgctagctcacgagctcaagctgaaaagctggcagcagcaacgttgtatgaaaagatgaaacatcttgaggtgcatgatgaaaggaagagcgtttcaattatgagtattttgatggtatcgtttgctaatgcacttattaataaggtaatcgacttattctcgacgtgtaaacaagatatcatattttgctctgaagtagatgaagttactgatgatgttcattttgatccaacattgagtaacctgatgtcaagtggattaacggatcgtagtgcttggaatagattatataaattattatctgatctagctttagagaatggattcaattgcataacgagaaagaatggtaaaggtttgttatttagaagtttgctaaatgatgatttggtagcaaatgaatctttcaaaaatagctcattaaatgttgcgtttaatacaactgaagacaaagaggtcagtatgttatgttacaatcgatgctgtcaaggaagtggttcacccccctccactgacttgactttaataggaaagctaactgctgatctagctaacgcttcaggcttaggtaaacacagtgtattcacaaactcattgaagcaggtacttaatgacgaaagcttgaatcataacgataaagtaaccatattattatcacaaagtagccttttgaagaatattcaggttgaagatttgttgactctagtccggtcaacgatatctggtgccgactctcaagtacgcatagattacgattag

SEQ ID NO: 13340 - DNA, 150 bp, unidentified; identical to SEQ ID NO: 5234
  misc_feature 1..150: note = Synthetic
  source 1..150: mol_type = other DNA

SEQ ID NO: 13341 - DNA, 258 bp, unidentified
  source 1..258: mol_type = other DNA
  misc_feature 1..258: note = Synthetic
atgtcaaccgccgcgtcgtcgcgcacgccagcgctctcagggcgcagcaccgggacctgcccgagcgccacgccgacgtgcctctgccgcccctgcccacggggccggaaccgccgctgccgccaggagcgcgtccgcgacaccgcttctaaaagcgcaccgcggcacggtcgtggccccgcgcagctacgggctcatgcaatgcgtggacacggccaccaactcacccgtggagatcaagtaccatctgcatcttaa

SEQ ID NO: 13342 - DNA, 708 bp, unidentified
  source 1..708: mol_type = other DNA
  misc_feature 1..708: note = Synthetic
atggcaactcctttgtttgagttttcggttgaggagcggggccagaattcgtctacttttgaccctaaacaagcatacaaaagttttgtcgatgaacacagggaggagctcactcttgagaatattagagtgttcttcctccgtgcgaatgaggctaaacagaagctccgtaagagttcggcaaagctcgctaaccttaaatttggcacttggaaggtcactgttgttaacaaccattaccctgccaacacagcaaatacggtcgctgatggtgaattaactttgcacagaatctctggattcctcgcaaagtttatcctggacctctatgcagatacggaacatagacctgagatcgaggaaaaaattataaatccaattgcagagtctaaaggggtcacatgggcacaatctgcaaaaatatatcttgctttcttccctggaacagagatgtttctacacgaatttgagatgctgccgttggccatctacatctaccgtgcccaaaagggggaaatagatgtctcattgctgaagaaacctctcagacagcagtacaaaaatgacactccagacaagtggatgaaggagaagaaagttatgattcagggagccgtttctaggatttcaaagctcccatggggcaccagtggcttgtcatcacaggccaaagatttcttgaaggagtttgggataactatgaaataa

SEQ ID NO: 13343 - DNA, 90 bp, unidentified; identical to SEQ ID NO: 5237
  source 1..90: mol_type = other DNA
  misc_feature 1..90: note = Synthetic

SEQ ID NO: 13344 - DNA, 1896 bp, unidentified
  source 1..1896: mol_type = other DNA
  misc_feature 1..1896: note = Synthetic
atgagtaaatcacacgcggcctatatcgattatgcattgcgcagaactactaatatgcctgttgaaatgatggggtcggacgtagtacgcctcaaggattatcaacattttgtagcaagagttttcttaggattagacagtatgcattctcttttattgttccatgaaacgggtgtcggtaaaacaatgactactgtatatattctcaaacatcttaaggatatttatacgaattgggctattatcttattggtgaaaaaggctttgatagaagatccttggatgaacactatactcagatacgctccagagataacgaaggattgtatttttattaattacgatgatcaaaattttagaaataaattttttactaatatcaaaactattaattccaagagtagaatatgcgtcattattgatgaatgtcataacttcatttctaaatcattaatcaaagaagatggtaagatccgtcctactcgttcagtatataattttttatctaagaccatcgcattaaaaaaccataagatgatttgtttatcggctacacctatcgtcaatagtgtgcaagaattcaccatgttggttaacttactacgaccaggatccttacaacaccaatcgctatttgagaataaacgtctagttgatgaaaaagaattagtctccaaactaggaggcctatgttcgtacatagttaataacgagttttctatttttgatgacgtagaagggtctgcatcattcgctaagaaaacagtattaatgcgatacgttaatatgtcgaaaaagcaagaagaaatttatcaaaaggctaaactcgctgaaataaaaacaggtatatcatcatttagaattctgagacgtatggctactacgtttacgttcgatagctttcctgaaagacaaaatcgtgatccgggcgaatacgcgcaagagatagcaacactatataatgattttaaaaattcattaagagatagagaattttctaaatctgcattagatacctttaaaaggggagaactattgggaggggatgctagtgcggctgatatctctctatttactgaattaaaagagaaaagcgtcaaatttatagatgtatgtttgggaatattagcatcccatggtaaatgtctagtctttgaaccatttgttaatcagtcaggaatagaaatcttattactatatttcaaagtctttggtatctctaatatagagttctcatctagaacaaaagatactagaatcaaggcggtggctgagtttaaccaagaatcaaacactaacggagaatgcattaaaacatgcgtattctcttctagtggaggcgagggtattagcttcttctcaatcaatgatatcttcattttagatatgacatggaacgaggcgtctcttcgtcagatagtaggaagagccattcgtctcaatagtcacgttcttactcctccagaacgtagatatgtaaacgtgcactttataatggctagattatctaatggtatgcctactgtagacgaagacctatttgaaatcattcaaagcaaatcaaaagaatttgtccaattgtttagagtgtttaaacatacatcattagaatggattcatgctaatgaaaaagacttctcaccgatcgacaatgagtccggttggaaaaccttggtttcaagagccatcgatctatcgtctaacaaaaatattaccaataaactaattgagggtactaatatttggtattccaattctaatagattaatgtcaataaatagaggatttaaaggcgtagatggtcgagtatacgatgtagacggtaactatctacatgatatgccggacaatcccgttataaaaatacacgatggtaaattaatttatattttctaa

SEQ ID NO: 13345 - DNA, 39 bp, unidentified; identical to SEQ ID NO: 5239
  source 1..39: mol_type = other DNA
  misc_feature 1..39: note = Synthetic

SEQ ID NO: 13346 - DNA, 1896 bp, unidentified
  source 1..1896: mol_type = other DNA
  misc_feature 1..1896: note = Synthetic
atgagtaaatcacacgcggcctatatcgattatgccttacgcagaactactaatatgcccgttgaaatgatggggtcagacgtagtacgcctcaaggattatcaacattttgtagcaagagttttcttaggattagacagtatgcattctcttttattgttccatgaaacaggtgtcggtaaaacaatgactactgtatatattctcaaacatcttaaggatatttatacaaattgggcaattatcttattggtaaaaaaggctttgatagaagatccttggataaacactatactcagatacgctccagagataacgaaggattgtatttttattaattacgatgatcaaaattttagaaataaattttttactaatatcaaaactattaattccaagagtagaatatgcgtcatcattgatgaatgtcataacttcatttctaaatcattaatcaaagaagatggtaagatccgtcctactcggtcagtatataattttttatctaagaccactgcgttaaaaaaccataagatgatttgtttatcggctacacctatcgttaatagtgtgcaagaattcaccatgttggttaacttactgcgaccaggatccttacaacaccaatcgctatttgagaataaacgtctagtcgatgaaaaagaattagtctccaaactaggaggcctatgttcgtacatagttaataacgagttttctatttttgatgatgtggaagggtctgcatcattcgctaagaaaacagtattaatgcgatacgttaatatgtcaaaaaagcaagaagagatttatcaaaaggctaaactcgcagaaataaaaactggtatatcatcatttagaattctgagacgtatggctactacgtttacattcgatagctttcctgaaagacaaaatcgtgatccgggagaatacacacaagagatagcaaccctatataatgattttaaaaattcattaagagatagagaattttctaaatccgcattagacacctttaaaaagggagaactattgggaggggatgctattgcggctgatatctctctatttactgaattaaaagagaaaagcgtcaaatttatagatgtatgtttgggaatattagcatcccatggtaaatgtctagtctttgaaccatttgttaatcagtcaggaatagaaatcttattactatatttcaaagtctttggtatctctaatatagagttctcatctagaacaaaagatactagaatcaaggctgtggctgagtttaaccaagaatcaaacactaacggagaatacattaaaacatgcgtattctcttctagcggaggcgagggtattagtttcttctcaatcaatgatatcttcattttagatatgacatggaacgaggcgtctcttcgtcagatagtaggaagagccattcgtctcaatagtcacgttcttactcctccagaacgtagatatgtaaacgtgcactttataatggctagattatctaatggtatgcctactgtagacgaagacctatttgaaatcattcaaaacaaatcaaaagaatttgtacaattgtttagagtgtttaaacatacatcattagaatggattcatgctaatgaaaaagacttctcaccgatcgacaatgagtccggttggaaaaccttggtttcaagagccatcgatctatcgtctaaaaaaaatattaccaataaactaattgagggtactaatatttggtattccaattctaatagattaatatcaataaatagaggatttaaaggcgtagatggtagagtatacgatgtagacggtaactatctacatgatatgccagacaatcccgttataaaaatacacgatggtaaattaatttatattttctaa

SEQ ID NO: 13347 - DNA, 39 bp, unidentified; identical to SEQ ID NO: 1470
  source 1..39: mol_type = other DNA
  misc_feature 1..39: note = Synthetic

SEQ ID NO: 13348 - DNA, 249 bp, unidentified
  source 1..249: mol_type = other DNA
  misc_feature 1..249: note = Synthetic
gtggacaacttcttccgcgagtactccatgaccgagtgggcgcccgacctcgagcgcttctcgttcaagatccccatctcctccgtgaacaaactccgcggcttcaagaagcgcgtggtcatgttcgagtcgcgcgtggtcatggacgccgacgacaacatcatcggcatgctcttcaccgaccgcgtgggcatgtaccgcgtgaacgtgttcatgtcctttcaggaccggtctctttcatgcgactaa

SEQ ID NO: 13349 - DNA, 39 bp, unidentified; identical to SEQ ID NO: 5241
  misc_feature 1..39: note = Synthetic
  source 1..39: mol_type = other DNA

SEQ ID NO: 13350 - DNA, 894 bp, unidentified
  misc_feature 1..894: note = Synthetic
  source 1..894: mol_type = other DNA
atgagcaagatctttgtcaatccgagtgcaatcagagcaggcatggccgatctggaaatggcagaggagactgttgacttgataaatcggaacatcgaggacaatcaagctcatctccagggtgagcctatagaagtcgacagcctacctgaagagattgggaagctcaatatcaatgaggcaaagcctcaaagctttgagaacaatcccatagacatagatggtaggatgaatgaagacttccaaatgaaagaggttgaagatccaagtatccagttccaatcgtatctggacaacataggaatccagattgtaagaaagatgaagaccggggagcgtttcttcaagatttggtcccagactgttgaagagatcatctcttacgttggagccaactttcccaacccttctgggaagacgactgagagcaagtcaacccagacgacacccaagaaggtgaagcctgaacccccttcagctccaaccgagaaacccgaacaattgtccaggaccagcatggctcccgagacgacatcaggccccctggccctagactggtcagcaacaaatgatgatgatgatgtctctgtggaggccgagatcgcacatcagattgcagaaagcttctcgaagaagtacaagttcccttccagatcctccggaatattcctgtataactttgagcagctaaagatgaacctcgatgatatagtgaaggaggcgaggggtgtgccaggcatcatccgtcttgccaaggagggtcttcgcctccctctaagatgtatcctcggatgggttgcatcgtctcactccaagaagtttcaactgctagttgggtcagagaagctgagcaagattatgcaggatgatctgaaccgttatatgtcatgttga

SEQ ID NO: 13351 - DNA, 129 bp, unidentified; identical to SEQ ID NO: 5244
  misc_feature 1..129: note = Synthetic
  source 1..129: mol_type = other DNA

SEQ ID NO: 13352 - DNA, 63 bp, unidentified; identical to SEQ ID NO: 5245
  misc_feature 1..63: note = Synthetic
  source 1..63: mol_type = other DNA

SEQ ID NO: 13353 - DNA, 324 bp, unidentified
  source 1..324: mol_type = other DNA
  misc_feature 1..324: note = Synthetic
atggccctaagcaacaaataccgtctagctccatactcaaaaggccccttacgccttccgacatccttccgggagacctcgactcagacggatgcatcaaagaaagccctcttcgaagaattattagctctcatagaacaggacagccaaccttgttggtgccaaagagagtcagatttagacttggaaagcgagacagacagcgaaagatccatagaattcttaggcagctcatgggaggacgaagagaatccggggggggaaggcccccccctggtcccccccgaaggaggggcccaatggccctccagcttccgcttttag

SEQ ID NO: 13354 - DNA, 81 bp, unidentified
  misc_feature 1..81: note = Synthetic
  source 1..81: mol_type = other DNA
acggccctccggaaaaaagaaataccagctgaaacacataatatgggtaagcaaggaactagacagatttggccttcatga

SEQ ID NO: 13355 - DNA, 21 bp, unidentified
  misc_feature 1..21: note = Synthetic
  source 1..21: mol_type = other DNA
aagataaggaaaaggtcataa

SEQ ID NO: 13356 - DNA, 318 bp, unidentified
  source 1..318: mol_type = other DNA
  misc_feature 1..318: note = Synthetic
atgttattttacagaatgtcaagatatattccatcaaaatcaacacttagacaaaaaaaactacaatggatgaatttaattgttcacggccacgacatcttttgtgactgctgcaaaccacttgaatgcaccattggaaccataattaaccaagaaccagacctaaaattcaacacagaagaaaaaaatctacttaaaaaatgcctttctacaaaagatggagacgctggcgctggcgccgcagaccccgacggctttggagaaggagatttagacgccctctttacagaagattttggagaagaaaatacagggtaa

SEQ ID NO: 13357 - DNA, 318 bp, unidentified; identical to SEQ ID NO: 13356
  source 1..318: mol_type = other DNA
  misc_feature 1..318: note = Synthetic

SEQ ID NO: 13358 - DNA, 24 bp, unidentified
  source 1..24: mol_type = other DNA
  misc_feature 1..24: note = Synthetic
atgacagcaaagtgtccactgtga

SEQ ID NO: 13359 - DNA, 30 bp, unidentified; identical to SEQ ID NO: 5253
  source 1..30: mol_type = other DNA
  misc_feature 1..30: note = Synthetic

SEQ ID NO: 13360 - DNA, 2862 bp, unidentified
  misc_feature 1..2862: note = Synthetic
  source 1..2862: mol_type = other DNA
atgtgccttaccgccagagaacgcgcgaagatggccaccccctcgatgatgccgcagtgggcgtacatgcacatcgccgggcaggacgcctcggagtacctgagcccgggtctggtgcagtttgcccgcgccaccgacacgtacttcagcctgggcaacaagtttagaaaccccacggtggctcccacccacgatgtgaccacggaccggtcccagcgtctgacgctgcgctttgtgcccgtggatcgcgaggacaccacgtactcgtacaaggcgcgcttcactctggccgtgggcgacaaccgggtgctagacatggccagcacgtactttgacatccgcggcgttttggaccgcggtcccagctttaaaccctactcgggcacggcttacaacagtttggcccccaagggcgccccaaactccagtcagtggattacaaaacaaactaatgctggaaacgaaactacaaaaactcacacatacggtgtcgctgccatgggaggcgctgacataacaattaagggtctgcaaattggtgttgacaaaactgaaaacaaaaatgagcctatctatgcaaacgaaatctatcagccagaacctcaagtaggagaagaaaacctgcaagatgttgaaaattactatggaggcagagcccttaaaaaggaaaccaaaatgaagccttgttatggctcatttgctagacccacaaatgaaaaaggagggcaggctgtatttaaaactggaaatgatggccagccaactactgagcatgacataacaatggctttctttgatactcctggcgacactaatgctgaagacacagaacttgaagcagacattgttatgtacaccgaaaatgttaatcttgaaactccagatactcatgtggtgtacaagccaggacctttagaagacagttcagaaattaatttaacacagcagtccatgccaaacaggccaaactacattggcttcagggacaactttgtaggccttatgtactacaacagcactggcaacatgggtgtgctagctggtcaggcctctcagttgaatgctgtggttgacttacaagacagaaacacggagctgtcttaccagcttttgctagattctctgggtgacagaaccagatactttagtatgtggaactctgcggtggacagttacgatccagatgtcaggattattgagaatcacggtgtggaagatgaacttccaaactattgctttccattggacggagctggtactaatgctacatatcagggtgttaaagttaaaaatggacaggatggtgacaacaacgcagaatgggagaaagacaatgcagttgcggatcgaaaccaaatttgcaagggtaacatcgtcgccatggaaattaaccttcaggccaacctgtggaaaagttttctgtactcgaacgtggccttgtacctgcccgactcctttaagtacacgccggccaacgtcacactgcccaccaacaccaacacctacgagtacatgaacgggcgcgtggtggccccctcgctggtggacgcttacgttaacattggcgcccgctggtcactggaccccatggacaacgttaacccctttaaccaccaccgcaacgcgggcctgcgctatcgctccatgctgctgggcaacgggcgctacgtgccctttcacatccaagtgccccaaaagttctttgccattaaaaacctgctcctgctcccgggctcctacacctacgagtggaacttccgcaaggacgtcaacatgatcctgcagagttccctgggcaacgacctgcgcgtcgacggcgcctccgtccgctttgacagtgtgaacctctacgccaccttcttccccatggcgcacaacaccgcctccaccctggaagccatgctgcgcaacgacaccaacgaccagtccttcaacgactacctctcggccgccaacatgctttaccccatcccggccaaggccaccaacgtgcccatttccatcccctcgcgcaactgggccgcctttcgcggctggagttttacccgcctaaaaaccaaggaaactccctcactcggctcgggtttcgacccctactttgtctactcaggctccatcccctaccttgacgggaccttctacctcaaccacaccttcaagaaggtctccattatgttcgactcctcggttagctggcccggcaatgaccggctgcttacgccgaacgagttcgagattaagcgcagcgtcgacggggagggctataacgtggcccaatgcaacatgaccaaggactggttccttatccagatgctttcccactacaacattggctaccagggcttccacgtgcctgagggctacaaggaccgcatgtactccttcttccgcaacttccagcccatgagtaggcaggtggtcgatgagattaactacaaggattacaaggccgttgccctgcccttccagcacaacaactcgggcttcaccggctacctcgcacctaccatgcgccaggggcagccctaccccgccaacttcccctacccgcttattggagagaccgccgtgccctccgtcacccaaaaaaagttcctctgcgacagggtcatgtggcgcatcccattctccagcaacttcatgtctatgggcgcccttaccgacctgggtcaaaacatgctttacgccaactcggcgcacgcgctcgacatgacctttgaggtggaccccatggatgagcccaccctcctctatcttctctttgaagttttcgacgtggtcagagtgcaccagccgcaccgcggcgtcatcgaggccgtctacctgcgcacgcccttctccgccggcaacgccaccacctaa

SEQ ID NO: 13361 - DNA, 105 bp, unidentified; identical to SEQ ID NO: 1263
  source 1..105: mol_type = other DNA
  misc_feature 1..105: note = Synthetic

SEQ ID NO: 13362 - DNA, 33 bp, unidentified; identical to SEQ ID NO: 5256
  source 1..33: mol_type = other DNA
  misc_feature 1..33: note = Synthetic

SEQ ID NO: 13363 - DNA, 33 bp, unidentified; identical to SEQ ID NO: 5256
  source 1..33: mol_type = other DNA
  misc_feature 1..33: note = Synthetic

SEQ ID NO: 13364 - DNA, 108 bp, unidentified; identical to SEQ ID NO: 5257
  misc_feature 1..108: note = Synthetic
  source 1..108: mol_type = other DNA

SEQ ID NO: 13365 - DNA, 108 bp, unidentified; identical to SEQ ID NO: 5257
  source 1..108: mol_type = other DNA
  misc_feature 1..108: note = Synthetic

SEQ ID NO: 13366 - DNA, 24 bp, unidentified
  source 1..24: mol_type = other DNA
  misc_feature 1..24: note = Synthetic
ttgatgaagaagaagagcacgtag

SEQ ID NO: 13367 - DNA, 201 bp, unidentified
  source 1..201: mol_type = other DNA
  misc_feature 1..201: note = Synthetic
ttggggtcctcgctggagaggacgttgtttttctcgatggcggcggtggcgtgtcgccggcacgcgatgcagggcagcgtggagcagatcacgtacagctgccgcttgcagcgctcgaggtcgcggtgctcctcgaagcgccgcagcacgatgaagatcaccgcccacatggcgcggccccagaagcgaggctccatttaa

SEQ ID NO: 13368 - DNA, 69 bp, unidentified; identical to SEQ ID NO: 3317
  misc_feature 1..69: note = Synthetic
  source 1..69: mol_type = other DNA

SEQ ID NO: 13369 - DNA, 69 bp, unidentified; identical to SEQ ID NO: 3317
  source 1..69: mol_type = other DNA
  misc_feature 1..69: note = Synthetic

SEQ ID NO: 13370 - DNA, 54 bp, unidentified
  source 1..54: mol_type = other DNA
  misc_feature 1..54: note = Synthetic
ataaagacggcgtttacggaagctgttactttaaggaaaactcacaaattatag

SEQ ID NO: 13371 - DNA, 303 bp, unidentified
  source 1..303: mol_type = other DNA
  misc_feature 1..303: note = Synthetic
attctagcctgtacacagaaagtcaagatggacgaatcgctcgacttcgctcgcgattcgtcgaaggcggggggccggaggccccccggtggcccccctccaacgagtggagcacgtacaggggggtacgtcatccgtacaggggggtacgtcatccgtacaggggggtacgtcacaaagaggcgttcccgtacaggggggtacgtcacgcgtacaggggggtacgtcacagccaatcaaaagctgccacgttgcgaaagtgacgtttcgaaaatgggcggcgcaagcctctctatatattga

SEQ ID NO: 13372 - DNA, 18 bp, unidentified
  source 1..18: mol_type = other DNA
  misc_feature 1..18: note = Synthetic
atgtcatccgctccataa

SEQ ID NO: 13373 - DNA, 36 bp, unidentified; identical to SEQ ID NO: 5267
  misc_feature 1..36: note = Synthetic
  source 1..36: mol_type = other DNA

SEQ ID NO: 13374 - DNA, 72 bp, unidentified; identical to SEQ ID NO: 5268
  source 1..72: mol_type = other DNA
  misc_feature 1..72: note = Synthetic

SEQ ID NO: 13375 - DNA, 48 bp, unidentified; identical to SEQ ID NO: 5269
  misc_feature 1..48: note = Synthetic
  source 1..48: mol_type = other DNA

SEQ ID NO: 13376 - DNA, 1023 bp, unidentified
  misc_feature 1..1023: note = Synthetic
  source 1..1023: mol_type = other DNA
atgacaactagaacaaagggcaggggccatactgcggccacgactcaaaacgacagaatgccaggccctgagctttcgggctggatctctgagcagctaatgaccggaagaattcctgtaagcgacatcttctgtgatattgagaacaatccaggattatgctacgcatcccaaatgcaacaaacgaagccaaacccgaagacgcgcaacagtcaaacccaaacggacccaatttgcaatcatagttttgaggaggtagtacaaacattggcttcattggctactgttgtgcaacaacaaaccatcgcatcagaatcattagaacaacgcattacgagtcttgagaatggtctaaagccagtttatgatatggcaaaaacaatctcctcattgaacagggtttgtgctgagatggttgcaaaatatgatcttctggtgatgacaaccggtcgggcaacagcaaccgctgcggcaactgaggcttattgggccgaacatggtcaaccaccacctggaccatcactttatgaagaaagtgcgattcggggtaagattgaatctagagatgagaccgtccctcaaagtgttagggaggcattcaacaatctaaacagtaccacttcactaactgaggaaaattttgggaaacctgacatttcggcaaaggatttgagaaacattatgtatgatcacttgcctggttttggaactgctttccaccaattagtacaagtgatttgtaaattgggaaaagatagcaactcattggacatcattcatgctgagttccaggccagcctggctgaaggagactctcctcaatgtgccctaattcaaattacaaaaagagttccaatcttccaagatgctgctccacctgtcatccacatccgctctcgaggtgacattccccgagcttgccagaaaagcttgcgtccagtcccaccatcgcccaagattgatcgaggttgggtatgtgtttttcagcttcaagatggtaaaacacttggactcaaaatttga

SEQ ID NO: 13377 - DNA, 60 bp, unidentified; identical to SEQ ID NO: 5274
  source 1..60: mol_type = other DNA
  misc_feature 1..60: note = Synthetic

SEQ ID NO: 13378 - DNA, 576 bp, unidentified
  source 1..576: mol_type = other DNA
  misc_feature 1..576: note = Synthetic
atggcctattcaacaagggagatactgttagccctgtgtatacgggacagtcgtgtgcatggaaatggtaccctgcatcctgtgttggagctagcagcaagagaaacacctctccgcctttcaccagaggacactgtagttctgcgttatcatgtgttgcttgaggagataattgaacgaaattcagagacatttacagaaacttggaacagatttataacacacaccgaacatttggacctggattttaactcagtatttttagagatatttcaccgtggagacccaagccttgggcgcgcgttggcctggatggcctggtgcatgcatgcctgtaggacattgtgttgtaaccagtctactccttactatgttgtggacctgtcagttcgtgggatgttagaagccagcgaaggcctggatggttggattcatcaacagggcggctggtctacattaattgaagacaacattcctggatccagaaggtttagctggactttgtttcttgctggactgactttgagtctgttagttatatgtagttatttatttatctccagaggaagacactaa

SEQ ID NO: 13379 - DNA, 36 bp, unidentified; identical to SEQ ID NO: 5278
  source 1..36: mol_type = other DNA
  misc_feature 1..36: note = Synthetic

SEQ ID NO: 13380 - DNA, 576 bp, unidentified
  misc_feature 1..576: note = Synthetic
  source 1..576: mol_type = other DNA
atggcctattcaacaagggagatactgttagccctgtgtatacgggacagtcgtgtgcatggaaatggtaccctgcatcctgtgttggagctagcagcaagagaaacacctctccgcctttcgccagaggacactgtagttctgcgttatcatgtgttgcttgaggagataattgaacgaaattcagagacatttacagaaacttggaacagatttataacacacaccgaacatgtggatctggattttaactcagtatttttagagatatttcaccgtggagacccaagccttgggcgcgcgttggcctggatggcctggtgcatgcatgcctgcaggacattgtgttgtaaccagtctactccttactatgttgtggacctgtcagttcgtgggatgttagaagccagcgaaggcctggatggttggattcatcaacagggcggctggtctacattaattgaagacaacattcctggatccagaaggtttagctggactttgtttcttgctggactgactttgagtctgttagttatatgtagttatttatttatctccagaggaagacactaa

SEQ ID NO: 13381 - DNA, 576 bp, unidentified
  misc_feature 1..576: note = Synthetic
  source 1..576: mol_type = other DNA
atggcctattcaacaagggagatactgttagccctgtgtatacgggacagtcgtgtgcatggaaatggtaccctgcatcctgtgttggagctagcagcaagagaaacacctctccgcctttcgccagaggacactgtagttctgcgttatcatgtgttgcttgaggagataattgaacgaaattcagagacatttacagaaacttggaacagatttataacacacaccgaacatgtggacctggattttaactcagtatttttagagatatttcaccgtggagacccaagccttgggcgcgcgttggcctggatggcctggtgcatgcatgcctgcaggacattgtgttgtaaccagtctactccttactatgttgtggacctgtcagttcgtgggatgttagaagccagcgaaggcctggatggttggattcatcaacagggcggctggtctacattaattgaagacaacattcctggatccagaaggtttagctggactttgtttcttgctggactgactttgagtctgttagttatatgtagttatttatttatctccagaggaagacactaa

SEQ ID NO: 13382 - DNA, 36 bp, unidentified; identical to SEQ ID NO: 5278
  misc_feature 1..36: note = Synthetic
  source 1..36: mol_type = other DNA

SEQ ID NO: 13383 - DNA, 36 bp, unidentified; identical to SEQ ID NO: 5278
  misc_feature 1..36: note = Synthetic
  source 1..36: mol_type = other DNA

SEQ ID NO: 13384 - DNA, 348 bp, unidentified
  source 1..348: mol_type = other DNA
  misc_feature 1..348: note = Synthetic
ttgtgcattcggttgggaagccagcgtatgggcaactcaaatacaaatatacaagtaagccagcagaatactcatattcaagcatcggattcaaaactagagttacacgatcaaaaaacagcgacgctgcaatcaacacaactgttgatctctattggtgctataattatagtagcgctaattctgttactgctattttcgctaattctgaactgttatttgtgtaacagactcaaaaagaagaatggttatctcaaacgagaaagaaaaatttccaatctcagggacaaaggactggataaattcatacttgataaacccaatgatatcaccagtggttgtgtatga

SEQ ID NO: 13385 - DNA, 15 bp, unidentified
  source 1..15: mol_type = other DNA
  misc_feature 1..15: note = Synthetic
aggaaaaggtcataa

SEQ ID NO: 13386 - DNA, 54 bp, unidentified
  misc_feature 1..54: note = Synthetic
  source 1..54: mol_type = other DNA
ataaagacggcgtttacggaagttgttactttaaggaaaactcacaaattatag

SEQ ID NO: 13387 - DNA, 462 bp, unidentified
  source 1..462: mol_type = other DNA
  misc_feature 1..462: note = Synthetic
atggagaagcgagaagttaataaagctctgtacgatcttcaacgtagtgctatggtgtacagctccgacgatattcctcctcgttggtttatgacaactgaggcggataagccggatgctatgactatggctgacgtcataatagatgatgtatcccgcgaaaaatcaatgagagaggatcataagtcttttgatgatgttattccggctaaaaaaattattgattggaaaaatgctaaccctgtcaccattattaatgagtactgccaaataactaagagagattggtcttttcgtattgaatcagtggggcctagtaactctcctacattttatgcctgtgtagacatcgacgggagagtattcgataaggccgatggaaaatctaaacgagatgctaaaaataatgcagctaaattggctgtagataaacttcttggttacgtcatcattagattctga

SEQ ID NO: 13388 - DNA, 69 bp, unidentified; identical to SEQ ID NO: 5285
  source 1..69: mol_type = other DNA
  misc_feature 1..69: note = Synthetic

SEQ ID NO: 13389 - DNA, 462 bp, unidentified
  source 1..462: mol_type = other DNA
  misc_feature 1..462: note = Synthetic
atggagaagcgagaagttaataaagctctgtacgatcttcaacgtagtgctatggtgtacagctccgacgatattcctcctcgttggtttacgacaatggaggcggataagccggatgctgatgctatggctgattccataatagatgatgcatcccgcgaaaaatcaatgagagaggatcataagtctttcgatgatgttattccggctaaaaaaattattgattggaaagatgctaaccctgtcaccattattaatgagtactgccaaataactaagagagattggtcttttcgtattgaatcagtggggcctagtaactctcctacattttatgcctgtgtagacatcgacggaagagtattcgataaggcagatggaaaatctaaacgagatgctaaaaataatgcagctaaattggctgtagatacacttcttggttacgtcatcattagattctga

SEQ ID NO: 13390 - DNA, 276 bp, unidentified
  misc_feature 1..276: note = Synthetic
  source 1..276: mol_type = other DNA
ctggcctgtggtgtgtgttgttttttgtgcacgcacgacatgacactcttttgccgcaccgccaacagcaccgccggctacgtcgacatgaacgtctgcatcggcatgatcggcgtggtttgtttcgttttcggggtctttattctcatcttttgctccacgttgaaagctttctacgtgcggcaaaagacttaccacctcctgggtaccgagtcggacgacgaggagaccacggtttgggaaaagcgccggatggagtcggatacagacttttaa

SEQ ID NO: 13391 - DNA, 120 bp, unidentified; identical to SEQ ID NO: 5289
  source 1..120: mol_type = other DNA
  misc_feature 1..120: note = Synthetic

SEQ ID NO: 13392 - DNA, 1293 bp, unidentified; identical to SEQ ID NO: 10631
  source 1..1293: mol_type = other DNA
  misc_feature 1..1293: note = Synthetic

SEQ ID NO: 13393 - DNA, 27 bp, unidentified
  misc_feature 1..27: note = Synthetic
  source 1..27: mol_type = other DNA
atgctaggaaaccgacggtgtacataa

SEQ ID NO: 13394 - DNA, 2577 bp, unidentified
  source 1..2577: mol_type = other DNA
  misc_feature 1..2577: note = Synthetic
gtggcaatgagagtgaaggagaaatatcagcacttgtggagatgggggtggagatggggcaccatgctccttgggatgttgatgatctgtagtgctacagaaaaattgtgggtcacagtctattatggggtacctgtgtggaaggaagcaaccaccactctattttgtgcatcagatgctaaagcatatgatacagaggtacataatgtttgggccacacatgcctgtgtacccacagaccccaacccacaagaagtagtattggtaaatgtgacagaaaattttaacatgtggaaaaatgacatggtagaacagatgcatgaggatataatcagtttatgggatcaaagcctaaagccatgtgtaaaattaaccccactctgtgttagtttaaagtgcactgatttgaagaatgatactaataccaatagtagtagcgggagaatgataatggagaaaggagagataaaaaactgctctttcaatatcagcacaagcataagaggtaaggtgcagaaagaatatgcatttttttataaacttgatataataccaatagataatgatactaccagctataagttgacaagttgtaacacctcagtcattacacaggcctgtccaaaggtatcctttgagccaattcccatacattattgtgccccggctggttttgcgattctaaaatgtaataataagacgttcaatggaacaggaccatgtacaaatgtcagcacagtacaatgtacacatggaattaggccagtagtatcaactcaactgctgttaaatggcagtctagcagaagaagaggtagtaattagatctgtcaatttcacggacaatgctaaaaccataatagtacagctgaacacatctgtagaaattaattgtacaagacccaacaacaatacaagaaaaagaatccgtatccagagaggaccagggagagcatttgttacaataggaaaaataggaaatatgagacaagcacattgtaacattagtagagcaaaatggaataacactttaaaacagatagctagcaaattaagagaacaatttggaaataataaaacaataatctttaagcaatcctcaggaggggacccagaaattgtaacgcacagttttaattgtggaggggaatttttctactgtaattcaacacaactgtttaatagtacttggtttaatagtacttggagtactgaagggtcaaataacactgaaggaagtgacacaatcaccctcccatgcagaataaaacaaattataaacatgtggcagaaagtaggaaaagcaatgtatgcccctcccatcagtggacaaattagatgttcatcaaatattacagggctgctattaacaagagatggtggtaatagcaacaatgagtccgagatcttcagacctggaggaggagatatgagggacaattggagaagtgaattatataaatataaagtagtaaaaattgaaccattaggagtagcacccaccaaggcaaagagaagagtggtgcagagagaaaaaagagcagtgggaataggagctttgttccttgggttcttgggagcagcaggaagcactatgggcgcagcctcaatgacgctgacggtacaggccagacaattattgtctggtatagtgcagcagcagaacaatttgctgagggctattgaggcgcaacagcatctgttgcaactcacagtctggggcatcaagcagctccaggcaagaatcctggctgtggaaagatacctaaaggatcaacagctcctggggatttggggttgctctggaaaactcatttgcaccactgctgtgccttggaatgctagttggagtaataaatctctggaacagatttggaatcacacgacctggatggagtgggacagagaaattaacaattacacaagcttaatacactccttaattgaagaatcgcaaaaccagcaagaaaagaatgaacaagaattattggaattagataaatgggcaagtttgtggaattggtttaacataacaaattggctgtggtatataaaattattcataatgatagtaggaggcttggtaggtttaagaatagtttttgctgtactttctatagtgaatagagttaggcagggatattcaccattatcgtttcagacccacctcccaaccccgaggggacccgacaggcccgaaggaatagaagaagaaggtggagagagagacagagacagatccattcgattagtgaacggatccttggcacttatctgggacgatctgcggagcctgtgcctcttcagctaccaccgcttgagagacttactcttgattgtaacgaggattgtggaacttctgggacgcagggggtgggaagccctcaaatattggtggaatctcctacagtattggagtcaggaactaaagaatagtgctgttagcttgctcaatgccacagccatagcagtagctgaggggacagatagggttatagaagtagtacaaggagcttgtagagctattcgccacatacctagaagaataagacagggcttggaaaggattttgctataa

SEQ ID NO: 13395 - DNA, 39 bp, unidentified; identical to SEQ ID NO: 2469
  misc_feature 1..39: note = Synthetic
  source 1..39: mol_type = other DNA

SEQ ID NO: 13396 - DNA, 51 bp, unidentified; identical to SEQ ID NO: 5301
  source 1..51: mol_type = other DNA
  misc_feature 1..51: note = Synthetic

SEQ ID NO: 13397 - DNA, 57 bp, unidentified; identical to SEQ ID NO: 5305
  misc_feature 1..57: note = Synthetic
  source 1..57: mol_type = other DNA

SEQ ID NO: 13398 - DNA, 57 bp, unidentified; identical to SEQ ID NO: 5305
  source 1..57: mol_type = other DNA
  misc_feature 1..57: note = Synthetic

SEQ ID NO: 13399 - DNA, 312 bp, unidentified
  misc_feature 1..312: note = Synthetic
  source 1..312: mol_type = other DNA
attaactggatggggatggcctacagagtcctggctgatgtgatgaggggaattcgcatggacgggttttttatttcatcagatgcagaggaacttctccagaatcttcgagaatggatgtacttcagttggatgactgagcggcagcagcgaaaggacggccgcaggaggggtatctgctgttcaagggcccatttctgctggcagaagtacgacaaggtacgcaagagaatccactacaatgcaaaccgagattcaatccagctcgctccgccatcatccatatcgcagggcccgtttaccacgatctga

SEQ ID NO: 13400 - DNA, 312 bp, unidentified; identical to SEQ ID NO: 13399
  source 1..312: mol_type = other DNA
  misc_feature 1..312: note = Synthetic

SEQ ID NO: 13401 - DNA, 33 bp, unidentified; identical to SEQ ID NO: 5307
  misc_feature 1..33: note = Synthetic
  source 1..33: mol_type = other DNA

SEQ ID NO: 13402 - DNA, 48 bp, unidentified
  misc_feature 1..48: note = Synthetic
  source 1..48: mol_type = other DNA
ctgaggaagattaagaaaaactgcttattgggtctttccgtgttttag

SEQ ID NO: 13403 - DNA, 198 bp, unidentified
  source 1..198: mol_type = other DNA
  misc_feature 1..198: note = Synthetic
ctgagcgacagggagctgatgcacagcctgcagagggcgctggcgggcgccggggacgaggagcgcgaggcttacttcgacatgggagccgatctgcagtggcgtcccagcgcgcgcgccttggaggcggcgggctaccccgacgaggaggatcgggacgatttggaggaggcaggcgagtacgaggacgaagcctga

SEQ ID NO: 13404 - DNA, 27 bp, unidentified
  misc_feature 1..27: note = Synthetic
  source 1..27: mol_type = other DNA
atgaggaaactctcaaacaacggctaa

SEQ ID NO: 13405 - DNA, 42 bp, unidentified; identical to SEQ ID NO: 4076
  misc_feature 1..42: note = Synthetic
  source 1..42: mol_type = other DNA

SEQ ID NO: 13406 - DNA, 54 bp, unidentified
  source 1..54: mol_type = other DNA
  misc_feature 1..54: note = Synthetic
atggatgattcaagaataccgaagcgactggcgagacagactttcccaccatga

SEQ ID NO: 13407 - DNA, 2100 bp, unidentified
  misc_feature 1..2100: note = Synthetic
  source 1..2100: mol_type = other DNA
atggcagcccgacttccaatcgacgcctttggcatttcagtgattcagcaaaacggtctcaaagtatacacaattctacctacaagcatgctaatcacactgactgaacaaacggcatctagcaagttgtatgctatacctgagaaacatctagactcattaaatgagcgtgatcgaggaaagataaaaaaagtcaaatttatgattacaagtaagtctgtggattatacgaactggttcacctcagagactgatgtggaaattcaggagtatttggaagacaccggattataccttgcgttgcaaaaagcatatgaaaagaaccgagagaagccctcagttgttgcaagtcctgcaaacccggctccaatgacggctagacagaaagatgtgttaggaacgtggtcaatggggtctatacctaatttttgtgaatcagttggtttggatagacaacctgaaggcccttggagacaacttgtgagaagcgcgggttttttactcctgtctagtcctggtgcattagcctcgacccatattggctcagtggatgctgatttaagttattttgaggtgcgagaccagagatggatgaagctgttggattacaaagagattttgtcgagaggtggtgatcaccccaaacgttatcagctattccctttaaccggacccccttccgatgacacttctgaggagatggtggcgcttgacggatcttgggtccgaagtgaggagcacgataaagggttattcgctcttcctagtcgtgtgactatcattaatgtgcgacaggtaatggaatcaaggcccgatagtgacatggaagacgaggaggttacagagccatggaagtgtcagcgcattgtcgaagaagtgactcagcaggcagaatcacttagtcttgagtctagtggaaagtttgagttttctcagcctaccctgacgatgccaaaatttgttgcaaagtcgggtgaggcaacgcacctcggggttgaggaatcaccgtctcgtgaaggacaacgtgcaagtcacaagcctgaggagcgttcgttggagcagcccgtcgatgatgcgttgctggttgatgatgtctttaatgctagttgggttacagcatctacattctcgcctcataaggcttcccaacataagtcagccattggaatgtctgctaccatgacagatatcgacgaggaggattgtgagtcgatcatgtctgaattttcaaacactccatatgaagtgcgaacgcctccaccctcccctccacctccttctgttccagagccgacactttatcctccatctgacattcccgcatcaactcctctaccccagcgcaagccgagggttaaactcacggaagctcagattcaggcacagcgtcgatcaaggaaactgaaaccttactatcgggcgctaggggattgtttcgtccctgcgtgtgatgttgaatcataccgagctagtgttattgtgcagccaactcctcgaaatgtgctcccctttcctggaacgcagctgactcgtgagaccgttcttcgaacggctttagttcgggaatgtgagcttgtggcccctcataaacctcccgagccggaaaagttacttgatgaggagacatttgagatgtgtcgtaaaagggcgcgaattatgtatgagtcagttccttctcatcttcgtgatgtcgaagtggtaaaaaatggagatcaggctgtccgaccatcagtgatatgtccacgccctcagatttcaatgcctgataactattctcttgggaatgaggaggaacgaattaagacttatgtgcggaaaagaaccattatggagagagagtctggtgattatgccgtattacgtcctggatatggagctgaggcgttggagcatgcacgatatgtgtcagccgctggtgtccccgttccaggattagatgggcaggttcttcggtccagagcgtctcgggagatgatgagtaagatagatttgaggttgcttgagctaatgatgcctgtagtaacgaagccggatgagcaaatggatccggagcttgtgagtttgtacaaagcgacggttatagatattttaacaggctag

SEQ ID NO: 13408 - DNA, 1677 bp, unidentified; identical to SEQ ID NO: 12958
  source 1..1677: mol_type = other DNA
  misc_feature 1..1677: note = Synthetic

SEQ ID NO: 13409 - DNA, 45 bp, unidentified; identical to SEQ ID NO: 1531
  misc_feature 1..45: note = Synthetic
  source 1..45: mol_type = other DNA

SEQ ID NO: 13410 - DNA, 30 bp, unidentified; identical to SEQ ID NO: 5319
  misc_feature 1..30: note = Synthetic
  source 1..30: mol_type = other DNA

SEQ ID NO: 13411 - DNA, 30 bp, unidentified; identical to SEQ ID NO: 5319
  misc_feature 1..30: note = Synthetic
  source 1..30: mol_type = other DNA

SEQ ID NO: 13412 - DNA, 1659 bp, unidentified
  misc_feature 1..1659: note = Synthetic
  source 1..1659: mol_type = other DNA
gtgaccaaggccacgacgttcctgcagactatgttaaggaaggaggttaacagtcagctgagcctgggagacccgctgttcccagaattggccgaagaatccctcaaaacctttgaacaagtgaccgaggattgcaacgagaaccccgaaaaagatgtcctgacagaactcggtgacatcctcgcccaggctgtcaatcatgccggtatcgattccagtagcaccggccccacgctgacaacccactcttgcagcgttagcagcgcccctcttaacaagccgacccccaccagcgtcgcggttactaacactcctctccccggggcatccgctactcccgagctcagcccgcgtaagaaaccgcgcaaaaccacgcgtcctttcaaggtgattattaaaccgcccgtgcctcccgcgcctatcatgctgcccctcatcaaacaggaagacatcaagcccgagcccgactttaccatccagtaccgcaacaagattatcgataccgccggctgtatcgtgatctctgatagcgaggaagaacagggtgaagaagtcgagacccgcggtgctaccgcgtcttccccttccaccggcagcggcacgccgcgagtgacctctcccacgcacccgctctcccagatgaaccaccctcctcttcccgatcctttgggccggcccgatgaagatagttcctcttcgtcttcctcctcctgcagttcggcttcggactcggagagtgagtccgaggagatgaaatgcagcagtggcggaggagcatccgtgacctcgagccaccatgggcgcggcggttttggtggcgcggcctcctcctctctgctgagctgcggccatcagagcagcggcggggcgagcaccggacctcgcaagaagaagagcaaacgcatctccgagttggacaacgagaaggtgcgcaatatcatgaaagataagaacacccccttctgcacacccaacgtgcagactcggcggggtcgcgtcaagattgacgaggtgagccgcatgttccgtcacaccaatcgttctcttgagtacaagaatctgccattcatgatccctagtatgcaccaagtgttagaagaggccatcaaagtttgcaaaaccatgcaggtgaacaacaagggcattcagatcatctacacccgcaatcatgaagtgaagaatgaggtggatcaggtacggtgtcgcctgggtagcatgtgcaacctggccctctccactcccttcctcatggagcacactatgcctgtgacacaccctcctgatgtggcgcagcgcacggccgatgcttgtaacgacggtgtcaaggccgtgtggaacctcaaagaactgcacacccaccaattgtgcccccgctcttctgattaccgcaacatgattatccacgctgccacccccgtggacctgttgggcgctctcaacctgtgcctgcccctgatgcaaaagtttcccaaacaggtcatggtgcgcatcttctccaccaaccagggtgggttcatgctgcctatctacgagacggccgcgaaggcctacgccgtggggcagtttgagaagcccaccgagacccctcccgaagacctggacaccctgagcctggccatcgaggcagccatccaggacctgaggaacaaatctcagtaa

SEQ ID NO: 13413 - DNA, 1392 bp, unidentified
  misc_feature 1..1392: note = Synthetic
  source 1..1392: mol_type = other DNA
gtgaccaaggccacgacgttcctgcagactatgttaaggaaggaggttaacagtcagctgagcctgggagacccgctgttcccagaattggccgaagaatccctcaaaacctttgaacaagtgaccgaggattgcaacgagaaccccgaaaaagatgtcctgacagaactcgtcaaacagattaaggttcgagtggacatggtgcggcatagaatcaaggagcacatgctgaaaaaatatacccagacggaagaaaaattcactggcgcctttaatatgatgggaggatgtttgcagaatgccttagatatcttagataaggttcatgagcctttcgaggacatgaagtgtattgggctaactatgcagagcatgtatgagaactacattgtacctgaggataagcgggagatgtggatggcttgtattaaggagctgcatgatgtgagcaagggcgccgctaacaagttggggggtgcactgcaggctaaggcccgtgctaaaaaggatgaacttaggagaaagatgatgtatatgtgctacaggaatatagagttctttaccaagaactcagccttccctaagaccaccaatggctgcagtcaggccatggcggcattgcagaacttgcctcagtgctctcctgatgagattatgtcttatgcccagaaaatctttaagattttggatgaggagagagacaaggtgctcacgcacattgatcacatatttatggatatcctcactacatgtgtggaaacaatgtgtaatgagtacaaggtcactagtgacgcttgtatgatgaccatgtacgggggcatctctctcttaagtgagttctgtcgggtgctgtgctgctatgtcttagaggagactagtgtgatgctggccaagcggcctctgataaccaagcctgaggttatcagtgtaatgaagcgccgcattgaggagatctgcatgaaggtctttgcccagtacattctgggggccgatcctttgagagtctgctctcctagtgtggatgacctacgggccatcgccgaggagtcagatgaggaagaggctattgtagcctacactttggccaccgctggtgccagctcctctgattctctggtgtcacctccagagtcccctgtacccgcgactatccctctgtcctcagtaattgtggctgagaacagtgatcaggaagaaagtgaacagagtgatgaggaacaggaggagggtgctcaggaggagcgggaggacactgtgtctgtcaagtctgagccagtgtctgagatagaggaagttgcctcagaggaagaggaggatggtgctgaggaacccaccgcctctggaggcaagagcacccaccctatggtgactagaagcaaggctgaccagtaa

SEQ ID NO: 13414 - DNA, 4290 bp, unidentified
  source 1..4290: mol_type = other DNA
  misc_feature 1..4290: note = Synthetic
attctaatcataataacactactcgggtgcacagcagaggaaagcaccaccgaggctgtgactgaagctacaacaactgcaaatcctctagccacggacactccactaaggcgcagggtcataaaccagaggatcctgtctgtactcggcctagggccagacaccgtcagcactaaactggagcaagcctgcaaagacatctatacaggtgagtgtaaactggaagacatgagcgctcgggtacccgccttcttcatggaaagaaacaaatcaatctgcttcaacgacattctcgagaagaagtcttgcttagaacacccgcccaccctcaatcccaactggaagtcttggggcatgagtgcaacagaggttgcaaagtactatgacaccaaaataaagcttttctttacaagcagcatgaggctatcatgcttcgccgccaatctggtggagcccgaccagtttgttgagaagatgagcacgtcaattcaagctacaagtggacctgccaagcaaaatgtgcgatcgatgcactgcaccaacattgtctggtcccacgtgcaggagagtgaggtggaagtaatacacgtcttgctctcaactgtacctctaagaacaaagaattgtttgtctagggtgaacatgaggcagtgcacctttactaagcaatctgatggcaagcttgacttgccaagctacaaacatggtgggaagtactggatcccaggtgcatacaccatgtccgtgagtgtggacaggccagccgacggtccctgtgagatcaccaccacctgcataacagagggtagtgaagtgaagccaggccttcataggatgaggggctttgaaaccaccattgttgtccccagcaagaggcccacaggcagaaggctaatgggcacgaactctgacagtaacccgtgcagctcaggaactttcctcggcgagggaagcagtgcccaggttgttggtgacaagaatgacggaccaggtgaccacatcactttctgtaatggtacctatgtttctaaaatgaagctcggcaaacaacatggatgcttcaccgtgaggagagtgaaagcctacagaagttgccatcctagagaaactccagcagcatgtgttgtggatgaggaactaagagagtgtgaagggcaaaagtgcatgaacatacacattgaggtccgtgggcttgtgaaaataacgagggggaagaatgtggaggtcatcacttgcgatagagactgtctggcccgaattccgagcggcaagggagatatacagattgactgcccgggaggaaggcagcattacctcgaaacaaatgtagttgacataaactgcccagggtctgagagatttcatggattgatgctttacttctgtagaatgtcacatagaccaaagacctgcatctccttctttatatggctagcggtcggttacggcttgacttgcattacaggcactgctctctactacctactactatttgtctgcaaggctgtcaagggaatcaagaggaggtttctgatgaaaggtgacttttgcatcaaatgcgaacagaagtgtgcaaccagcctagaacaggcactacatgatgaaaactgctcttacaacctgtgtccctactgcggcaaccgtctaccagaggatagtctctgccgccatgtacccaactgtcctaagaggaaggaaagactagaagaaatagatctctacctcgactatcagctgttgcccttcctcctgtacatcctgctcaagctggccttgaatttcggcatcctactaaaacggctaagctggtttgcggtgttattgatcctgttcctagtgactctggcacctgttcaagggaaccccactcaacccgagacagacacagaaagtgacagtactactctatcattgctgctagcaatggaggccttgttagcattatccctcatcctccatgttgcatttgaggcgtatcgcctgagggtgagagcccagctgaagagagagaaggaagtctcgaaagcagttatgctgaggcctgaggcagcagtgctacttacaggaaagcccttatgtcttggggattgggacacagagagctcgaaaaattcacgacaaggtgccaaattcaggctggtctctcttgtgaggttcaatgcagcagtggtcctggtggtgctggttgtggggttgtttgcaaccagtgcgatggggttcgactctgggccgctgcctaagggcatatgggaggaggagcaggaactggtgcaagagtgtggacaagagtgttccgtgcaggatgaagagtgtctgtgccctggtgagagcaaaaacatgagaaagctgctcttctttaaaggtctaaactctgttgcctcgaggatgctaaacacacacaagctaatgaccagcatctctatcgatgcgccctggggtgccattcaagtagagtcaacctacaagcccaagcttcctgtttcaaacatagaattggcatggaactcagttgaggaacagggtgataaaatcatcttatctggcaagtctacctccattctaaagttggaagaaaaaacaggcgtgcagtggtccctaggagcagaatccgcatcagaggagaaaaggctcttggtctctgtgctagactatacacaagtttactcaagtactttccagtacatcaccggagaccgaacgatttctgagtggccaaaagcaacctgcaccggggactgtccagacaggtgttcctgccgtacctccacatgtctgtataaaacttggcctcacagcagaaactggagatgcaaccctacctggtgttggggggtgggcaccggctgcacatgctgtggagttgacattgaaagacccttcaacaaatactttgcagtaaagtggagtactgattatgtaaggacagatgttctggtgtgtgttgagctcacagatctagaaagacactgcgacgttgtggaggcaggaagtcagtttgtgataggacctgtccgggtagtggtttcagatcctcaaaatgttcagacaaagctgccaccagaggtgctcaccgtgcagaaactggagaaacactcacacctggacctgatgcatgtcactaacatcatatctgccaagaatgcgtgcaaactgcagagctgcacccacggaagtccgggcgatatgcaaatactacatactgacaacctaatccaaaacagccatgacgacggagcaaatctggcagaggtcatcccagaagtgaatacaacctggatgtcctgggagggctgtgatctagactactactgtactactggaagttggccaagctgcacattcaccggggtgaacaccgagaactctgacagctttgaaaacctattaaatacagaggcaaacctagttgatagataccacttccactccaagagaatctttgcccaagggtcaacacttcaaatggatttgaaaggcaggccgatcaccgggggaggggaactgactgtgcttgtagacataaagggcttagaacttcactcaaagaaagtggtgctaaaaggactagaaatcaagtcattctcctgcactggctgttactcctgcagttcaggggtctcttgctctgtggatgtcaagatagaaaaacctgatgagttcactgtccacctaaggagcacagatccaaacacagtaatatcagaaggtagcattgtggcaagaaagttgactggagggccacaaagcaaagtgaaagctttcactgcgctcaaagctggaaagatttgtattgagatagttgagaaatcttactgcccatcttgcaaagactctgacgtcaagaaatgcatcaacgctgacctacagccacccaaggacatcctcctagaacacaaaggaattataatcaagcaccaaaataacagctgcaactcaggcattcagtgctggagtgagtcaacaaccagcttcttgaacggcgtcggaagcttcttcaagaactacttcggtagcatagctgcgggcgttctgctgacattgctacctgttttagcagttatgttcttcttcctctttggtgacaaaattgcaaaggtgttcctgtgcttaagatgctgtaagggcctttcaagaagaagcagaatgcagggtgaaaaggaggaggagctaaaaaaaatgttgaagaaattcagcaaaggaggcgagcttttcagcaggggaagcagagatgcaagaacagtggcgatggtccttgctggcaaaggaaaggactacaaagagcaggtgtaa

SEQ ID NO: 13415 - DNA, 2298 bp, unidentified
  source 1..2298: mol_type = other DNA
  misc_feature 1..2298: note = Synthetic
gtgtctaacttctcgttgataatcaaccagctaactctcaacatgttcaccaacaaagctatccttgctgtttatcaactccctgaagagtgcacactcgaattggtcgttcgtgacgcgtccggaaacattgtcgactcttgctacgctgagcttttccaactacgtgggaacgtcaaacatggggatagacaagcccagatgatcaatcatttcaatcaggtgctcgacttactgcgtacgtcggttggtgaaagtattgacagcatgatcaggtatgttggagagcagggaacagatgacactcgtgcgttggtgattcgagccatgaatgacttcttcccggccaaggttggagaagcagtgttccaagcagtgcaggctgccatgcaaggacccggaatgttgactgcgttgttgacaaaacagttggagtttcttggcaatgcaacgctatacaatacaaggatgcttgaggcactggttagcattcttgatccaaagaagtcaacaacgcaggatgttgcgcccatcgactacattaacggacctgtgaaaacgccgctctgggacccctttatcatgcagcacccagatttggcaccaacggagaaagtggatattccgcagatgtctgcccctataccaggccgaccacaagtttctggatggtatccccccctggcaaaggttggcactatcatgccagacggatcggtgctttataattctgggtgtgatgacgtcgcctcctcagtagtgagtgagcctcctcacgagtgtaaccccgatgatggtgggtctgtcaaggacagtaagctggagttagtatcagcaagtgaggttcctgaaaacgatgacgcattgaggctacttgaggaacttgcccgaagtcaattgccatcacgacagcaagttcacagcatgatcgtacctcagaggggtgctgctggaaaggtggtggttactccagattatatgaaagaggggtctaagattgatatgcaaccgtaccattcctacggtggacctggtgaggatcactatgtaccgatgggaaccatgttgaactacatcaaacatgactgtggattcgttatcccgttagaggacccacgtcatagtgaatgtgctctctggactgaaatggactcgctgcgtgatgaagcgccccggacgggaccttactatcgatatgacttgaatctggatcactttcgggagtgtctggctcgtcattctcacatctatgctgatggaacacgtttaattggagcgtatgtctttgagtttgtggatggcgagcgatggactcttgaaatttgttcatatcgagatcgagcctttcggtcggcgttgttggctcgtgcgaaccccagattgatgcacgcccttggttatacaacgaacttcggtcggtttgtcgtcgctatggacccgcgaatgaatctatcagacttcccagtggatgtgatgcgtcctgcagaaggtcgtccattatgtgttgagatggaatctcgaggcgctggacctttgatggacgagcttgacttctactttgagcgtgagtggaggaacatacaggggagagcattccaaggtaaagtgccgaaatcgctgactcgtcctgatgatcttctcgaggccttgacagctttagggaaggggaccgccttttcgcttactcctcagaggggctcgagcgttcccacgactatggctagaatgttacgtgatcggggagcacatgattgggcacaaattttggagaagatggcaggtgtgcttgcccgggccgctgcagaagatgggaacccagccgaggccttctatcgtgaagtatcgacgtggcaacctgatgaaaaagcgaaagtgatgcagcttgttacatggaagagacttgcaacgaactttggggtaaaggttgcaatgcgcgcgctcggtgttcgtaatgggtatcgtgtatcccgagcagcgatccctaaaggagtgatggctttgaataattgtgatctgtttggcggtggtcatgtgtgtccagaatgtcactctgtcttccagacggctggtgaaagaaagatgtgcacgactctggatctgatgttccatcagttgtttctcctttccaccggcgaagtgtggctgggcgctttaatgattcatgatcccaagacgcgacagttcaagaagttgaaggacgttgcgcgtggccagaatgggggcgttagttatgaggaagtcaagaaagtgcggcagttcatggtgcgatttccgttcggtaggatgtgtcctcactaa

SEQ ID NO: 13416 - DNA, 141 bp, unidentified
  source 1..141: mol_type = other DNA
  misc_feature 1..141: note = Synthetic
ttgctgtttatcaactccctgaagagtgcacactcgaattggtcgttcgtgacgcgtccggaaacattgtcgactcttgctacgctgagcttttccaactacgtgggaacgtcaaacatggggatagacaagcccagatga

SEQ ID NO: 13417 - DNA, 153 bp, unidentified; identical to SEQ ID NO: 5329
  misc_feature 1..153: note = Synthetic
  source 1..153: mol_type = other DNA

SEQ ID NO: 13418 - DNA, 24 bp, unidentified
  source 1..24: mol_type = other DNA
  misc_feature 1..24: note = Synthetic
atgaagatcgtaggcgtgcattga

SEQ ID NO: 13419 - DNA, 24 bp, unidentified
  misc_feature 1..24: note = Synthetic
  source 1..24: mol_type = other DNA
atgaagatcgtaggcgtgcattga

SEQ ID NO: 13420 - DNA, 111 bp, unidentified
  misc_feature 1..111: note = Synthetic
  source 1..111: mol_type = other DNA
gtgaacgggaccggcaacatagtgcgagcaatggccacattggccaagagcttgaagaactttaaaaaactgcgtggacccattgtacacctctacggcggtcctaaatag

SEQ ID NO: 13421 - DNA, 111 bp, unidentified; identical to SEQ ID NO: 13420
  misc_feature 1..111: note = Synthetic
  source 1..111: mol_type = other DNA

SEQ ID NO: 13422 - DNA, 27 bp, unidentified
  misc_feature 1..27: note = Synthetic
  source 1..27: mol_type = other DNA
atgagacggataggtgggcacgagtag

SEQ ID NO: 13423 - DNA, 27 bp, unidentified
  source 1..27: mol_type = other DNA
  misc_feature 1..27: note = Synthetic
atgagacggataggtgggcacgagtag

SEQ ID NO: 13424 - DNA, 1026 bp, unidentified
  misc_feature 1..1026: note = Synthetic
  source 1..1026: mol_type = other DNA
acgttcagcatcatgtttggctatatgcaactcatcaaccccacttctgacatttatattaaagactatggaaacttttctgggattgttgcacatcaagcctatgatccgattcgcagggaccacatgctccttcgttcgatgaaactccatttcggacctaattccaagctcctatggttgggagattttcatgccatcacattatctcatgctaacatgatatttggtgcagattcggtcggatttaaaggtgtaaatgtatcaacattgcccccggacactttaactaccggaatcagaccgagaccaacagtgaccatggaccttgctcagcttaaagctttctaccaggacttgacagacaaggagttgtacatcttatattttcatgatgttcttaggttcgtaagtcaaacgggaggacctgttcttgagttgcaggatgtgtttcgatggataagcgagacagtttcagggcctgtcgtgatacgaacggattgtacaacaggagttggcaacctctggcccaatggtagtggacatttctactatccttatgaaaggaaaacgaagtttcggtatggtacatttattgattgtggaaagaacttgatttgggcggagggaccccagtgggatgtgaaaagttatgtagcgggttttaacttcgttacgagggctaactccttgttgggtggaggatttgatgaggtctgttatagattgatgatgcaagcagagattcccaatcaggtgattgagcaggggctgacgctggaacaggcggttaggaagatggcagcagagcatcatctagctcgacctcaactgacctcgagaaggctgcctggagtatctgaacccgcgaagtatgaggcgtacgtagtgtgcggacctttcagaacggggcaggtcattgctgatgtcctgcgaacggccgaggatttggcttggagggaaatgcttggtgtgctgaagacactaatccatgatgatgctcggattactaagggttgttgttga

SEQ ID NO: 13425 - DNA, 1026 bp, unidentified; identical to SEQ ID NO: 13424
  misc_feature 1..1026: note = Synthetic
  source 1..1026: mol_type = other DNA

SEQ ID NO: 13426 - DNA, 927 bp, unidentified
  source 1..927: mol_type = other DNA
  misc_feature 1..927: note = Synthetic
atgccggctcttgctataatcggtgactcactactaactgcttctctcattgacaaatacgtaccaccaagtagcaatgctcaggtttttggattcgttgcgcacacacattctgtcaaaccattgattccgcagataattggtattccagaggactctctcatgcagtggccgttgtttacggaatgggctcgaaagaatgagatagatttgaccacgggtgaaacttttaaagaaatcttagacattggaaaacgactggtttcgggagatgtgatgacgtttgttttccgtcagtttcgtggccgaacggaagtcggttaccatgggaagacagagaatccaagagatcgtccgtcgtttttccctttgttaagtgcctgtgcagttgacagcgtcaaggacctgctctataagcattttgagaaatgggtgtattttgcgccaaaaccagtagttgagtgggtcattgagcaggagattgatttatcgacagttgagttcgatgtaaggaacatgctcaaaatgttgtctaacaatccaattaaatgggaaaggctgttagactcagttcgagatgtagccgaaagtcgacttaacgcaggtggacaggaggtgggcgagtggagagcatggattattggtttattgatggttttcggtcagtcactgaaggttggaggattgatggcagtttttctggaagtagaagcgcttggagctagactgctacttgaattgttggcgcgcgttaagactgatccaggtgctgttcctcatcttcagtctgtgaatagagagttaaaggtagggtggagagtggcgccaatgaaacgagaggggcggaattatgcaatccgtttgaacgcgcgtcctccacaaatgggcgggaattttacgattgggagcggagcctttaaggcatag

SEQ ID NO: 13427 - DNA, 78 bp, unidentified; identical to SEQ ID NO: 5340
  misc_feature 1..78: note = Synthetic
  source 1..78: mol_type = other DNA

SEQ ID NO: 13428 - DNA, 279 bp, unidentified; identical to SEQ ID NO: 10705
  source 1..279: mol_type = other DNA
  misc_feature 1..279: note = Synthetic

SEQ ID NO: 13429 - DNA, 1929 bp, unidentified
  source 1..1929: mol_type = other DNA
  misc_feature 1..1929: note = Synthetic
ttgagagacagagatcctaatgataccaggaaccaattcaagaataatgctttacacgcataccttttcaatgagcattgtaataatgttgaggtcgtcaaactactactagacagtggcactaatccattacacaaaaattggagacagtttaccccaatagaagaatacacaaatagtagacatgttaaagtcaataaggatatagcgatggctctactagaagctactggatatagcaacataaatgactttaatatattcagctatattaaatcaaaaaatgtagacgttgacttgataaaggtgttggtagaacatggatttgacttgagtgttaaatgtgaaaaccatcgttcagttatagaaaattatgtaatgacagatgatcctgttcctgaaattattgatttgttcatagaaaatggctgcagtgttctttatgaggatgacgagtacggatacgcgtatgatgattatcaaccacgaaattgcggtaccgtattgcatctgtatatcatctctcatctgtattcagagtcggatacgagagcatatgtgcgtccggaagttgttaaatgtctaattaatcacggaatcaagccgtcttctatagataaaaactattgtacagctcttcaatattatattaagtcatctcatatagatatagacatcgttaaattgttaatgaaaggaatagataacacggcttatttatatatagacgatctaacatgttgcactcgaggaattatggctgattatctaaatagtgattatagatacaataaagatgtagatttagatttggtaaaattgtttttggagaatggaaagccgcacggaataatgcgtagtattgtaccactatggagaaatgataaggaaaccatctctttgatattgaaaacaatgaactcggatgtcctccaacatatactaattgagtatatgacattcggcgatatcgatatccctctagtggaatgcatgttggaatatggagctgtggtaaataaagaggctatacacagatactttagaaatattaatattgattcttacacgatgaaatatctactaaaaaaggaagggggagatgccgtcaatcatctcgatgatggagagatcccgattggacacctatgtgaatccaactatggatgttataatttctacacttatacatacaaaaagggtctttgtgacatgtcttatacttgcccaattcttagtactataaacatttgcctaccttatcttaaagacattaacatgattgacaaacgaggagaaacacttcttcacaaggctgttagatataataaacaatctctagtatctttactgctagaatccggttcagatgtcaacattagatcaaataacggatatacatgtatagccattgccatcaacgaatctagaaacattgaactgctgaaaatgctattatgtcataaacctacattagattgtgtgattgattcattgagtgaagtatctaatatcgtagataatgcctatgctataaaacaatgtattaaatataccatgattatagatgactgtacatcgtctaagattccagagtccataagtcaacgctataatgattatatagatctctgcaatcaagaattgaatgagatgaaaaaaataatggtaggaggcaacactatgttctcattaatatttactgagcatggagctaaaattattcatcgatatgccaataatccagaaatacgtgcgtattatgagtcaaaacaaaataaaatatacgtggaagcatatgatattatttccgatgcaatagtgaagcataataaaattcataaaaccatcatagaatcagttgatgataatacctacatttctaatcttccgtataccatcaaatacaaaatattcgagcaacaataa

SEQ ID NO: 13430 - DNA, 2028 bp, unidentified
  source 1..2028: mol_type = other DNA
  misc_feature 1..2028: note = Synthetic
attcacttctattcagtcaaaatgtttgattatctggaaaatgaggaggtggctctcgatgaacttaaacagatgttgagagatagagatcctaatgataccaggaaccaattcaagaataatgctctacatgcataccttttcaatgagcactgtaataatgttgaggttgtcaaactactactagacagtggtactaatccattacacaaaaattggagacagcttactccattaggggaatacacaaatagtagacatggtaaagttaataaggatatagcgatggttctactagaagctactggatatagcaacataaatgactttaatatattcacctatatgaaatccaaaaatgtagatattgacttgataaaggtattggtagaacatggatttgattttagtgttaaatgcgaaaaacatcattcagttatagaaaattatgtaatgacagatgatcctgttcctgaaattattgatttattcatagaaaatggatgcagtgttatttatgaggacgaggatgatgagtacggatacgcgtatgaagaatatcactcacaaaatgacgattatcaaccacgaaattgcggtacagtattacatctgtatatcatctctcatctgtattcagagtcggattcgagatcatgtgtgaacccggaagttgttaaatgtctgattaatcatggaatcaacccatcttctatagataaaaactattgtacagctcttcaatattatattaagtcatctcatatagatatagacatcgttaaattgttaatgaaaggaatagataacacggcttattcatatatagacgatctaacatgttgtactcgaggaattatggctgattatctaaatagtgattatagatacaataaagatgtagatttagatttggtcaaattgtttttggagaatggaaaaccgcacggaataatgtgtagtattgtaccactatggagaaatgataaggaaaccatctctttgatattgaaaacaatgaactcggatgtcctccaacatatactaattgagtatataacattcagcgatatcgatatctctctagtggaatacatgttggaatatggagctgtggtaaataaagaggctattcacggatactttaaaaatattaatattgattcttacacgatgaaatatctactaaaaaaggaagggggagatgccgtcaatcatctcgatgatggagagatcccgattggacacctatgtaaatccaactatggacgttataatttctacactgatacatacagacagggttttcgtgatatgtcttatgcttgcccaattcttagtactataaacatttgcctaccttatcttaaagacattaacatgattgacaaacgaggagaaacacttcttcacaaggctgttagatataataaacaatctctagtgtctttactgctagaatccggttcagatgtcaacattagatcaaataacggatatacatgtatagccattgcaatcaacgaatctagaaacattgaactgctgaacatgctattatgtcataaacctacattagattgtgtgattgattcattgagagaaatatctaacatagtagataatgcctatgctataaaacaatgtattagatatgccatgattatagatgactgtatatcgtctaagattccagagtccataagtaaacactataatgattatatagatatttgcaatcaagaattgaacgagatgaaaaaaataatagtgggaggcaacactatgttctcattaatatttactgatcatggagctaaaattattcatcggtatgccaataatccagaattacgtgcgtattatgagtcaaaacaaaataaaatatacgtggaagtatatgatattatttccaatgcgatagtgaagcataataaaattcataaaaacatagaatcagttgatgacaatacctacatttctaatttgccttataccatcaaatacaaaatattcgagcaacaataa

SEQ ID NO: 13431 - DNA, 90 bp, unidentified
  misc_feature 1..90: note = Synthetic
  source 1..90: mol_type = other DNA
ttgcctctgtttctccaggcgctccaggtactgctgcacgtcggacgccagctgctggccaaacatcgcgggcgaggcgggggcggctga

SEQ ID NO: 13432 - DNA, 831 bp, unidentified
  source 1..831: mol_type = other DNA
  misc_feature 1..831: note = Synthetic
atggcggggatggggaagccctacggcggccgcccgggggacgcgttcgagggtctcgttcagcgcatcaggctcattgttcccgccacgctgcgcggcgggggtggggagtcgggcccctactcgccatccaacccgccctcgagatgtgccttccagttccacggccaggatgggtccgacgaggccttcccgatcgagtacgtcctgcggctcatgaacgactgggccgatgtgccctgcaacccctacctgcgcgtgcagaacaccggcgtttcggtgctgtttcaggggttttttaaccggccccacggcgccccggggggcgcgatcacggcggagcagaccaacgtgattctgcactccaccgagacgacgggactgtccctcggagacctggacgacgtcaaggggcgcctcggcctggacgcccggccgatgatggccagcatgtggatcagctgctttgtgcgcatgccccgggtgcagctcgcgtttcggttcatgggccccgaggacgccgttcgcacgcggcggatcctgtgtcgcgccgccgagcaggccctcgcccgtcgccgccggtccaggcggtcccaggatgactacggggcggtggtggtggcggcggcgcaccactcttccggagcgcccgggccgggggtcgccgcctcgggcccgccagcgccgcccggacggggaccggcccgtccgtggcatcaggccgtgcagttgttccgggccccgcgtccgggccccccggcgcttctgttgctggcggcggggctgtttctgggggccgctatctggtgggcggttggcgcgcgcctatga

SEQ ID NO: 13433 - DNA, 102 bp, unidentified; identical to SEQ ID NO: 5363
  misc_feature 1..102: note = Synthetic
  source 1..102: mol_type = other DNA

SEQ ID NO: 13434 - DNA, 1263 bp, unidentified
  misc_feature 1..1263: note = Synthetic
  source 1..1263: mol_type = other DNA
atggccgacatttccccaggcgcttttgcgccttgtgtaaaagcgcggcgtcccgctctccgatccccgcccctgggcacgcgcaagcgcaagcgcccttcccgccccctctcatcggagtctgaggtagaatccgatacagccttggagtctgaggtcgaatccgagacagcatcggattcgaccgagtctggggaccaggatgaagccccccgcatcggtggccgtagggccccccggaggcttggggggcggttttttctggacatgtcggcggaatccaccacggggacggaaacggatgcgtcggtgtcggacgaccccgacgacacgtccgactggtcttatgacgacattcccccacgacccaagcgggcccgggtaaacctgcggctcacgagctctcccgatcggcgggatggggttatttttcctaagatggggcgggtccggtctacccgggaaacgcagccccgggcccccaccccgtcggccccaagcccaaatgcaatgctacggcgctcggtgcgccaggcccagaggcggagcagcgcacgatggacccccgacctgggctacatgcgccagtgtatcaatcagctgtttcgggtcctgcgggtcgcccgggacccccacggcagtgccaaccgcctgcgccacctgatacgcgactgttacctgatgggatactgccgagcccgtctggccccgcgcacgtggtgccgtttgctgcaggtgtccggcggaacctggggcatgcacctgcgcaacaccatacgggaggtggaggctcgattcgacgccaccgcggaacccgtgtgcaagcttccttgtttggagaccagacggtacggcccggagtgtgatcttagtaatctcgagattcatctcagcgcgacaagcgatgatgaaatctccgatgccaccgatctggaggccgccggttcggaccacacgctcgcgtcccagtccgacacggaggatgccccctcccccgttacgctggaaaccccagaaccccgcgggtccctcgctgtgcgtctggaggatgagtttggggagtttgactggaccccccaggagggctcccagccctggctgtctgcggtcgtggccgataccagctccgtggaacgcccgggcccatccgattctggggcgggtcgcgccgcagaagaccgcaagtgtctggacggctgccggaaaatgcgcttctccaccgcctgcccctatccgtgcagcgacacgtttctccggccgtga

SEQ ID NO: 13435 - DNA, 306 bp, unidentified
  misc_feature 1..306: note = Synthetic
  source 1..306: mol_type = other DNA
atggagcaaccacccgaggacgaggcccctcaaagagaaccatacaatgaatggctaattgacaccttagcagaagttcaagaagaagctttaaagcattttgatagacgcttattgcatgcagtaggaagctggatctacaaaacctatggggatacattagaaggggtgcgacagcttatctcaattcttcaaaaagctctgtctatgcactatagatatggatgcagggaaagccgtatcggacaagaaggagggggatgttaccccttacgatcctttccgagatcggacaaccccctgtga

SEQ ID NO: 13436 - DNA, 21 bp, unidentified
  misc_feature 1..21: note = Synthetic
  source 1..21: mol_type = other DNA
acgggggcggacattatttaa

SEQ ID NO: 13437 - DNA, 21 bp, unidentified
  source 1..21: mol_type = other DNA
  misc_feature 1..21: note = Synthetic
acgggggcggacattatttaa

SEQ ID NO: 13438 - DNA, 657 bp, unidentified
  source 1..657: mol_type = other DNA
  misc_feature 1..657: note = Synthetic
atggccttctatctcccagactggtcgtgctgcgggctctggctctttggccggcccaggaatagatacagccagctccctgaggagccggagacctttgagtgcccggaccgctggcgagccgagatagatctgggcctgccccctggtgtgcaggtgggagatttgctaagaaatgagcagacgatgggctcactgagacaggtttatttgctcgctgttcaagccaatagcatcacggatcacctgaagcgctttgacgccgtccgcgtccctgagagctgtcgtggggtggtggaggcccaggtggccaagcttgaggccgtgcgctcagtcatctggaataccatgatctctctggctgtaagcggcatcgagatggacgagaatgggctcaaggccctgctggacaaacaggctggcgacagcctggccctgatggagatggagaaggtggccacggcgctcaagatggacgagaccggtgcctgggcgcaagagatctcggccgttgtctcatcggtgaccgccccctcagcctcggcccctttcatcaactccgcctttgagcccgaggtgcccacccccgtccttgcaccgcctcccgtggtgcggcagccggagcactctgggcccacggagctcgcgttaacgtag

SEQ ID NO: 13439 - DNA, 657 bp, unidentified
  source 1..657: mol_type = other DNA
  misc_feature 1..657: note = Synthetic
atggccttctatctcccagactggtcgtgctgcgggctctggctctttggccggcccaggaatagatacagccagctccctgaggagccggagacctttgagtgcccggaccgctggcgagccgagatagatctgggcctgccccctggtgtgcaggtgggagatttgctaagaaatgagcagacgatgggctcactgagacaggtttatttgctcgccgttcaagccaatagcatcacggatcacctgaagcgctttgacgccgtccgcgtccctgagagctgtcgtggggtggtggaggcccaggtggccaagcttgaggccgtgcgctcagtcatctggaataccatgatctctctggctgtaagcggcatcgagatggacgagaatgggctcaaggccctgctggacaaacaggctggcgacagcctggccctgatggagatggagaaggtggccacggcgctcaagatggacgagaccggtgcctgggcgcaagagatctcggccgttgtctcatcggtgaccgccccctcagcctcggcccctttcatcaactccgcctttgagcccgaggtgcccacccccgtccttgcaccgcctcccgtggtgcggcagccggagcactctgggcccacggagctcgcgttaacgtag

SEQ ID NO: 13440 - DNA, 15 bp, unidentified
  misc_feature 1..15: note = Synthetic
  source 1..15: mol_type = other DNA
gtggacattatttaa

SEQ ID NO: 13441 - DNA, 657 bp, unidentified; identical to SEQ ID NO: 13439
  source 1..657: mol_type = other DNA
  misc_feature 1..657: note = Synthetic

SEQ ID NO: 13442 - DNA, 453 bp, unidentified
  misc_feature 1..453: note = Synthetic
  source 1..453: mol_type = other DNA
atgactacgtccggcgttccatttggcatgacactacgaccaacacgatctcggttgtctcggcgcactccgtacagtagggatcgcctacctccttttgagacagagacccgcgctaccatactggaggatcatccgctgctgcccgaatgtaacactttgacaatgcacaacgcgtggacttccccttcgccgcccgttgagcaaccgcaagttggacagcagcctgtggctcagcagctggacagcgacatgaacttaagcgagctgcccggggagtttattaatatcactgatgagcgtttggctcgacaggaaaccgtgtggaatataacacctaagaatatgtctgttacccatgatatgatgctttttaaggccagccggggagaaaggactgtgtactctgtgtgttgggagggaggtggcaggttgaatactagggttctgtga

SEQ ID NO: 13443 - DNA, 885 bp, unidentified
  misc_feature 1..885: note = Synthetic
  source 1..885: mol_type = other DNA
atgactacgtccggcgttccatttggcatgacactacgaccaacacgatctcggttgtctcggcgcactccgtacagtagggatcgcctacctccttttgagacagagacccgcgctaccatactggaggatcatccgctgctgcccgaatgtaacactttgacaatgcacaacgtgagttacgtgcgaggtcttccctgcagtgtgggatttacgctgattcaggaatgggttgttccctgggatatggttctgacgcgggaggagcttgtaatcctgaggaagtgtatgcacgtgtgcctgtgttgtgccaacattgatatcatgacgagcatgatgatccatggttacgagtcctgggctctccactgtcattgttccagtcccggttccctgcagtgcatagccggcgggcaggttttggccagctggtttaggatggtggtggatggcgccatgtttaatcagaggtttatatggtaccgggaggtggtgaattacaacatgccaaaagaggtaatgtttatgtccagcgtgtttatgaggggtcgccacttaatctacctgcgcttgtggtatgatggccacgtgggttctgtggtccccgccatgagctttggatacagcgccttgcactgtgggattttgaacaatattgtggtgctgtgctgcagttactgtgctgatttaagtgagatcagggtgcgctgctgtgcccggaggacaaggcgtctcatgctgcgggcggtgcgaatcatcgctgaggagaccactgccatgttgtattcctgcaggacggagcggcggcggcagcagtttattcgcgcgctgctgcagcaccaccgccctatcctgatgcacgattatgactctacccccatgtag

SEQ ID NO: 13444 - DNA, 36 bp, unidentified; identical to SEQ ID NO: 5376
  misc_feature 1..36: note = Synthetic
  source 1..36: mol_type = other DNA

SEQ ID NO: 13445 - DNA, 873 bp, unidentified
  misc_feature 1..873: note = Synthetic
  source 1..873: mol_type = other DNA
atccggatgatggagcattcaagagaacggggtagatctagcaacatgcgacataatagccgggaaccatacgaaaatccatcaaggtctcgctcattatctcgggaccctaatcaggttgatcgtagacagcctcgaagtgcatcccaaattcgtgttccgaatctgttccatcggaaaaagactgatgcactcatagttcctccggctcctaaagatatatgcccaacactcaaaaaaggattcctctgcgatagcaaattttgcaaaaaagatcaccaattggatagcttaaatgatcatgaattactactgctaattgcaagaagaacatgtggaattatcgagagcaattcgcagattacatccccaaaagatatgcggttagcgaatccaacagctgaagacttctcacaaggtaatagtcctaaattaacacttgcagtccttcttcaaattgctgaacattgggcaaccagagacctaaggcaaattgaggactctaaacttagagctcttttaaccctttgtgccgtattaacaaggaaattttctaaatcccaactgggtcttctatgtgagacccacctacggcatgagggcctcggacaggaccaagctgattctgtattagaggtctaccaaagactccacagtgataaaggagggaattttgaggctgccctgtggcaacaatgggaccgacagtcattaataatgttcatctctgcttttctcaacattgctctccagataccttgtgaaagttctagtgtcgtagtctcaggtcttgccacattgtacccagcacaagacaattctacaccatccgaggcaactaatgataccacctggtcaagtacagttgaatag

SEQ ID NO: 13446 - DNA, 1059 bp, unidentified
  misc_feature 1..1059: note = Synthetic
  source 1..1059: mol_type = other DNA
atttgggacctaccaacggaacgtctggacggaccccggttctgccgccggacgatgaagcgggcctgcagccgaagcccctcaccacgccgccgcccatcatcgccacgtcggaccccaccccgcgacgggacgccgccacaaaaagcagacgccgacgaccccactcccggcgcctctaacgatgcctcgacggaaacccgtccgggttcggggggcgaaccggccgcctgtcgctcgtcagggccggcgggcgctcctcgccgccctagaggctgtcccgctggtgtgacgttttcctcgtccgcgccccccgaccctcccatggatttaacaaacgggggggtgtcgcctgcggcgacctcggcgcctctggactggaccacgtttcggcgtgtgtttctgatcgacgacgcgtggcggcccctgatggagcctgagctggcgaaccccttaaccgcccacctcctggccgaatataatcgtcggtgccagaccgaagaggtgctgccgccgcgggaggatgtgttttcgtggactcgttattgcacccccgacgaggtgcgcgtggttatcatcggccaggacccatatcaccaccccggccaggcgcacggacttgcgtttagcgtgcgcgcgaacgtgccgcctcccccgagtcttcggaatgtcttggcggccgtcaagaactgttatcccgaggcacggatgagcggccacggttgcctggaaaagtgggcgcgggacggcgtcctgttactaaacacgaccctgaccgtcaagcgcggggcggcggcgtcccactctagaatcggttgggaccgcttcgtgggcggagttatccgccggttggccgcgcgccgccccggcctggtgtttatgctctggggcacacacgcccagaatgccatcaggccggaccctcgggtccattgcgtcctcaagttttcgcacccgtcgcccctctccaaggttccgttcggaacctgccagcatttcctcgtggcgaaccgatacctcgagacccggtcgatttcacccatcgactggtcggtttga

SEQ ID NO: 13447 - DNA, 24 bp, unidentified
  misc_feature 1..24: note = Synthetic
  source 1..24: mol_type = other DNA
atagatatacgacagaccccgtaa

SEQ ID NO: 13448 - DNA, 1917 bp, unidentified
  misc_feature 1..1917: note = Synthetic
  source 1..1917: mol_type = other DNA
atgaccagcgcgcacgctgcctacatcgactacgcgctgcggcgcaccgcgcacatgccctccgagatgcagggcgtggaggagtccgtgcgcctcaaggactaccagctcttcgtggcgcgcgtgttcctgggcctggacagcatgcactcgctgctgctcttccacgagacgggcgtgggcaagaccgtgaccgcggtgtacgtgctcaagcacctgcgcgacgtcttcacggactggacggtggtcgtgctcgtgaagaaggcgctcgtggagcagccctggacctcgacgatgatgcgcttcgcgcccgaggccgtgcccgggtgcaccttcatcaactacgacgacccgcgcttccaccaccgcttcttcacgctgatgaagaccgcctcgtcgagcagccgcgtctgcgtggtcatcgacgagttccacaacttcatctcgatgtcgctgaccaaggaggacgggcgccagcggcccgcgcgcacggtgtacaactacctcgcgaagaacatccccatgggccgcgggaagctgctctgtctcacggccacgccggtggtgaacagcgtcaaggagttctccatggccgtgaacctgctgcgccccggcgtggtcgggcagacgccgctcttcaacggcggcgcgctcgcgaaccccgaggacctcgtggacaagctcggcggcctgtgctcgtacttggtcaccaacgaggcctccatcttcgacgacgtcgacggctccgcggccttcgcgcgcaagcgcgtgcgcatgatgtacgtggacatgaccgcgaagcagaccgaggcctaccgccgcgcggccgccatggagcgcaagtccggcgccgcggtcttccgcgtgtaccggcgcatcgcggccaccttcgccttcgaggacgcgcccgacaagtccgtgctctccaagcaggagtacgacgaggccgtggccgcgctcttcctggacttcgcgcgcgccgtcaaggaccgcgtcttctcggaggcggccatgcggctcttccgcagcggcgcgcccgtcagcggcgaccgcatgacctccgcggacgtctcgctgctcgcggagctgcgcgagcgcagctgcaagtacaccgaggtctgcctgcgcatcctggcctcgccgggcaagtgtctggtcttcgagcccttcgtcaacgtgaccggcatcgagatgctgctgctctacttccgcgccttcggcgtctccagcgtggagttctcctcgcgcacgcgcgacacgcgcgccaagctcgtggacgccttcaacgcctgcgacaacaccgacggcgagaagatcaaggtctgcgtgttctcgctgagcggctctgagggcctcagcttcctctccatcaacgacatcttcatcttggacatgacctggaacgaggcctcgctgcgccagatcgtgggccgcgcggtgcgcctgaacagccacgagatgacgccgcccgaccgccgctacgtgaacgtgcacttcgtggtcgcgcgccaggactccggcgccgccaccgtggacgaggacctgctggccctcatccgcgacaagtcccggcagttcacgcagctcttccgcgtgctcaagcgctgctcgctggagtgggtgcgcgaggccttcacggacttcgcgccgctggaggacgactccggctggtccgcgctggtggcgcgcccggcggacgcgcgcgggcccgcgcgcgcggcgcggctcgcggacgggcagagcgtgtggtactccacctccacggcgctggtcacggtgcgcaagggcttcctcgagcgcggcgggcgcctcttcgacgacgacgggaacttcctgaccgcgctgggcgacccgcccaccgtgcgcgtgagcggcgggcgcctcgtgtacgtggtggaccctgcctctatcgcgtga

SEQ ID NO: 13449 - DNA, 3084 bp, unidentified
  misc_feature 1..3084: note = Synthetic
  source 1..3084: mol_type = other DNA
atgggaaatcgagtttccacgtatagtcctcaatacatcacaatcaaaggaaataacaatgcacttgacacgaagactatggagcgatttgatcagaccaactctgttgatgcagctgttaaacttccagatggaataaaccctacaatagcggagttcaattctatttatgacatgagaagctttatcgggttgcgggatgatttattaaatgaaaatgatgacatttttgatggcatgtttgaccaaatggttggatcagagggcaaaattaaaggtgtagtttcaggtacattagatggatatgaaaagataagaaaggctgctaactggttgggtggaacttatagtcgtccgtggaaagttgaaactcgtgaaatgtcggaaatacagcaacgtattgacaacgcgattccggcgatgacttcgattattgggggtacattcggccctgctggtgctcgatcaggcggtgatcacatgctggtaaggccagagcaatgggtgagcgttagagaagatactttttttggccatgatgatgggttcacagagcgtcatgttgccattgggtcagatgtgttcgagacagttaaactgggatcgtttatggcggggtttcgtgatgcgactaatgcgagtgggtggaatcagggagtgtcatatttgatgagccatgatgtgtttcggatcgggtatgccagtatcgttcctgattctgatcgacctccacaagtattatggcaatctgcgcttaggtcgggggcaatagcagatggtgatgtgttaacagcagatgccctaaggattcttggacaggctacgaggagcacattttcgtggatggttgacattaatggaaccgagtacatttctgaggcaactgtggaggcaccactgacaccaataaaggatcgagggatcggcgattttgagttgcttcaacgtctgtttgtgatgtggctgcggggtgacgttacgtcacaaacatttttggatgtcgtagccaatttggagtcttttatatcaggggtgacatttcttaatcgtgtgcgcttgtctttacaggtgtttgtggctaagttgagtgaggataccgccgatcggcatggttattggtgtgacatcctgaataaacttttggaagtgcactcttgtccccttctgtatacagcttttctcattagtgatgggtggtctacggtccctaaactagattgcaatccaatcgaggctacagtcatagatcgattggctttctcgggaaggtatctctgggcatcgtggcggaattcagctgtatacactgactatgtaggaggagctttcatgggggataacagcgaagaagacgtcctcgggctgttaaagcgtggtgcagcaaaaatgaaggggatggtggctgggcatttaaggccgatgcttggagaggcagcgggggcagccgagcgagttatggcaagatgggcgaagcaaaaagctggaactttgaagcaagcggtgactaatgcaatggcgggagtacttctggatactaagcgagaggcccaagcagaggctaacgtttatggtagtatggtggggggtcgtcatgtgttagcccttcctccaacagagcatctacaaaaattagcaccattgataccaccgggggcagcagatacagttatggatgacgttaaacgagttggacatcatgtaggtctcgagcttgtggagcgaggtgagcctgtgaaggagtctgttgttgaaaaccacgtggttcatgagatggttaatcgaacgaagacaggggttggccagattggagaggtgcgacgtgagctggctaagtgttcagaggttatgaaagatgtctcgattgagaagatggtggctagacctgatgaagtgcgtggaacgtcctttcccattcatactcgaggttatcacgtatctctagtagatggatgtgataagcatgctatgcaggatccgacgaacaagttagatgctaaagcgacattttcttgccaaggacttgtcacagggaaattaaaaaagggtcttaaagtgacactagcgaaggcgcatcatggtcgagatacatctcctcaaacagtctgtataatttctggaagcttcttttcttatgatcctgctgctgtgcatattggaggggagggggaggtagcaccggatcatgacatgaatattaatgtggttttaacggcggccattaagaagagctcgtctggtacgtcgtgtaaggtatatgtgggggcgtttgctaaatcgccggacaaaagtcatcataatacgaactgtggtttaggacttgttcctgcaattgatgacaaaggccagacgtatctgactgcatccggagtattcgtaggaagactctcttttaatatttcagcgctgctgaggggtggtttgacaggagttgcggattgtccatggaatgggaccttcgcctttggagtcgcctgtgacgatggtaattgtggttcaagcgagtgttcgcatgttgagttagtccagttaggagttgagttcggcgagtgtattatagtgcctagaggattagataggtatttcatttttaacagagttaggtattatgataagactatattcgattttattggtaaggtggatgcaactgtagctgtgtctgaggcccctctggatgtggtgagtgcatggtctgaattgattagtccgttgactgtgtatttgcctctgatggttaatgagttacgagctcaaaatactttagcacttgtgaaaacgaggtatcgaacgtggctaaagaagattggattaaagatgggggacaaaaacccttttaaaaccgacgacgcatgtgatgagtgggtgtctactgcaatattagcgatgcctatgtggatgcgttacacatctggtaatcctttggtttatctaacacaggaagaccgaaagtcagcagccattatgctcttatccaccgctaaagctatgttgcctttaagtgcttttcaactggtggatgggtcattaaacagggctgcggcgaagggactaaaatgggctgcggatcgtgagattatggggtag

SEQ ID NO: 13450 - DNA, 3531 bp, unidentified
  source 1..3531: mol_type = other DNA
  misc_feature 1..3531: note = Synthetic
aggaaaacgacccaagactttagagattgctttggactcaaacacgaaatactttccgcaatttacaatgataaaagcactttctctagcgaaaatggactcgttcaaattctggaagaagcagaggttaacgctttaggagaattaattcgcgacggtacagttgcaatatcatttggtcctgggatttactctcgcatgtttcctcatttacgtgatgattcagactatcgatctgcattaattgactgtgtggctcatgggtggaaaaagtcaagagacgcgagggacattagagaatggcagcgatctgcagctattatgtgcgcagagagatatatgtataaggtacggcaggcgtacaagagggtcgttgaaaatctcgacttgtcgtatacttggcactgtttgactgaggggccagctgaggatgttttcattctacccgcaatgtatgagtctgtgcgacatgagacaccttcagaggctcatggaatgcaatgtggtggcgtgataggtggtaatgtttctcttcttttaccacgtgacgagcagtatgctacgttgttccgtgtttggttgatgtcactagcgaagatgcgtctcgatgacctacgagaaccgcattggaatagtgtacgagttcagctgctccgtgactaccgcatcttgtattttggagatttattgcctgatgatggagatattacgtatttagttaataagcttgattatcatacaatttggtttcctgagggtgagtttgagacgatgcttcaagcgatgctaagagattcgtttcccgctgggtgtcatgcgcacctgaatatcccaattcctcactattttgtatttgatacggaggatgatttacgtcttagatgctggaaaggtgtgagggatacctggataaagttgcggttgggatatgaagatgggggggttaacgactctcgtatgagtgaggctctgatcgtaaatcgtgaattacctgcggagttaagtgagtcattattctgttgttgtttggctagaggagtgtcgcgagaacaagtccgtacattaaaggaagtgaagaatgtcgcccaggcacaaattcgacatgttgtgtcaggacaaggcgtgtggtggcggagcgtcgagcggaatcgtcaattggcttgttcgattcatcctggtaaaattgtattggtggttgattacgaggaaggtccgattagggttgcgatacgtgttcggttactgaatgttcattacgcgagagaacttgggatgaaagcgaatgatgtaattgtaaggattcccacctctgaccgtgctagatgggtccagacgagggaatatgaacgatctctacggttctatgagtttcggcccggcgctgttgagacagagtttcatcacctgttcgcttttttcttttattgggggtgcggaaaggttgagaaacgtcaacatttatatcagacgcgtgaggtgcgacgcgggcatttatatagccagtctcgtttcttacgtaaaatttccgaggaaggacgaaagatcaaaattcagggtaagtattatcctactcccacccgagcggtgcaacatgaaagttgtaatgctgttgatgctgttttatactctaaggaattcacgcgtgagttagttgctgcaggccgcgctaaagaggctggagctctcggtgtagtgtacacttgtttgcaaaccattggagcagacctggatcctccagttggatggttaagagatgtaagacttgatgtgcctgtgagtgggttgtgtcacttggttttacgaatccttacttctttttttgaacatcgtggggggcctccagatttattgtgcagcgttatggtggttttaatttcaatatttttgcattatctcagattgaggcaagcagttcgggagtaccgatatgatgagttaacgattatttggtatggagagactggtgctgatttacagcgaattttaagatcgtcagggttaacaagatttgtcgctgttcttggtgatccagctactccggagtatctggctcaagcgaaattgtgggcgaataagaaaagcaacattgtgatttttaattatgctaggccatacgagcggggggcgcaatttcttaatttgctgaatgaaacgatggcgttgcgacaagctgctgaggtgtttttgctcagaacggatgactcgttagtgcaagcgggtgacgctctgttaatgtcggtcgacgagggcgagttttgcgacctcgtgcattttggtgcgtcgtgcgatcctatggagcattatttggttgtcgttactcggccccctggtgacgatcctgaatatgaacctcttgaagatcgagatccatttgaggaatggttatatgagactcaaggcatggagagagtaatacctagtacgtgggagtctgaggtggttgatgcacgaggaatgttaatgtcgatacttacttatcattttcgtttggctgggtggtttgaacttgatgttccgggagatgatgttggtagagggctccaattaatgggtagcattaataaggtagtgcatgtgagttgtttcttacagaatggtagacgatattttcgtttgtcggctgacttagatgtagatagagttttacgtaatatgcgacatgacggtgaggttttaatggctgctgagttgtttgttgctgacgcggttttgatttgtgaggggttagtagttggtgagatgtaccgacttcagcggtcatacaggtctgttaatgcgatgatttatcatcagggtatgacgaatttcattatttttgagtggatgcggcgagtgctgttaactaaccgacatgatgaagtgctggtgtctgatattggtggacgtaatggcgagctttcggggtgggtcgtacaagatgcggcagttcgttatttttgcgttgatccggcgggtgatgagtcaatacctaaaggagagagggtgtcgattggaaacggtcgtgcggtttgggatgttacgcaaacagtagagcggaacgttgctagctatttacaacgcattggacggcagaacgctcctgatgattcaattgtactgattttatctaacagtattgtggcggcttacgaacgtcttgggcgtgataataatgctcatgtaactgcagtttatgcagagtttcaagcatgggctgggaaagtgtttattcgggatcggcttctgccaatcaggcagaatcccggtgagtcatggatgcgtttacagttccctaacaacgtgtatccttctgtcctatgtgaagattttaatgttgacccacgtgctggtatactgtctatgcgatatcctgacacaggtcgtggcgcaacggacgtggtgctggcaaacggaagattgggccatttgctcccgtcttggtttcaagcattatattgtggggcggctagaggtttcattttaaacggatttggcagattaatctggcctatctattgtcgacacgtcgtagttcttgcaacagcgccgtga

SEQ ID NO: 13451 - DNA, 96 bp, unidentified; identical to SEQ ID NO: 5388
  misc_feature 1..96: note = Synthetic
  source 1..96: mol_type = other DNA

SEQ ID NO: 13452 - DNA, 3861 bp, unidentified
  source 1..3861: mol_type = other DNA
  misc_feature 1..3861: note = Synthetic
ctgtccgctatagtcaagatcgcgaccgtagctatgtccacgcgtaccaaagagaaaaccaaagaaaagaaaaatgaagaacttacaagcataaacgaaccaactcaagctcaagataccaaagtttcatctagtttagacctcgtaagctcgcgtgatcgcccgaagcaagagaatgataagacggaagatcagcaagagggtacagataaacccgggagtaagaggtcgatagacgctttagctgcgataattgaaaagaaagttcagatgtcaggtactgctggtttgggtgacttctttggccgaatgcgtcctgaaataacagatgcgtttttttctgcgttagaaaaggaagctgatgtatccaaggttgttccaagttcattgtcaaagttggacgatggtcaagtggttgatttgttggctgttggcgaggaaaaggcgctcagtcagtctctttttcaattagaaatcgttgcatctataccccatttttatcaactaacggcgaagcagattggcgcgttgggggcacaaggaggttatttgaaagcttttcatggtgagcaggtatacccttttattgatccagtcgctaatgagtttgggagaggatttgatctcgcttatgttcgtgttaacacttcgggtcaaggtattgagctgtttatagatccatttgactttgacaaagtctcttgtaaggtaggagggcagtccttaacgggaattgggttgtcaaatgttgtgggtatggatgaaataacctatgatgatgttaaaacacctgaacagatgatggagtttgtggttcttctaattgccggtgctgctaaaatgggacgctttgttttggtcgcatcaacgcccgaagggggaggtctactgttcaaaaaatgggtgcgtcgccctgtggcggagaattttcgtaatatcaatggatggctccttgaagatgactacgagaactacccgcatgttcctgaaacattgacggtatttagcgagtatcaatggttcgctcgagaggtggctgacaacatgacggataacgggctcggtacttcggttgagatggatgagggtcctaatatcgaggcgttttttaatcgaaagtatcgtgaggccgccatttgtaatttagatttcattacgtctgaggctcatgctaatgtcatggaagagttgcaaaacgagaagatgaacgtgagtgcgtatgtggagttactacaatcatgccagatggggatttatgacattgaaggcgacacagagattattaagttgaaggtgtatatgcgcgaggttgaagactatgaggctgagttaacgaggatgatgttatttccaggtgatcaactttatgtggattgtctgcgtacggcggcgttagtgtccccaaatatccgtcaattcattctgagtattcttgttcagcaggcgacctcgcgagttggcttgatagaattgttgcccatcgcagaaatgactgcctcattgaatgcgcgagataacatttctgtatctcataatatggcattaactttggcaattggggagtggaaggagttgttacgactaacgaatccacagcaggtctgtcagaagattgtgtgcgatattatggctccatttgttgacggactgaaggttgaagattcactcggagtcccgacgcctagcaagctagtgtttgcactactaggagcgaaggttgctcttattcttactcctaatttgtatgactataatcttcacctcaaggcgcagcttgtgaccatgatctcatcatgcttctttcccgatcagtacggcgcactcattgctgctcgtggatatggccgcgacgttgtggggaatcgtattgacagtgtaagggacggtgaaaggacaaaaaagaattgtcgcttcgctacttacactgttttggagccaatccctaatgggccaccagatcgttctcgtaggaagtggcttttaatgaagagggtgcaagaatggctgctccggaacgaccttgttagacgtcgtgagattcgagacatcatgtaccgtccatatgcgaacgtgcttcgactgcctggtcaaacatatttgccgagaagacaggcagcgggagctcctctaccatgcgaggttttgcttaatgatgcgattgccattctggatgagtacagagttgtctttcatcatccgaatgaccgcaatcagggtcctcaagatcgtcatgctcttaccaccttatcgaacttgttaagatggtatactcgtgggtttgctgagtggtttcactgggtctattgtccactgtatctccaaatagctttgcatcctgtaattttttggtctcataggctagggcagggagtgtggcgtcaatttccagctgtacgtgaggatcgtgagcggagattcgataatcatctcgagggcgtacctttcgattctccggtgatcgctgcgtttgaaccggatgcggcaatgaacccttttaccttacgacagggtgctgatttgtttggccgagtacatgcacaaggatcaacatttaagggtggggcatatgacagtaatgctgtaattttgttatctgaatacgaagctctgtaccggatgactgactcagagggaatggtggatgagtacatcaagactttaatgtcttctcgccagctcttagagggtttacgtctagtggctgagttgtcgactggagaactgttacgtgacactcctatccttgattatattagaactgcattttgcgagggtcgttttccgtctcatattttcttcaaggtgttgagtctcttcggagtgaaaattaatcatggagttctggctcaggttggtgaacgttcgattgagcatcgacttcggggagactatcgagtttattatcctcgtcctggttttttagacccagcgctggagtttattcctgatagaattgtagtcaatgatccggttagaccatcggtgcgcaggaatgtgaaacttgtcatggatgctgtgtttgatccagattttggaatgattaagatgcgcaagggggtgactttctctttgagaccaactaacgatttaacgttctcctcatttcacgagatccccccgattcaggttgagatgacagggaacgtcaactatgtgtatgattctgagacggctaggacgagagcagagtatgatgtgcaagttcgatgggaggtagctggccgcgtagtgattatgaatctgctcgttaccagcagttatgaaattattgctaacatggaggacattctgggtagggaggtacgagctttctcatttgttgtccatgatgtatccaagtttagcgggatttattatgagtttatgttatcggcagtgagaaaggaacacgcgattgtgtggtttccgaatctgcgagggattctacaccatcacgcgatatctattgaaaaggtagagtcttgttttcatgctgcggagatcgcccaattttcatcctttctcagtctccggccaacagctctgattaagcttaatgttgtccagacaaccaatgttcgagggggaatgttgccaccatctgtgtcaaaaccgattctgccgtgtgagggggttcatccatcttttattttctgttcggacgttaatgtagcgactcatcgtattagagggacaccaattcaaataaaaaagttttttccgccgttggtgaaggatgcgagcggtcgaccccgaatcatggatgagaatggtgctgtgcaaaatggcttagagcagcatccttatggcttgagatctcttgttttcgtatatcattttgatccaacgtttcggccaaaggtgtgctctgtactgcgctga

SEQ ID NO: 13453 - DNA, 48 bp, unidentified; identical to SEQ ID NO: 5391
  misc_feature 1..48: note = Synthetic
  source 1..48: mol_type = other DNA

SEQ ID NO: 13454 - DNA, 237 bp, unidentified
  misc_feature 1..237: note = Synthetic
  source 1..237: mol_type = other DNA
atggagtcgcgagacctgggcgtcgccgtgggcgcgaccatcctaatgctgctgatagtggtaacaaacggggccaccatcgcgcgccgcggcgcgccctcgctgggcatccgctcgcgcggggcgctgcgcgtgctcacagtgctggacttcgtgtcgctgctgaccacgatcccgtgcaccatcatcctgtacttcctctacatgcaggcgctgaactctcggcgacaaaactga

SEQ ID NO: 13455 - DNA, 195 bp, unidentified
  source 1..195: mol_type = other DNA
  misc_feature 1..195: note = Synthetic
atgctcgatgcgatgcactcgcttatgcggcacatgagcgcactgagaagcgtcctggactgtcacgggaacaatggctccgggagtgcacacgcaagtctactgagcagcgcgcgcgccgtgcgtgccatggccgagatcacgctgaccagcctggagaccatgccgtacgtgctcgcgagtgtccaaaactga

SEQ ID NO: 13456 - DNA, 681 bp, unidentified; identical to SEQ ID NO: 10976
  source 1..681: mol_type = other DNA
  misc_feature 1..681: note = Synthetic

SEQ ID NO: 13457 - DNA, 681 bp, unidentified; identical to SEQ ID NO: 10976
  misc_feature 1..681: note = Synthetic
  source 1..681: mol_type = other DNA

SEQ ID NO: 13458 - DNA, 681 bp, unidentified; identical to SEQ ID NO: 10976
  misc_feature 1..681: note = Synthetic
  source 1..681: mol_type = other DNA

SEQ ID NO: 13459 - DNA, 918 bp, unidentified
  source 1..918: mol_type = other DNA
  misc_feature 1..918: note = Synthetic
atggcactcgacaagagtatagtggttaacctcacctccagactcttcgccgacgaactggccgcccttcagtcaaaaatagggagcgtactgccgctcggagattgccaccgtttacaaaatatacaggcattgggcctggggtgcgtatgctcacgtgagacatctccggactacatccaaattatgcagtatctatccaagtgcacactcgctgtcctggaggaggttcgcccggacagcctgcgcctaacgcggatggatccctctgacaaccttcagataaaaaacgtatatgcccccttttttcagtgggacagcaacacccagctagcagtgctacccccactttttagccgaaaggattccaccattgtgctcgaatccaacggatttgacatcgtgttccccatggtcgtgcctcagcaactggggcacgctattctgcagcagctgttggtgtaccacatctactccaaaatatcggccggggccccgggtgatgtcaatatggcggaacttgatctatataccaccaatgtgtcatttatggggcgcacatatcgtctggacgtagacaacacggatccacgtactgccctgcgagtgcttgacgatctgtccatgtacctttgtatcctatcagccttggttcccagggggtgtctccgtctgctcacggcgctcgtgcggcacgacaggcatcctctgacagaggtgtttgagggggtggtgccagatgaggtgaccaggatagatctcgaccagttgagcgtcccagatgacatcaccaggatgcgcgtcatgttctcctatcttcagagtctcagttctatatttaatcttggccccagactgcacgtgtatgcctactcggcagagactttggcggcctcctgttggtattccccacgctaa

SEQ ID NO: 13460 - DNA, 918 bp, unidentified
  misc_feature 1..918: note = Synthetic
  source 1..918: mol_type = other DNA
atggcactcgacaagagtatagtggttaacttcacctccagactcttcgctgatgaactggccgcccttcagtcaaaaatagggagcgtactgccgctcggagattgccaccgtttacaaaatatacaggcattgggcctggggtgcgtatgctcacgtgagacatctccggactacatccaaattatgcagtatctatccaagtgcacactcgctgtcctggaggaggttcgcccggacagcctgcgcctaacgcggatggatccctctgacaaccttcagataaaaaacgtatatgcccccttttttcagtgggacagcaacacccagctagcagtgctacccccattttttagccgaaaggattccaccattgtgctcgaatccaacggatttgacctcgtgttccccatggtcgtgccgcagcaactggggcacgctattctgcagcagctgttggtgtaccacatctactccaaaatatcggccggggccccggatgatgtaaatatggcggaacttgatctatataccaccaatgtgtcatttatggggcgcacatatcgtctggacgtagacaacacggatccacgtactgccctgcgagtgcttgacgatctgtccatgtacctttgtatcctatcagccttggttcccagggggtgtctccgtctgctcacggcgctcgtgcggcacgacaggcatcctctgacagaggtgtttgagggggtggtgccagatgaggtgaccaggatagatctcgaccagttgagcgtcccagatgacatcaccaggatgcgcgtcatgttctcctatcttcagagtctcagttctatatttaatcttggccccagactgcacgtgtatgcctactcggcagagactttggcggcctcctgttggtattccccacgctaa

SEQ ID NO: 13461 - DNA, 30 bp, unidentified; identical to SEQ ID NO: 351
  misc_feature 1..30: note = Synthetic
  source 1..30: mol_type = other DNA

SEQ ID NO: 13462 - DNA, 30 bp, unidentified; identical to SEQ ID NO: 351
  misc_feature 1..30: note = Synthetic
  source 1..30: mol_type = other DNA

SEQ ID NO: 13463 - DNA, 204 bp, unidentified
  source 1..204: mol_type = other DNA
  misc_feature 1..204: note = Synthetic
atggccctgctcggtgaggctgccatgcatggtgaaaagtattacaggactgtggcttcccgtgtctccaaggaggccgcccaaagtgggatagaaatggtagtcccacgccaccgatctgttctgcgctgggtgcgctttggaacaatggatgctgagaccccgcaggaacgctcagcagtctttgtgaatgaggatgagtga

SEQ ID NO: 13464 - DNA, 204 bp, unidentified; identical to SEQ ID NO: 13463
  source 1..204: mol_type = other DNA
  misc_feature 1..204: note = Synthetic

SEQ ID NO: 13465 - DNA, 135 bp, unidentified; identical to SEQ ID NO: 5403
  misc_feature 1..135: note = Synthetic
  source 1..135: mol_type = other DNA

SEQ ID NO: 13466 - DNA, 774 bp, unidentified
  source 1..774: mol_type = other DNA
  misc_feature 1..774: note = Synthetic
atacgcatggcatcgcgggggctagacctctggctggatgagcacgtgtggaagaggaaacaggagattggtgtgaaaggagaaaatctgcttctccccgacttatggctagatttcctacaactcagccccatcttccagcgcaagcttgctgccgttattgcctgtgtccgacgcctgcggactcaggccaccgtctacccagaggaggacatgtgcatggcctgggcccgcttttgcgacccctctgatattaaggtggttattttgggccaggacccctatcacgggggtcaagcaaacggcctggcattcagcgtcgcatacggctttccagttccccccagcctgaggaacatctacgcggagctgcaccggagcctgccggagttttctcccccagatcacggctgtctagacgcgtgggcctcccagggggtgttgctactcaacaccatcctgaccgtgcaaaagggcaagcccggctcgcacgcagacattggctgggcgtggtttactgaccacgtaatttcattgctctctgagcggttaaaagcgtgcgtgtttatgctgtggggtgcgaaggcgggagacaaagcttcactaatcaactccaagaagcatctggttctgacctctcagcatccctctcccctggcccagaacagcacccgaaagagtgcccagcagaagttcctgggcaacaaccactttgtcctcgctaacaactttttgcgtgagaaggggctcggtgagatagattggaggctgtag

SEQ ID NO: 13467 - DNA, 15 bp, unidentified
  misc_feature 1..15: note = Synthetic
  source 1..15: mol_type = other DNA
atgaacaagaaatag

SEQ ID NO: 13468 - DNA, 639 bp, unidentified
  misc_feature 1..639: note = Synthetic
  source 1..639: mol_type = other DNA
atgaaaaaaacatgtaacatccctaaaaagatgaatttcctgaagaaaatagtgaagacttgcaaagatgaggagactcccaagtatggggcagcatcagctcctcctgatgatgatgacctttggatgcctccgccggagtatgtccctttgactcaggttaaaggcaaagcaagtgttcgaaatttctgtatcaatggagagattaagacatgtagtcctaatggatactcctttagaattcttcgacacatcttgaagtcgtttgataacgtctattcaggaaaccgaagaatgatcgggctggtcaaaatagtaattggcttagtgttatctgggtcccccatccctgaaggtatgaactgggtttacaaacttcgcagaaccctgatctttcagtgggctgaatctcatgggcctctagaaggagaagagctagagtattctcaagaaataacatgggatgacgaggcagagttcgtcggcttgcagataagagtgagtgcaagacaatgccacatccagggaaggttgtggtgcatcaacatgaactctcgagcctgccagctctgggcagatatggccctaaagacacaacaatctcaagaggacgagaacacttccctccttttggagtaa

SEQ ID NO: 13469 - DNA, 42 bp, unidentified; identical to SEQ ID NO: 5420
  source 1..42: mol_type = other DNA
  misc_feature 1..42: note = Synthetic

SEQ ID NO: 13470 - DNA, 84 bp, unidentified; identical to SEQ ID NO: 5421
  source 1..84: mol_type = other DNA
  misc_feature 1..84: note = Synthetic

SEQ ID NO: 13471 - DNA, 477 bp, unidentified
  misc_feature 1..477: note = Synthetic
  source 1..477: mol_type = other DNA
acggacgatattatcgactatgaatccgatgatctcaccgaatacgaggatgatgaagaagatggagagtcactagaaactagtgatatagatcccaaatcttcttataagattgtagaatcaacatccactcatatagaagatgcgcattccaatcttaaacatatagggaatcatatatctgctcttaaacgacgctatactagacgtataagtctatttgaaatagcgggtataatagcagaaagctataacttacttcaacgaggaaggttacctctagtttcagaattttctgacgaaacgatgaagcaaaatatgctacatgtaattatacaagagatagaggagggttcttgtcctatagtcatcgaaaagaacggagaattgttgtcggtaaacgattttgataaagatggtctaaaattccatctagactatattatcaaaatttggaaacttcaaaaacgatattag

SEQ ID NO: 13472 - DNA, 57 bp, unidentified; identical to SEQ ID NO: 5423
  source 1..57: mol_type = other DNA
  misc_feature 1..57: note = Synthetic

SEQ ID NO: 13473 - DNA, 1881 bp, unidentified
  misc_feature 1..1881: note = Synthetic
  source 1..1881: mol_type = other DNA
atggagtccacggtaggcccagcatgtccgccgggacgcaccgtgactaagcgtccctgggccctggccgaggacacccctcgtggccccgacagcccccccaagcgcccccgccctaacagtcttccgctgacaaccaccttccgtcccctgccccccccaccccagacgacgtcagctgtggacccgagctcccattcgcccgttaaccccccacgtgatcagcacgccaccgacaccgcagacgaaaagccccgggccgcgtcgccggcactttctgacgcctcagggcctccgaccccagacattccgctatctcctgggggcacccacgcccgcgacccggacgccgatcccgactccccggaccttgactctatgtggtcggcgtcggtgatccccaacgcgctgccctcccatatactagccgagacgttcgagcgccacctgcgcgggttgctgcgcggcgtccgcgcccctctggccatcggtcccctctgggcccgcctggattatctgtgttccctggccgtggtcctcgaggaggcgggtatggtggaccgcggactcggtcggcacctatggcgcctgacgcgccgcgggcccccggccgccgcggacgccgtggcgccccggcccctcatggggttttacgaggcggccacgcaaaaccaggccgactgccagctatgggccctgctccggcggggcctcacgaccgcatccaccctccgctggggcccccagggtccgtgtttctcgccccagtggctgaagcacaacgccagcctgcggccggatgtacagtcttcggcggtgatgttcgggcgggtgaacgagccgacggcccgaagcctgctgtttcgctactgcgtgggccgcgcggacgacggcggcgaggccggcgccgacacgcggcgctttatcttccacgaacccagcgacctcgccgaagagaacgtgcatacgtgtggggtcctcatggacggtcacacggggatggtcggggcgtccctggatattctcgtctgtcctcgggacattcacggctacctggccccagtccccaagacccccctggccttttacgaggtcaaatgccgggccaagtacgctttcgaccccatggaccccagcgaccccacggcctccgcgtacgaggacttgatggcacaccggtccccggaggcgttccgggcatttatccggtcgatcccgaagcccagcgtgcgatacttcgcgcccgggcgcgtccccggcccggaggaggctctcgtcacgcaagaccaggcctggtcagaggcccacgcctcgggcgaaaaaaggcggtgctccgccgcggatcgggccttggtggagttaaatagcggcgttgtctcggaggtgcttctgtttggcgcccccgacctcggacgccacaccatctcccccgtgtcctggagctccggggatctggtccgccgcgagcccgtcttcgcgaacccccgtcacccgaactttaagcagatcttggtgcagggctacgtgctcgacagccacttccccgactgccccccccacccgcatctggtgacgtttatcggcaggcaccgcaccagcgcggaggagggcgtaacgttccgcctggaggacggcgccggggctctcggggccgcaggacccagcaaggcgtccattctcccgaaccaggccgttccgatcgccctgatcattacccccgtccgcatcgatccggagatctataaggccatccagcgaagcagccgcctggcattcgacgacacgctcgccgagctatgggcctctcgttctccggggcccggccctgctgctgccgaaacaacgtcctcatcaccgacgacggggaggtcgtctcgctga

SEQ ID NO: 13474 - DNA, 69 bp, unidentified; identical to SEQ ID NO: 2873
  misc_feature 1..69: note = Synthetic
  source 1..69: mol_type = other DNA

SEQ ID NO: 13475 - DNA, 642 bp, unidentified
  misc_feature 1..642: note = Synthetic
  source 1..642: mol_type = other DNA
atgggaattacaatggatgaggaagtgatatttgaaactcctagagaattaatatctattaaacgaataaaagatattccaagatcaaaagacacgcacgtgtttgctgcgtgtataacaagtgacggatatccgttaataggagctagaagaacttcattcgcgttccaggcgatattatctcaacaaaattcagattctatctttagagtatccactaaactattacggtttatgtactacaatgaactaagagaaatctttagacggttgagaaaaggttctatcaacaatatcgatcctcactttgaagagttaatattattgggtggtaaactagataaaaaggaatctattaaagattgtttaagaagagaattaaaagaggaaagtgatgaacgtataacagtaaaagaattcggaaatgtaattctaaaacttacaacgcgcgataaattatttaataaagtatatataggttattgcatggcgtgttttattaatcaatcgttggaggatttatcgcatactagtatttacaatgtagaaattagaaagattaaatcattaaatgattgtattaacgacgataaatacgaatatctgtcttatatttataatatgctagttaatagtaaatga

SEQ ID NO: 13476 - DNA, 642 bp, unidentified
  misc_feature 1..642: note = Synthetic
  source 1..642: mol_type = other DNA
atgggaattacaatggatgaggaagtgatatttgaaactcctagagaattaatatctattaaacgaataaaagatattccaagatcaaaagacacgcacgtgtttgctgcgtgtataacaagtgacggatatccgctaataggagctagaagaacttcattcgcattccaggcgatattatctcaacaaaattcagattctatctttagagtatccactaaactattacggtttatgtattacaatgaactaagagaaatctttagacggttgagaaaaggttctatcaacaatatcgatcctcacttcgaagagttaatattattgggtggtaaactagataaaaaggaatctattaaagattgtttaagaagagaattaaaagaggaaagtgatgaacgtataacagtaaaagaattcggaaatgtaattctaaaacttacaacacaggataaattatttaataaagtgtatataggttattgcatgtcgtgttttattaatcaatcattagaggatttatcacatactagtatttacaatgtagaaattagaaagattaaatcattaaatgattgtattaacgatgataaatacgaatatctgtcttatatttataatatgctagttaatagtaaatga

SEQ ID NO: 13477 - DNA, 21 bp, unidentified
  misc_feature 1..21: note = Synthetic
  source 1..21: mol_type = other DNA
atgttttactacgaaatgtaa

SEQ ID NO: 13478 - DNA, 72 bp, unidentified; identical to SEQ ID NO: 5442
  misc_feature 1..72: note = Synthetic
  source 1..72: mol_type = other DNA

SEQ ID NO: 13479 - DNA, 93 bp, unidentified
  misc_feature 1..93: note = Synthetic
  source 1..93: mol_type = other DNA
aggaggaccaggcctcatacatctccttcaatgcggcctccaactcgcggtcccaaatcaaggctgccttggacaatgcgggaaagattatga

SEQ ID NO: 13480 - DNA, 93 bp, unidentified; identical to SEQ ID NO: 13479
  source 1..93: mol_type = other DNA
  misc_feature 1..93: note = Synthetic

SEQ ID NO: 13481 - DNA, 495 bp, unidentified
  source 1..495: mol_type = other DNA
  misc_feature 1..495: note = Synthetic
atggcagacacagacgatattatcgactatgaatccgatgatctcaccgaatacgaggatgatgaagaagaggaagaagatggagagtcactagaaactagtgatatagatcccaaatcttcttataagattgtagaatcagcatccactcatatagaagatgcgcattccaatcttaaacatatagggaatcatatatctgctcttaaacgacgctatactagacgtataagtctatttgaaatagcgggtataatagcagaaagctataacttgcttcaacgaggaagattacctctagtttcagaattttctgacgaaacgatgaagcaaaatatgctacatgtaattatacaagagatagaggagggttcttgtcctatagtcatcgaaaagaacggagaattgttgtcggtaaacgattttgacaaagatggtctaaaattccatctagactatattatcaaaatttggaaacttcaaaaacgatattag

SEQ ID NO: 13482 - DNA, 66 bp, unidentified; identical to SEQ ID NO: 5424
  source 1..66: mol_type = other DNA
  misc_feature 1..66: note = Synthetic

SEQ ID NO: 13483 - DNA, 495 bp, unidentified
  misc_feature 1..495: note = Synthetic
  source 1..495: mol_type = other DNA
atggcagacacagacgatattatcgactatgaatccgatgatctcactgaatacgaggatgatgatgaagaggaagaagatggagagtcactagaaactagtgatatagatcccaaatcttcttataagattgtagaatcagcatccactcatatagaagatgcacattccaatcttaaacatatagggaatcatatatctgctcttaaacgacgctatactagacgtataagtctatttgaaatagcgggtataatagcagaaagctataacttgcttcaacgaggaagattacctctagtttcagaattttctaacgaaacgatgaagcaaaatatgctacatgtaattatacaagagatagaggagggttcttgtcctatagtcatcgaaaagaacggagaattgttgtcggtaaacgattttgacaaagatggtctgaaattccatctagactatattatcaaaatttggaaacttcaaaaacgatattag

SEQ ID NO: 13484 - DNA, 66 bp, unidentified; identical to SEQ ID NO: 5425
  source 1..66: mol_type = other DNA
  misc_feature 1..66: note = Synthetic

SEQ ID NO: 13485 - DNA, 66 bp, unidentified; identical to SEQ ID NO: 5424
  misc_feature 1..66: note = Synthetic
  source 1..66: mol_type = other DNA

SEQ ID NO: 13486 - DNA, 642 bp, unidentified
  source 1..642: mol_type = other DNA
  misc_feature 1..642: note = Synthetic
atgggatttacaatggatgaggaagtgatatttgaaactcctagagaattaatatctattaaacgaataaaagatattccaagatcaaaagacacgcacgtgtttgctgcgtgtataacaagtgacggatatccgttaataggagctagaagaacttcattcgcattccaggcgatattatctcaacaaaattcagattctatctttagagtatccactaaactattacggtttatgtactacaatgaactaagagaaatctttagacggttgagaaaaggttctatcaacaatatcgatcctcacttcgaagagttaatattattgggtggtaaactagataaaaaggaatctattaaagattgtttaagaagagaattaaaagaggaaagtgatgaacatataacagtaaaagaattcggaaatgtaattctaaaacttacaacgagtgataaattatttaataaagtatatataggttattgcatggcatgttttattaatcaatcgttggaggatttatcacatactagtatttacaatgtagaaattagaaagattaaatcgttaaatgattgtattaacgacgataaatacgaatatctgtcttatatttataatatactaattaatagtaaatga

SEQ ID NO: 13487 - DNA, 30 bp, unidentified; identical to SEQ ID NO: 5454
  source 1..30: mol_type = other DNA
  misc_feature 1..30: note = Synthetic

SEQ ID NO: 13488 - DNA, 141 bp, unidentified; identical to SEQ ID NO: 5456
  misc_feature 1..141: note = Synthetic
  source 1..141: mol_type = other DNA

SEQ ID NO: 13489 - DNA, 1005 bp, unidentified
  misc_feature 1..1005: note = Synthetic
  source 1..1005: mol_type = other DNA
atggcagacgaacgaatcggcgactatgttaaaactcgttatgacattgcactaatgaatttaaacgatataaaaattgcagtttttcgtgattctttatcgacatacgttgaacagaagaccggcttaactatacagtttaattggccgaaaagtcggtgcttggtgatttcgacactgtgtaaaattccatttcccacaaagtctgccgcagagttgcaagaaatgtgttcgttattgctttgctgcccagagagattgcaactacttggatatgtttctgcctggggaaaggagactcgtgatgtgtgcctaactaaaacgttggtgtttgtgggagaagacgaacgattctatggtctcgacttcgtgaatgagacactgtatttgttggcggaaacgacggaacgatttgcagttctcggattgcgtcgttatgatccggtatatcgagaaaaggacattcgctttttaacaaaaattgatgatgttcttcaatcgttgattgatgtgcaggataatttatggaaatttgctacgatcgtttataaaaatagtgggaggcattacattatgaagtcttgtttggaaaataacgacggagtttttgttttatttcttactaggaaagaagattttcctagtaggatggaatggaatttcttttcggatgtctacgagagcatgccgtatcacgggcatgttattgggagcattggaaaaacattactgtatccgaagacgatgtttgtgatgatggatttatcgggggcaatttatggtattgatacgatcggaacaggaattggatcatgtgttaaaatagcagacgaatttgaatcttttttaagacaggggattgttaggggatatcgtcgctataagtttttccatcagaacattagcaccgtccaagaaattctgccgttgtgtcctcatacttttctagggcccacattctcgaatgattacatttatgatttatcatctgaggatgaagagtag

SEQ ID NO: 13490 - DNA, 228 bp, unidentified
  misc_feature 1..228: note = Synthetic
  source 1..228: mol_type = other DNA
atgctcgagagtgtcagcagacgccgtctctgcaacgctcgcaaagcgtcttctgcagtcttgctagcaggcgccacatcgcggcacaggaaccgtaagacctcgtgctcgctagcgtccagctctgccagcagattccgcaggaaagagaaggggattggctcgtgcgccatggctttcggaaggtgtgcagactcgatcttcacttttttggaggctgtgtattaa

SEQ ID NO: 13491 - DNA, 624 bp, unidentified
  source 1..624: mol_type = other DNA
  misc_feature 1..624: note = Synthetic
ttggtcagactggagacgcagactcagtacctgacccccagcctctcggacagccaccagcagccccctctggtctgggaactaatacgatggctacaggcagtggcgcaccaatggcagacaataacgagggcgccgacggagtgggtaattcctcgggaaattggcattgcgattccacatggatgggcgacagagtcatcaccaccagcacccgaacctgggccctgcccacctacaacaaccacctctacaaacaaatttccagccaatcaggagcctcgaacgacaatcactactttggctacagcaccccttgggggtattttgacttcaacagattccactgccacttttcaccacgtgactggcaaagactcatcaacaacaactggggattccgacccaagagactcaacttcaagctctttaacattcaagtcaaagaggtcacgcagaatgacggtacgacgacgattgccaataaccttaccagcacggttcaggtgtttactgactcggagtaccagctcccgtacgtcctcggctcggcgcatcaaggatgcctcccgccgttcccagcagacgtcttcatggtgccacagtatggatacctcaccctga

SEQ ID NO: 13492 - DNA, 1698 bp, unidentified
  misc_feature 1..1698: note = Synthetic
  source 1..1698: mol_type = other DNA
atggatttcatccgccgcaagtacctagtgcacaccatcgagcgcaacatggatttcctgcgcgcagaggtcgcggagaaggtggccaacttcgcgctgaaccacgtgctggcactgcgctacctggtggcgcagtttccgcgcgccgtgctgaccaaggacgtcttcgcgaacgtaaactttcacgtcttcctgcacgtggtgcgctgcgcacaggtttacgacgcggtgctgcgctcgtcctttgatgcgaccacgctctatgtgcgcgcactggtacgcaactaccaggcctttgccgacaccgtgcagacgtaccgcgagctgtgccagacactgctacaggacaagcgcttcttggaggtggcgcgcgctgcgcccacacttgcggacgtcatcggcgtgaactacgacaccagcttgaacccgctgttcctacgcggggaaccggtgcgcgacatggaactcatctttacgaagctcttccgcaagacagagtttcgccccgtgaagaagctggcggtgctgcgcttgctactctgggcctacctgtgtaagcaagacacagggctcgacttcgcggacaacgacgcgcaggacctgtactcgctcttccagaaaacaggcccggtcgtccacagcgagatgaccgagcgcttcaaggccttcatgttcgcgggcgagaagaccagttactgggtgtggctacaggagcccgtcgcgaacgacgcggacgttttcaaggagcgccccgcgcgtggaatgtacgagcgcctgctcagctatctctattcagagctcaagcagggccgcgtgaacaagaacatgctcaagttggtttacatcttcgactcggaccccagcatccgcagcctggtcctggagatcatctatggcgtgcctggagacatcctgggtgtcgtcgatagcgaggacgagacgtggaaggcctacttcgtggcgctgtaccgcgagcatttcgtggacgggcgcactttcaccagcacgcagagcttcttccgagaccttttccgcgtggtcgcgcgcgtggatccggagcacttcggcgccgagcgctttgccgcgctcttcaacgcgcagccagaggcgcgtgcgcgttttgacgacatggacgtcaacacaacctttgtctcacggatggtctaccagacgccggacctggacctgctcgcgctggagcgcaaccgcatgtgccaaatctacagcgaggacacgcagtactatgtgaaggagtataacaccttcttgttcctgcacgaggacgaccctgtggtcatcgacgagggcgcactggttcggttgtcaagcgtgccaagcgagcggcgccgcttgctctttagcgagcacgtgctcaagtactggctggacgggcagctggcgcgcctggggctggtcttgcccagctacgacgacgtggtcctgcgtatggtcacgcacatgaaatgcctggaggacgtgactgccttcgtggactacgccacacgtcgtaacgctagcatggtacccgctgtcacacgcggactgctggcgcacttccacgtcccggtactggtgcttttccagcgcttcctgcgcgagcacctgttgcgcgtgcgcgaggtgctggaccgcagcgagcacctcacggagcgcgagaagaagtacatcctgcagattatcacgcacggacgctcgtga

SEQ ID NO: 13493 - DNA, 33 bp, unidentified; identical to SEQ ID NO: 5465
  source 1..33: mol_type = other DNA
  misc_feature 1..33: note = Synthetic

SEQ ID NO: 13494 - DNA, 441 bp, unidentified
  source 1..441: mol_type = other DNA
  misc_feature 1..441: note = Synthetic
atgatcgtggcggccttcgacctgggcacgcgcaaccccgcacgcaccgtgctggaggtgctcgacggcacggtgcgcgtggtggacgtggccaagctggactggagccgcgactgggagaagcgcgtgcaccgcgacgtgaccgccttccccgcgaacgtggtgctcgtggagcgccagtgcaagatgtcgcctttttctaagttcatatacttcatacgcgggctgctctacgacgggcggcgccgcacgcgcgtgctcgcggtgccgccggccatgaccggcagcacctaccggcagcgcaagcgccgctcggtgcgcaccttcctcgcgctcgcggagagcttcggcatcctggacgccgtgcccgcgcggaagaagctcgacgacgtcgcggacagcttcaacatggccatcaattacgtgctccgaacaaactga

SEQ ID NO: 13495 - DNA, 162 bp, unidentified; identical to SEQ ID NO: 5468
  source 1..162: mol_type = other DNA
  misc_feature 1..162: note = Synthetic

SEQ ID NO: 13496 - DNA, 24 bp, unidentified
  misc_feature 1..24: note = Synthetic
  source 1..24: mol_type = other DNA
atgtgggaaatgatatttttgtaa

SEQ ID NO: 13497 - DNA, 6384 bp, unidentified
  source 1..6384: mol_type = other DNA
  misc_feature 1..6384: note = Synthetic
atgctggagtccacagaggtgtacgatgaccctctggatcctgttgaaccggagttcgatctcaagacaaactccgtcgtaccaaacattttaagaaactcagactacaatctgaactctcccctcttagaagatccttcaaaactgatgctcgagtggctgatgactggaaacaaaccacacagactcaacttgacagataacttgctcagatcatacaaggtcttgaaaggatatttcaagagattggacacgggttcgttgagagttggttctgtagggtcccaagcgatggtgaccctgtggctacatgggtcccattctgaatcaacaagaagtagaaaatgccttgcggagttgtctcagttctacaaaaaatcagctccaatagagacattgctgaactgcacactggagaacaggggcttgagaacacccccggaaggggttctgtcttgtcttgacaaagttcactatgatcaagcgttcgggcggtacctgggtaacacttattcttcatatctgttcttccatgtgatggttctgtatatgaacgccttagattgggatgaggaaaagaccattctatctctgtggagggatatctcctccatagacatcaagaatgacttagtgaagttcaaagatcagatatgggggactttggttgtcacgaaggatttcatatactcccagagtgcaaattgtctatttgacaggaattacaccctcatgcttaaagaccttttcctgtcccgcttcaactcatttctgatattgctctcacctcccgaagcaagatattcagatgacttagtatctaacttgtgtcaactttacatatcaggcgacagggtattgtctgtgtgtggaaactctggattcgacgtaatcaagttgttagagccgtacatagtaaacaagttagtacaaagggcagagaagttccgtcctctcatacactctctgggggatttccctcaatttattaaagacaagacaacccagctcgaagggaccttcggccccagtgccaaggagtttttccaaactatggactccctagacaatgtacatgacttggtgtttgtgtacggatgctatagacactggggccatccatatatagactatagaagagggctgtctaaactgtatgatcaggtccacctcaagaagacaatagacaagagttatcaggagtgtttagccagtgacttagccaaaagaattctcagatgggggtttgataagtattccagatggtatgtagaccccaatttgttgcaaaatgatcatcccctggttccatatgtgagaacccaaacatggcctccaaaacatgtggttgatgttgtgggagacacatggcacaatctccccattacccagatatttgagatacctgagtctatggacccctccgagattttagatgacaagtcacactcatttacaagaaccaagctagcttcttggctttctgaacacagaggggggccggtccccagtgagaaggtcataatcacagccttgtccagacccccagtgaatcctagagagttcctcaggtctattgatgtcagtgggttgcctgatgatgatctaatcataggtctaaaaccaaaggaaagagaattgaagatagagggccgattcttcgcactcatgtcctggaatctgaggctttattttgtcatcacagagaagcttttggccacatacatcctgcctctatttgactctctaaccatgacggacaacctgaacaaagtcttcaaaaagttgatcgacagagtgacaggacaagggttgttagactactcgcgagttacatatgcatttcatctcgactatgagaagtggaacaatcaccagagactagagtctaccatagatgtcttctcagttctagataaggtattcgggcttaaaaaagtcttctctagaacccatgagttctttcaaaaatcctggatctattattctgacagatcagacctcattggcctgtggagagatcagatatactgcctagacatgagcaatggccccacatgctggaacggtcaggacggtggacttgaaggtctaagacaaaaagggtggagtctagtaagtctcttaatgattgacagagaatcacaaacccgcaacacaagaaccaagattttggcacagggagacaatcaggtgttatgccccacatatatgttgtctcctgggttgaacaaggaggggcttctctatgaactagacagcatatctaggaatgccatctctatatatagggccattgaagatggagctgcaaagcttggtctgataatcaaaaaggaagagacaatgtgcagttatgactttttgatctatgggaagacccctttgtttcgaggcaacatactggtgccagaatctaagcgatgggctagagtctcatgtatttccaacgatcagattgttaatttggcaaacataatgtcgacggtatctaccaatgcattgactgttgcccagcactcccaatccctgataaaaccaatgagagatttccttttgatgtctgttcaagctgtctttcactatcttttatttagtccgatcttgaagaatagagtatacaaaatccttgtggccgatggaactgaattcttgctggcgatgtcaaggataatttatttggacccttccctgggtggggtctcagggatgtctctaggaaggttccacatccgccaattctctgatccggtgtccgagggcttgtcattctggagagagatttggtctagttcctctgagacttggattcactccctgtgtcaagaagcagggaatccagatcttggtgaaaggagtttagagagtttcacgaggctcttagaagatccgactaccctgaatatcagaggaggggcaagtcccaccatcctactcaaagaggcaatcagaaaagcattatacgacgaggtcgacaaagttgagaactcagagttcagagaagcaatcttgctatccaaaactcaccgggacaactttatattgttcttaaggtctgtggagcctctgtttccaagatttctcagtgagttgttcagctcatctttcctaggcatccctgagtctatcattggtctcatccaaaactcaagaacaattagaagacagtttaggaagagtctatctcggactctagaggagtctttcttcagctcagagattcaaggaatcagtcgagtgacccaagtggctcaaaaaataggaagggtttggaggtgttccgcagagagggcagaccagctccgggaaatatcctggggcaggaaagttgtggggacaactgtccctcacccatccgagatgttgtccatgatacctaagtcgtccatctcctgcacctgtggacagctagaagatgacaatccccgtatctctgtgtcagtccttccgtccttcgaccaaacttttttctcccgagggcctctcaaaggttatttgggttcttccacctctatgtccactcagttgttccatgcatgggaaaaagtcacaaacgttcatgtggtcaagagagccctatctcttaaggaatcaatcaactggttcatatcgagagactctaatttggcgcacacattgattcgtaatattgtatctctgactggcccttcctttcctcttgaggaggctcccgtgttcaaaaggactggatctgctctgcatcgtttcaagtctgccagatacagtgaagggggatactcttccatttgtcccaacctattgtcccacatctctgtgagtacagataccatgtcagatctcacgcaagatgggacaaactttgactttatgttccagcctttaatgctttatgcccaaacgtggacctctgagctggtccaaaaagacttgagactgaaggattccacattccattggcatctcagatgtgtcagatgtgtcaggccgatagatgatatcactctcgaggccccgaatgtcttctcctttccagatgtttctagaagaatatctcgaatggtatcaggggctgttcctcaattccaaaaactgccagaaatctctttgaagccaggtaagttcgagaccctcagtgggaaagatcaatccaaacacattgggacagcccagggtctcttgtactctatattggtggctatccatgattcagggtacaatgatggaaccgttttcccagtcaacatatacaagagagtgtctcccagagactatctcagagggctagcgagaggtgtcttgatagggtcctccatttgcttcttaacccggatgaccagcattaacatcaatcgcccgttggagctgatttctggagtcatctcttacattttgttgagactcgacaaccacccctccctgtatgtcatgttgaaagaaccctctctcaggctcgagatattttccatccctcaaaaaatacccgctgcgtatccgacaaccatgaaggagggcaacaggtctgtcttatgctatctgcaacatgtgctgagatatgaaagagaagccataacagcatcaccagagtgcgactggttgtggattttctctgatttcagaagcattaagatgacttatttaactctgatcacatatcagtctcaccttttactgcaaaaaatagataggaacttatcaaagcagatgagagttcagttgaggcaactgaattccctgatgagacaggtgttaggtgggcatggagaaggctctttagactctgctgacgacattcacgggttgttaagagacgctctacaacgaacacgatgggttgaccaggaggtccgccatgcagccaaggcgatgaaatgtgactacagtcctcaaaagagatcatcaaggaaagctagtagttctgaatggatatgctcagctcaacagattgccatatcgacctcttcaaatcctgccccgacatctgagattgatatcagagcattgtctaggaagttgcaaaatcctcttatttctggccttcgagttgttcaatgggctactggagcccattataagcttaaaccgatcctcaacgagctagatacatatcccacattgtgtttggtagtgggtgatggttccgggggaatttcaagggcagtgctgagcatgttccctgatgctaaattagtttttaatagtctcttggaggtcagtgacttgatggcttcagggacacacccattacctccctccgcgttggtaagtggaggagaggatatcatatctcgagttattgacttccagtccatctgggagaagccttcagatttgagaaacccatcaacttggaggtatttccagagtgtccaacaaaccaccaacatgtcatatgatctgataatttgtgatgcagaagttacagacatttcctcgatcaacaagataaccttgttaatgtctgatttctccctgtcgatcaatggtcctctgagtttaattttcaagacttacgggacaatgttggttaatcctgactacagggctattcagcatctctctagggcattcccttcagcagcagggtatataacgcaggtgacctcttcattctcttcagaactttacttgaagttctcaaagcgagggaagttttttagagaccctgagcatttaacatcatctaccttgagagaaatgagcctggtgctctttaattgcagcagctccaagagcgagatgctgagagcargatcattaaactatcaagatcttgttaggggatttccagaagaaatcatatcaaatccatacaatgagatgataataaccctcatagataacgatgtagagtcattccttgttcacaagatgattgatgacctggagcttcaacgaggggcgttctccaaactgtcaatcatactaaccatcatggtggtgttttctaatagagtgttcaatgtgtctaagcctttgacagacactaagttctacccaccgtcagacccgaagatcttaaaacacttcaatatctgttgtagcactctcttgtacttatcagttgctttgggtgatgtcctcaactttgcccgactccatgaactttacaacaaccctataacatattattttaggaagcaagtgataggagggagaatgtatttggcctggagctggtcacacagtacatcggtctttaagagagttgcttgcaactcaaatctgagtctgtccgcgcactggattcggctgatctataaagtcgtcaagacaacaagactcactggaggccccaaggacctgtctcgagagatggaaagacatctaaagagctacaacagatggatcaactttgatgatctccgatccagatcatctctgttggattatagtggtctttaa

SEQ ID NO: 13498 - DNA, 54 bp, unidentified; identical to SEQ ID NO: 5471
  misc_feature 1..54: note = Synthetic
  source 1..54: mol_type = other DNA

SEQ ID NO: 13499 - DNA, 372 bp, unidentified
  misc_feature 1..372: note = Synthetic
  source 1..372: mol_type = other DNA
atgggtggcaagtggtcaaaaagtagtgtgattggatggcctactgtaagggaaagaatgagacgagctgagccagcagcagatagggtgggagcagcatctcgagacctggaaaaacatggagcaatcacaagtagcaatacagcagctaccaatgctgcttgtgcctggctagaagcacaagaggaggaggaggtgggttttccagtcacacctcaggtacctttaagaccaatgacttacaaggcagctgtagatcttagccactttttaaaagaaaaggggggactggaagggctaattcactcccaaagaagacaagatatccttgatctgtggatctaccacacacaaggctacttccctgattag

SEQ ID NO: 13500 - DNA, 57 bp, unidentified
  misc_feature 1..57: note = Synthetic
  source 1..57: mol_type = other DNA
atggagcaatcacaagtagcaatacagcagctaccaatgctgcttgtgcctggctag

SEQ ID NO: 13501 - DNA, 66 bp, unidentified; identical to SEQ ID NO: 5474
  source 1..66: mol_type = other DNA
  misc_feature 1..66: note = Synthetic

SEQ ID NO: 13502 - DNA, 66 bp, unidentified; identical to SEQ ID NO: 5474
  source 1..66: mol_type = other DNA
  misc_feature 1..66: note = Synthetic

SEQ ID NO: 13503 - DNA, 66 bp, unidentified; identical to SEQ ID NO: 5474
  source 1..66: mol_type = other DNA
  misc_feature 1..66: note = Synthetic

SEQ ID NO: 13504 - DNA, 1005 bp, unidentified
  source 1..1005: mol_type = other DNA
  misc_feature 1..1005: note = Synthetic
atggcagacgaacgaaccagcgattctgttaaaactcgttatgatattgcactgatgaagctaaacgatataaaaattgcagtttttcgtgattctctatcgacatacgtagaacagaagaccggcttaactatacagtttaattggccgaaaagtcgatgcttggtgatttcgacactgtgtaaaattccatttcccacaaagtctgccgcagagttgcaagaaatgtgttcgttattactttgctgcccggaaagattgcaactacttggatatgtttctgtctggggagaggagactcgtgatgtgtgcctaactaaaacgttggtgtttgcgggagaagacgaaaaattttacggtctcgattttgtgaatgagacactgtatctgttggcggaaacgacggaacgatttgcagttctcggattgcgtcgctatgatccggtatatcgagaaaaggacattcgctttctaacgaaaattgatgatgttcttcaatcgttgattgatgcgcaggataatttatggaaattcgctactatcgtttataaaaatagtgggaggcattacattatgaagtcttgcttggaaaataacgatggagtatttgttttatttcttactaggaaagaagattttcctagtaggatggaatggaatttcttttcggatgtctacgagagtatgccgtatgacgggcaggttatcggaagcattggaaaaacattactgtatcctaaaacgatgtttgtgatgatggatttatcgggggcaatttatggtattgatacgatcggaacgggaattggatcttgtgttaaaatagcagacgattttgaatcttttttaagacaagggattgttaggggatatcgtcgctataaatttttccataggaacattaacaccgtccaagaaattttgccgttgtgtccccatacttctctagggcccacattctcgaataattacatttatgatttatcatctgaggatgacgagtaa

SEQ ID NO: 13505 - DNA, 42 bp, unidentified; identical to SEQ ID NO: 5477
  misc_feature 1..42: note = Synthetic
  source 1..42: mol_type = other DNA

SEQ ID NO: 13506 - DNA, 429 bp, unidentified
  misc_feature 1..429: note = Synthetic
  source 1..429: mol_type = other DNA
atgagcggaaacggctcctttgagggaggggtattcagcccttatctgacggggcgtctcccctcctgggcgggagtgcgtcaaaatgtgatgggatccacggtggacggccggcccgtacagcccgcgaactcttcaaccctgacctatgcaaccctgagctcctcgtcggtggacgcagctgccgccgcagctgctgcttctgccgccagcgccgtgcgcggaatggccatgggcgccggctattacggcactctggtggccaactcgagttccactaataatcccgccagcctgaacgaggagaagctgctgctgttgatggcccagctcgaggccttgacccagcgcctgggcgagctgacccagcaggtggctcagctgcaggagcagacgcgggccgcggttgccacggtgaaatccaaataa

SEQ ID NO: 13507 - DNA, 54 bp, unidentified; identical to SEQ ID NO: 5481
  source 1..54: mol_type = other DNA
  misc_feature 1..54: note = Synthetic

SEQ ID NO: 13508 - DNA, 429 bp, unidentified
  source 1..429: mol_type = other DNA
  misc_feature 1..429: note = Synthetic
atgagcggaagcggctcctttgagggaggggtattcagcccttatctgacggggcgtctcccctcctgggcgggagtgcgtcagaatgtgatgggatccacggtggacggccggcccgtgcagcccgcgaactcttcaaccctgacctatgcaaccctgagctcttcgtcggtggacgcagctgccgccgcagctgctgcatccgccgccagcgccgtgcgcggaatggccatgggcgccggctactacggcactctggtggccaactcgagttccaccaataatcccgccagcctgaacgaggagaagctgctgctgctgatggcccagcttgaggccttgacccagcgcctgggcgagctgacccagcaggtggctcagctgcaggagcagacgcgggccgcggttgccacggtgaaatccaaataa

SEQ ID NO: 13509 - DNA, 285 bp, unidentified
  source 1..285: mol_type = other DNA
  misc_feature 1..285: note = Synthetic
gtgtgtcgtaacgggcaactctgcagcggaaccgactactttgggtgtccgtgtttcattttattcctatactggctgcttatggtgacaattgacaggttgttaccatatagttattggattggccatccggtgactaacagagcaattatatatctctttgttgggtttataccacttagcttgaaagaggttaaaacactacatctcatcattaaactaaatacaacaaaatgggggctcaagtatcaacacaaaagactggagcacatgagaccgggctga

SEQ ID NO: 13510 - DNA, 75 bp, unidentified; identical to SEQ ID NO: 5484
  misc_feature 1..75: note = Synthetic
  source 1..75: mol_type = other DNA

SEQ ID NO: 13511 - DNA, 27 bp, unidentified
  misc_feature 1..27: note = Synthetic
  source 1..27: mol_type = other DNA
atgctcaacagaaaaaacgagtcatga

SEQ ID NO: 13512 - DNA, 447 bp, unidentified
  source 1..447: mol_type = other DNA
  misc_feature 1..447: note = Synthetic
atgtcaaccgccgcgtcgtcgcgcacgccagcgctctcagggcgcagcaccgggacctgcccgagcgccacgccgacgtgcctctgccgcccctgcccgcggggccagaaccgccgctgccgccgggagcacgcccgcgacaccgcttctaaaagcgcaccgcggcacggtcgtggccccgcgcagctacgggctcatgcaatgcgtggacacgaccaccaactcacccgtggagatcaagtaccatctgcatctcaagcacgccctcacccgcctctacgaggtcaacctcagaaccctgcccccggacctggatctccgcgacaccatggacagctcccaactgcgcgccctcgtcttcgctctccgcccccgccgcgccgagatctggacctggctcccgcgcgggctcgtcagcctctccgtcctcgaggagccccagggtga

SEQ ID NO: 13513 - DNA, 39 bp, unidentified; identical to SEQ ID NO: 1882
  source 1..39: mol_type = other DNA
  misc_feature 1..39: note = Synthetic

SEQ ID NO: 13514 - DNA, 4155 bp, unidentified
  misc_feature 1..4155: note = Synthetic
  source 1..4155: mol_type = other DNA
atggagcctgcgaatcccccaaggaacccaatggccgctcctgcccgcgaccccccgggttaccggtacgccgcggccatggtgcccaccggctccatcctgagtacgatcgaggtggcgtcccaccgcagactctttgattttttcgcccgcgtgcgctccgacgaaaacagcctgtatgacgtagagtttgacgccctgctggggtcctactgcaacaccctgtcgctcgtgcgctttctggagctcggcctgtccgtggcgtgcgtgtgcaccaagttcccggagctggcttacatgaacgaagggcgtgtgcagttcgaggtccaccagcccctcatcgcccgcgacggcccgcaccccgtcgagcagcccgtgcataattacatgacgaaggtcatcgaccgccgggccctgaacgccgccttcagcctggccaccgaggccattgccctgctcacgggggaggccctggacgggacgggcattagcctgcatcgccagctgcgcgccatccagcagctcgcgcgcaacgtccaggccgtcctgggggcgtttgagcgcggcacggccgaccagatgctgcacgtgctgttggagaaggcgcctcccctggccctgctgttgcccatgcaacgatatctcgacaacgggcgcctggcgaccagggttgcccgggcgaccctggtcgccgagctgaagcggagcttttgcgacacgagcttcttcctgggcaaggcgggccatcgccgcgaggccatcgaggcctggctcgtggacctgaccacggcgacgcagccgtccgtggccgtgccccgcctgacgcacgccgacacgcgcgggcggccggtcgacggggtgctggtcaccaccgccgccatcaaacagcgcctcctgcagtccttcctgaaggtggaggacaccgaggccgacgtgccggtgacctacggcgagatggtcttgaacggggccaacctcgtcacggcgctggtgatgggcaaggccgtgcggagcctggacgacgtgggccgccacctgctggatatgcaggaggagcaactcgaggcgaaccgggagacgctggatgaactcgaaagcgccccccagacaacgcgcgtgcgcgcggatctggtggccataggcgacaggctggtcttcctggaggccctggagaagcgcatctacgccgccaccaacgtgccctaccccctggtgggcgccatggacctgacgttcgtcctgcccctggggctgttcaacccggccatggagcgcttcgccgcgcacgccggggacctggtgcccgcccccggccacccggagccccgcgcgttccctccccggcagctgtttttttggggaaaggaccaccaggttctgcggctgtccatggagaacgcggtcgggaccgtgtgtcatccttcgctcatgaacatcgacgcggccgtcgggggcgtgaaccacgaccccgtcgaggccgcgaatccgtacggggcgtacgtcgcggccccggccggccccggcgcggacatgcagcagcgttttctgaacgcctggcggcagcgcctcgcccacggccgggtccggtgggtcgccgagtgccagatgaccgcggagcagttcatgcagcccgacaacgccaacctggctctggagctgcaccccgcgttcgacttcttcgcgggcgtggccgacgtcgagcttcccggcggcgaagtccccccggccggtccgggggcgatccaggccacctggcgcgtggtcaacggcaacctgcccctggcgctgtgtccggtggcgtttcgtgacgcccggggcctggagctcggcgttggccgccacgccatggcgccggctaccatagccgccgtccgcggggcgttcgaggaccgcagctacccggcggtgttttacctgctgcaagccgcgattcacggcagcgagcacgtgttctgcgccctggcgcggctcgtgactcagtgcatcaccagctactggaacaacacgcgatgcgcggcgttcgtgaacgactactcgctggtctcgtacatcgtgacctacctcgggggcgacctccccgaggagtgcatggccgtgtatcgggacctggtggcccacgtcgaggccctggcccagctggtggacgactttaccctgccgggcccggagctgggcgggcaggctcaggccgagctgaatcacctgatgcgcgacccggcgctgctgccgcccctcgtgtgggactgcgacggccttatgcgacacgcggccctggaccgccaccgagactgccggattgacgcgggggggcacgagcccgtctacgcggcggcgtgcaacgtggcgacggccgactttaaccgcaacgacggccggctgctgcacaacacccaggcccgcgcggccgacgccgccgacgaccggccgcaccggccggccgactggaccgtccaccacaaaatctactattacgtgctggtgccggccttctcgcgggggcgctgctgcaccgcgggggtccgcttcgaccgcgtgtacgccacgctgcagaacatggtggtcccggagatcgcccccggtgaggagtgcccgagcgatcccgtgaccgaccccgcccacccgctgcatcccgccaatctggtggccaacacggtcaacgccatgttccacaacgggcgcgtcgtcgtcgacgggcccgccatgctcacgctgcaggtgctggcgcacaacatggccgagcgcacgacggcgctgctgtgctccgcggcgcccgacgcgggcgccaacaccgcgtcgacggccaacatgcgcatcttcgacggggcgctgcacgccggcgtgctgctcatggccccccagcacctggaccacaccatccaaaatggcgaatacttctacgtcctgcccgtccacgcgctgtttgcgggcgccgaccacgtggccaacgcgcccaacttccccccggccctgcgcgacctggcgcgccacgtccccctggtccccccggccctgggggccaactacttctcctccatccgccagcccgtggtgcagcacgcccgcgagagcgcggcgggggagaacgcgctgacctacgcgctcatggcggggtacttcaagatgagccccgtggccctgtatcaccagctcaagacgggcctccaccccgggttcgggttcaccgtcgtgcggcaggaccgcttcgtgaccgagaacgtgctgttttccgagcgcgcgtcggaggcgtactttctgggccagctccaggtggcccgccacgaaacgggcgggggggtcaacttcacgctcacccagccgcgcggaaacgtggacctgggtgtgggctacaccgccgtcgcggccacggccaccgtccgcaaccccgttacggacatgggcaacctcccccaaaacttttacctcggccgcggggcccccccgctgctagacaacgcggccgccgtgtacctgcgcaacgcggtcgtggcgggaaaccggctggggccggcccagcccctcccggtctttggctgcgcccaggtgccgcggcgcgccggcatggaccacgggcaggatgccgtgtgtgagttcatcgccacccccgtggccacggacatcaactactttcgccggccctgcaacccgcggggacgcgcggccggcggcgtgtacgcgggggacaaggagggggacgtcatagccctcatgtacgaccacggccagagcgacccggcgcggcccttcgcggccacggccaacccgtgggcgtcgcagcggttctcgtacggggacctgctgtacaacggggcctatcacctcaacggggcctcgcccgtcctcagcccctgcttcaagttcttcaccgcggccgacatcacggccaaacatcgctgcctggagcgtcttatcgtggaaacgggatcggcggtatccacggccaccgctgccagcgacgtgcagtttaagcgcccgccggggtgccgcgagctcgtggaagacccgtgcggcctgtttcaggaagcctacccgatcacctgcgccagcgaccccgccctgctacgcagcgcccgcgatggggaggcccacgcgcgagagacccactttacgcagtatctcatctacgacgcctccccgctaaagggcctgtctctgtaa

SEQ ID NO: 13515 - DNA, 1146 bp, unidentified
  source 1..1146: mol_type = other DNA
  misc_feature 1..1146: note = Synthetic
atgggttcatctgtttcgataactagtttaaaagttgctccaaacttagcagatcaaaatgaaaagtatatgtttattaattttaattatccagaatacaacaaattagtttctttttatgaagaaatgaagaactataataacgataccttaacagaaataactcctagattttgtcttacggacgatctttctatcgattactgtggttcgtttatatcacccaccatagcagaaaaatacatattagttaaaggcaatgaatgtagatcgtttaactttagacccggatcaatgataatatttaaagatgaaattactaaagattatatagataccaaacttccagcaataacgcacaagtttatttctaaaggatatcagtgcaagtttcttaaaaaagattttattatagatgatagttcgctagtgtcttgttgtaccaatttaacaaatacacaaaaatgtccatcggtacttaataatggatatgaaacatctcattgcgatttaataatgtcaaacttttgtaagcgtaatcctgatagctttcaatgtttaaaatggttaagaaaaaaaagaaaaatagcgttacaaacgtattctgaaatatgttcagaccatatggaccaacgattttgttcagagtttataagagttgtacgtccagaattttacacatttggagatacagcattaattaatttttgtaaaaaacacacagcaaacagaaattgttggtgtgtgtttcctccaaacaatactttacaacaaaggtttttaggtcctaaagtttgttggttgcatgaatgtacggataaaactagagatagaaagtggttgttgtttgatcaagatgttcagcgatcaagatgtaaatatacaggatgtacgataaatataaattcgttaactatggaaaattcaaaagctgatttaatagcaaattgttataataataactcggtaattggagatatagatcctggaaagccaaaaaagaataaccataataagcaaaattttccttttattttttggtatggaataattacattcgtatcactgtttatcttgttttactttattgttatatattctaaaaaaaaaattaaaacgcgagatataaatgttcgtagacgataa

SEQ ID NO: 13516 - DNA, 66 bp, unidentified; identical to SEQ ID NO: 5494
  source 1..66: mol_type = other DNA
  misc_feature 1..66: note = Synthetic

SEQ ID NO: 13517 - DNA, 2319 bp, unidentified
  source 1..2319: mol_type = other DNA
  misc_feature 1..2319: note = Synthetic
atgcagcacaccggtaattgtgaaactttaatagttaattcatgttttggttccacttgtgcacggtcgattccagtttttatagattcgtgtgatctgaccgctgaagtgtctcgcgacgaggaaactcgtttagcgcgatccgtgcctgtagttctggaaaagatcgagtcaatcatagagaaaatttttcaaacgtccgggccaaatatcgttcacgataaagacagggctaaaattgccttgtgtcgtctgttgttaggaccagttgcggtgccatgcttctgtgaagagtgggacaccaacgactatttgtcgaaatctggctgtaaatgcataggtccgatcttatatattcataccagtcgatgtcgttgtagcgacattccggtttttaagttttctattatgaaagattactatgcttcacacgtgttcagaggtttattatctctgaaagagtggaatacacatctaccgaatgtattgtgtacgtgtgagttgtcgatgagcgatagatatgtggcgacagtgtatcctaagcagaattctatttatctagaatactatccgtattttttgtgctacctgtgtcgccatcttactgtcattgagattgagcagtgtacaaatgatttaatttcgcttcttggccctaaagtagctcagcgagtcataattcattttaaactgctttttggttttcgtcacaagccgcatattggtactgttgattcgtggttctgggaaaatttttttatgttagaattgcataagctttggttaaccgtagtcaaacataatcgggtgacgacagatttttttaatgtagtctacgagaaaattcaaaactataaacaatacgcaatcaagaccctgaggatgtcgtctaaggcggttcctgcaatacagaggttgtgtttggcaaaatttaagcagcaattgttgtatctaaatattaaggttacggtaaaaaaaaataagcgagaaatgtgtttgaatggctttgtttacggtaaaacattgtatgtcgttgaatcttctcagttaatcttccggaatttgcttctgttgtattacgattacagtttgccggacgaatgcaagacaaacgaagaaaacgttttgacggctcattacatacgagtaatttcgagattgtcgtttaagcggtctcggagtgcgctcccgccaggcgtgagaccagattttatctttgtggcacaacagcctaaacgtaaagagttacctaatgttcccggtggtatcgattttgctgaaattacctcagtgaggcatggcgcggtaactcttaacgcgtttaatacgaacaaagtcatgaatttaaaagcaaccatttcaaaaagggctaactttgtatatcatcgcattcctaagacgatgacccacagttttgtcatgtacaagcatacgtttaaagaacctgcgtttaccgtaagcacgtttgtttcaaacgatgatttagatatgagttcgttgaatatcaacatacgtggaccttactgcgactttttatatgctttaggcgtttataagatgcatgtttctatccgagatctatttttaccggcgttcgtttgcaatagcaataattcagtggatttacagggactggaaaatcaggatgttgtgagaaatagaaagaaaaaggtgtattggatcactaactttccgtgcatgatttctaatgctaacaaagtgaacgtgggatggtttaaagcaggaacgggtattattcctcgggtgtctggggaggaccttcaaaatgttttgcttcaggaattaaataacgttcgagagattcccgggttagtctttgatatggatttacatcaactgcttgttttattggaacagcgaaatctacatcagattccgtttctcgttaaacagtttcttatttttttacgtctcggtctgttaatgggttacgggcactctcggcgcaacaaggtgcatgatattatgttacatttaatttcgaatggtctgtttgattttaataagaactccgtagcaaatacaaaaatcaaacacgggtgtgcgttggttgggacgcggctcgccaacaatgttccgaaaatcattgctaggcagaagaaaatgaagctagatcacatggggcgaaatgctaattcgctcgccgtgttgcgttttatcgttaaaagtggggaacagaaaaataaaactgttttcattaaattgttggaatatttagcggaaacctcaactgccataaatacgcggaatgaagtcgccagattacttcagactctgacggctaaggtgaaaacatga

SEQ ID NO: 13518 - DNA, 54 bp, unidentified; identical to SEQ ID NO: 5496
  misc_feature 1..54: note = Synthetic
  source 1..54: mol_type = other DNA

SEQ ID NO: 13519 - DNA, 2319 bp, unidentified
  source 1..2319: mol_type = other DNA
  misc_feature 1..2319: note = Synthetic
atgcagcacaccggtaattgtgaaactttaatagttaattcatgttttggttccacttgtgcacggtcgattccagtttttatagattcctgtgatctgaccgctgaagtgtctcgcgacgaggaaactcgtttagcgcgatctgtgcctgtagttctggaaaagatcgagtcaatcatagagaaaatttttcaaacgtctgggccaaatatcgttcacgataaagacagggctaaaattgccttgtgtcgtctgttgttaggaccggttgcggtgccatgtttctgtgaagaatgggacaccaacgactatttatcgaaatctggatgtaaatgcttaggtccgatcttatatattcataccagtcgatgtcgctgtagcgatattccggtttttaagttttccattatgaaagattactacgcttcacacgtgttcagaggtttattatctctgaaagagtggaatacacatctaccgaatgtattgtgtacgtgcgagttgtcgatgagtgatagatatgtggcgaccgtgtttcctaagcagaattctatatatctagaatactatccgtattttttgtgttatctgtgtcgctatcttactgtcattgagattgagcagtgtacaaatgatttaatttcgcttcttggtcctaaagtagctcagcgagtcataattcattttaaactgcttttcggttttcgtcacaagccgcatatgggcactgttgattcgtggttctgggaaaatttttttatgctagaattgcataagctttggttaaccgtagtcaaacataaccgggtgacaacagatttctttaatgtagtctatgagaaaattcaaaactataaacaatacgccatcaagactttgaggatgtcgtctaaggcggttcctgcaatacagaggttttgtttggcaaaatttaagcagcaactcttgtatctaaatattaaggttacggtaaaaaaaaataagcgagaactgtgtttaaatggttttgtttacggtaaaacattgtatgtcgttgaatcttctcagttaatctttcgaaatttgcttctgttgtattacgattacagtttgccggacgaatgcaaaacaaaagaagaaaacgttttgacgactcattacatacgggtaatttcgagattgtcgtttaagcagtctcgaagtgcggtcccgccaggcgtgaaaccagattttaccttcgtggcacaactgcctaaacgtaaagagttgcctaatgttcctggtggtattgattttgctgaaattacctcagtgaggcatggcgcggtaattcttaacgcgtttaatacgaacaaagtcatgaatttaaaagcaaccatttcaaaaagggctaattttgtgtatcatcgcattcctaagacaatgactcacagttttgtcatgtacaagcatacatttaaagaacctgcgtttaccgtaagcacgtttgtttcaaacgatgatttagatatgagttcattgaatatcaatatacgtggaccttactgcgactttttatatgccttaggcgtttataagatgcatgtttctatccaagatctgtttttgccggcgttcgtttgcaatagcaataattcagtggatttacagggactggaagatcaggatgttgtgagaaatagaaagaaaaaggtgtattggattactaactttccgtgcatgatttctaatgccaacaaagtgaatgtgggatggtttaaagcaggaacaggtattattcctcgggtgtctggaaaagaccttcaaaatgttttgcttcaggaattaaataacgttcgagagattccagggttagtctttgatatggatttgcatcaattgcttgttttgctggaacagcggaatctacatcagattccgtttctcgttaaacagtttcttatttttttacgtcttggcctgttaatgggttacggaaactctcggcgcaacaaggtgcatgatatcatgttacacttaatttcgaatggcctgtttgattttaataagaactccgtagcaaatacaaaaatcaaacacgggtgtgctttggttgggacgcggctcgccaacaatgttccgaaaatcattgctaggcagaagaaaatgaagctagatcacatgggacgaaatgctaattcgcttgccgtgttgcgttttatcgttaaaagtggggaacataaaaataaaactgttttcattaaactgttggaatatttagcggaaacctcaactgccataaatacgcggaatgaagtcgccagattacttctgactctgacgactaatatgaaaacatga

SEQ ID NO: 13520 - DNA, 54 bp, unidentified; identical to SEQ ID NO: 5498
  misc_feature 1..54: note = Synthetic
  source 1..54: mol_type = other DNA

SEQ ID NO: 13521 - DNA, 24 bp, unidentified
  source 1..24: mol_type = other DNA
  misc_feature 1..24: note = Synthetic
atgcaagttgtaaggcatgtttga

SEQ ID NO: 13522 - DNA, 558 bp, unidentified
  source 1..558: mol_type = other DNA
  misc_feature 1..558: note = Synthetic
atgtttgacaagattgtcatccccagacagtttcatcaccagcataaatgggacaagttgctttccaaatgcccccatccaggtgtaggtttctacatcataggtaataaaaaggcgctcagtgcgaggatgcgaaccgattgggaaaaagtggatctcctgccaccagttggaagaatggctgttgatgtgatgaaagtagaaatctcgtcggcggacagagcattcatgctgatgtttgtaaaagcgtgcgcagtgttcgcatcgttgcacgggctgtatctgttgaatgaggtgtacctggcggcctcgcaccagaaagcagatgggaaaatcaataccacttggcagctgccgttcgtcctcttcctcttctgctgcattgccactaccgtttggatcctcgaaagcgagaacggagagggtgacggtgcccctcgacctgcatgtccagatttcagcacgagaggggcggaaacgggaaatcagggcgtacagcctggagctgtccatggtatcagtcagagagaaaagcatgaactccgcgcaaggagctaa

SEQ ID NO: 13523 - DNA, 30 bp, unidentified; identical to SEQ ID NO: 5501
  misc_feature 1..30: note = Synthetic
  source 1..30: mol_type = other DNA

SEQ ID NO: 13524 - DNA, 30 bp, unidentified; identical to SEQ ID NO: 5501
  source 1..30: mol_type = other DNA
  misc_feature 1..30: note = Synthetic

SEQ ID NO: 13525 - DNA, 15 bp, unidentified
  misc_feature 1..15: note = Synthetic
  source 1..15: mol_type = other DNA
gtggcgatgctttag

SEQ ID NO: 13526 - DNA, 15 bp, unidentified
  source 1..15: mol_type = other DNA
  misc_feature 1..15: note = Synthetic
gtggcgatgctttag

SEQ ID NO: 13527 - DNA, 96 bp, unidentified; identical to SEQ ID NO: 5505
  misc_feature 1..96: note = Synthetic
  source 1..96: mol_type = other DNA

SEQ ID NO: 13528 - DNA, 96 bp, unidentified; identical to SEQ ID NO: 5505
  source 1..96: mol_type = other DNA
  misc_feature 1..96: note = Synthetic

SEQ ID NO: 13529 - DNA, 171 bp, unidentified
  misc_feature 1..171: note = Synthetic
  source 1..171: mol_type = other DNA
ctgttcgactgcgaggtcgtgcagactttggtctttctctttaagggtctccaaaacgccagggtggggaaaaccacctcactagacattattcgggagctaaccgcacaactaaaaagacaccgcctagacctggcccacccctcacagacgtcacacttgtacgcttga

SEQ ID NO: 13530 - DNA, 171 bp, unidentified; identical to SEQ ID NO: 13529
  source 1..171: mol_type = other DNA
  misc_feature 1..171: note = Synthetic

SEQ ID NO: 13531 - DNA, 279 bp, unidentified
  source 1..279: mol_type = other DNA
  misc_feature 1..279: note = Synthetic
atggagcaggagaactacaaaactgaatttttatatggcaagcttgcgacccccgtttgttcacaccatgcagcccttccgagttctggccgcattttctctggagagcgtgagcagggttttcacgcaggacctggctggcgctcaaccgatcccggccgcggaccacgacgggctcatcccgggacacgaggtcactcgctactgcaacgtggcgccgctgctggaacaggtgcgcaagcatttccactgtacggagcgcgtctatcctgtcagtaa

SEQ ID NO: 13532 - DNA, 204 bp, unidentified
  source 1..204: mol_type = other DNA
  misc_feature 1..204: note = Synthetic
atgccagaatatgcgctgcatccgtctatcctgcccacccccggctaccggggagtgacgtatcgcccgtcaggaacccgccgccgaacccgtcgccgccgccgctcccgtcgtgctctggcccccgtgtcggtgcgccgcgtaacacgccggggaaagacagttaccattcccaacccgcgctaccaccctagcatcctttaa

SEQ ID NO: 13533 - DNA, 18 bp, unidentified
  source 1..18: mol_type = other DNA
  misc_feature 1..18: note = Synthetic
gtggggagttcttgctga

SEQ ID NO: 13534 - DNA, 15 bp, unidentified
  source 1..15: mol_type = other DNA
  misc_feature 1..15: note = Synthetic
atgctttactcctag

SEQ ID NO: 13535 - DNA, 480 bp, unidentified
  misc_feature 1..480: note = Synthetic
  source 1..480: mol_type = other DNA
atggcatcacataaatggttactgcagatagtttttttaaaaactatcacaatcgcgtattgtcttcatctccaagacgacactccgttgttttttggagccaaaccgctatcggatgtgagtttgattataacggaaccgtgcgtgtcatcggtatatgaggcgtgggactatgcggcacccccggtatcaaacctcagcgaggcgctatcgggaatcgtggttaagacaaaatgtccagtaccggaagttatactttggtttaaagacaaacaaatggcgtactggacaaatccatacgtcaccttaaaggggctggcacaatctgttggtgaagaacataaaagcggggacatacgcgatgctttgttggatgccctttccggtgtatgggtagactctactccatcttccacaaatatcccggaaaatggatgtgtctggggagccgaccgtttgttccaacgcgtatgccaatga

SEQ ID NO: 13536 - DNA, 42 bp, unidentified; identical to SEQ ID NO: 5517
  source 1..42: mol_type = other DNA
  misc_feature 1..42: note = Synthetic

SEQ ID NO: 13537 - DNA, 21 bp, unidentified
  misc_feature 1..21: note = Synthetic
  source 1..21: mol_type = other DNA
atactgctccctctcgcttaa

SEQ ID NO: 13538 - DNA, 24 bp, unidentified
  misc_feature 1..24: note = Synthetic
  source 1..24: mol_type = other DNA
atgttgacttttaaagaaacataa

SEQ ID NO: 13539 - DNA, 42 bp, unidentified; identical to SEQ ID NO: 4532
  source 1..42: mol_type = other DNA
  misc_feature 1..42: note = Synthetic

SEQ ID NO: 13540 - DNA, 45 bp, unidentified; identical to SEQ ID NO: 5524
  source 1..45: mol_type = other DNA
  misc_feature 1..45: note = Synthetic

SEQ ID NO: 13541 - DNA, 1392 bp, unidentified
  source 1..1392: mol_type = other DNA
  misc_feature 1..1392: note = Synthetic
atgactaagaaattcaaaacaattattgaggctataggaggcaatataatagtcaattctacgatattgaaaaagttatctccttactttcgcacacatttacgtcaaaaatacacgaaaaataaagatccagttacgagggtttgtctagaccttgacattcacagtctaacttctatagttatttactcatatactggaaaggtatatatagatagtcataacgtcgtcaatttattacgtgcttctatattaacatctgtagaatttatcatctacacttgtataaactttatcctacgagattttagaaaggaatattgtgtcgagtgttacatgatgggtatagaatacggactatccaatctcttatgtcatactaaagactttattgccaaacactttttggaactggaagatgacatcatagacaattttgattatctatctatgaaacttattctagaaagcgacgaactaaatgttccagatgaggattatgtagttgattttgtcattaagtggtatatgaagcgaagaaatagattaggaaatttgctactccttatcaaaaatgtaatcaggtcaaattatctttcacccagaggtataaataatgtaaaatggatactagactgtaccaaaatatttcattgtgataaacgaccacgcaaatcatacaggtatccattcatagagtatcctatgaatatggatcaaattatagatatattccatatgtgtacaagtactcatgttggagaagtagtatatctcatcggtggatggatgaacaatgaaatacataaccatgctatagcgttaaattgtgtatcaaacaattggattccaattcctccgatgaatagtcccagactgtacgctagtggggtacctgctaacaataaattatacgtagtaggaggtctaccaaatcccacatctgtcgagcgttggttccatggggatacttcttgggttaatatgccgagtcttcttaaacctagatgtaatccagcaatcgcatctataaacaatgttatatacgtaataggaggacattctgaaacggatacaactacagaatatttgctacccgatcatgatcagtggcagtttggaccatccacttattatcctcattataaatcatgcgcgttagtgttcggtagaaggttattcttggttggtagaaatgctgaattttattgcgaatacagcaatacatggaatctgatagatgatcctatttatccgagggataatccagaattgatcatagtggataataaactgctattgataggaggattttatcgtggttcgtatatagatactatagaagtgtataataatcgcacttattcatggaatatatgggatggtaaataa

SEQ ID NO: 13542 - DNA, 24 bp, unidentified
  misc_feature 1..24: note = Synthetic
  source 1..24: mol_type = other DNA
atgttgacttttaaagaaacataa

SEQ ID NO: 13543 - DNA, 1443 bp, unidentified
  source 1..1443: mol_type = other DNA
  misc_feature 1..1443: note = Synthetic
atgccgatatttgttaatactgtgtactgtaagaatatattagcattgtctatgactaagaaattcaaaacaattattgatgctataggtggcaatataatagtcaattctacgatattgaaaaagttatctccttactttcgcacacatttacgtcaaaaatacacgaaaaataaagatccagttacaagggtttgtctagaccttgacattcacagtttaacttctatagttatttactcgtatactggaaaggtatatatagatagtcataacgtcgtcaatttattacgtgcttctatattaacctctgtagaatttatcatctacacttgtataaactttatcttacgagattttagaaaggaatattgtgtcgagtgttacatgatgggtatagaatacggactatccaatctcttatgtcatactaaaaactttattgccaaacactttttggaactggaagatgacatcatagacaattttgattatctatctatgaaacttattctagaaagcgatgaactaaatgttccagatgaggattatgtagttgattttgtcattaagtggtatataaagcgaagaaataaattaggaaatctgctactccttatcaaaaatgtaatcaggtcaaattatctttctcccagaggtataaataatgtaaaatggatactagactgtaccaaaatatttcattgtgataaacaaccacgcaaatcatacaagtatccattcatagagtatcctatgaacatggatcaaattatagatatattccatatgtgtacaagtactcatgttggagaagtagtatatctcatcggtggatggatgaacaatgaaatacataacaatgctatagcggtaaattatatatcaaacaattggattccaattcctccgatgaatagccccagactgtatgctagcgggatacccgctaacaataaattatacgtagtaggaggtctaccaaatcccacatctgttgagcgttggttccacggggatgctgcttgggttaatatgccgagtcttctgaaacctagatgtaatccagcagtggcatccataaacaatgttatatacgtaatgggaggacattctgaaactgatacaactacagaatatttgctacccaatcatgatcagtggcagtttggaccatccacttattatcctcattataaatcatgcgcgttagtgttcggtagaaggttattcttggttggtagaaatgcggaattttattgtgaatccagcaatacatggactctgatagatgatcctatttatccgagggataatccagaattgatcatagtggataataaactgctattgataggaggattttatcgtgaatcgtatatagatactatagaagtgtacaatcatcacacttattcatggaatatatgggatggtaaataa

SEQ ID NO: 13544 - DNA, 156 bp, unidentified; identical to SEQ ID NO: 5528
  source 1..156: mol_type = other DNA
  misc_feature 1..156: note = Synthetic

SEQ ID NO: 13545 - DNA, 156 bp, unidentified; identical to SEQ ID NO: 5529
  source 1..156: mol_type = other DNA
  misc_feature 1..156: note = Synthetic

SEQ ID NO: 13546 - DNA, 30 bp, unidentified; identical to SEQ ID NO: 5533
  source 1..30: mol_type = other DNA
  misc_feature 1..30: note = Synthetic

SEQ ID NO: 13547 - DNA, 480 bp, unidentified
  source 1..480: mol_type = other DNA
  misc_feature 1..480: note = Synthetic
atggatccggctttgagatcttatcaccaacggctccgtctgtatacccccgtagcgatgggcatcaatctcgccgccagctcacaacctttggatccggaaggcccgatcgccgttactcccaggcctccgattcgtccgtcttctggtaaggcgccccatcccgaggccccacgtcggtcgccgaactgggcgaccgccggcgaggtggacgtcggagacgagctaatcgcgatttccgacgaacgcggacccccccgacatgaccgcccgcccctcgccacgtcgaccgcgccctcgccacacccgcgacccccgggctacacggccgttgtctccccgatggccctccaggctgtcgacgccccctccctgtttgtcgcctggctggccgctcggtggctccggggggcttccggcctgggggccgtcctgtgtgggattgcgtggtatgtgacgtcaattgcccgaggcgcataa

SEQ ID NO: 13548 - DNA, 204 bp, unidentified
  misc_feature 1..204: note = Synthetic
  source 1..204: mol_type = other DNA
atgaccgagtggtcgcccgcactgcaggcctactccttcaagatcgcgatcttctctctgaacaagctgcgcggcttcaagaagaaggtggtcatgttcgagaccaagatcgtcatggacgcggacgacaacatcctggggctgctcttccgcgaccgcatcgggacctaccgcgtcaacgtcttcatggccttccaggactag

SEQ ID NO: 13549 - DNA, 60 bp, unidentified
  misc_feature 1..60: note = Synthetic
  source 1..60: mol_type = other DNA
atgtcagaagagattttttttacaaagcaatttcccatgattcctattgtcttatattaa

SEQ ID NO: 13550 - DNA, 213 bp, unidentified
  source 1..213: mol_type = other DNA
  misc_feature 1..213: note = Synthetic
atgacgcccgacaccgatcacgaagaatcaacggcaggcgcgacgtccgtaccggaggtcctgggtgcgcgctacgaacccgcacacctggccgcgagcgacctattaaactggtacatcgtccccgtaagccaggcgcagcaggacatcttgtcttcgatcgacccgcccgccggctcgacatcggtgtccctgccgccggcctcgccatga

SEQ ID NO: 13551 - DNA, 1191 bp, unidentified
  misc_feature 1..1191: note = Synthetic
  source 1..1191: mol_type = other DNA
gtgctatttctctgtcgctgtgagcccgtaatggaaacgacaaacagccggcgtgtttcttcggcgcaacggcagattttggctacggctacggtgcgatttatcgaaggccttcatgagccggctcaagattctatgatgtgtggggatgacgagctgcagtctcaggagaggatgaagaaacgtcaacgtctctataacaagtccaagagagatctcgtcgatctcttgcgcgtctatacgtgcctgaatagcgtccgaatgtttacgttcgtcaatttcggcaggcgaattcccttggcttggcctgaaggatacgagctggttattaacaactgtagagacgagaatgaatatgccgatgaaaagttgggcgaactggccgatctagtgtgttgccgggagcgcctcgtcgtactggggtacgtgaagaaaaggggggagatcggatcggagccggcttactggtttctgaaaggtgacatagtcgttctgctcggcggtgccggtcgcgtttatgcgcatacttggttattgccgcagcaactgtgccgcgtcggtgacaccattgacgattttcttcgtaaaggtctgaagaggttctattacgcacatcagctggtatcatcgctgcagtttgtggtggaggacaccgaggtggacggcgtctgcagttgtcgggacgtgctgtgctttcgagaccggcacataggtcgttctttcgccctgaggtggcccaagaacgagactctgctctttcatcggcggcgggattcttttgtattcgtcaggtgcgacgaggcacggcgcaggctcgcggaaatgtgtttcttcggcagcttcggctacaagtactttgcggacgccggtcggatttctctctacgtggccgacgacggacggattttcggattcaacgacaacgacgaagacggacggccgcgctttgtggcggaaaattttcagcagtttagacggataggagtcattcagtattataagagctacgttttccgtagggagcagcccgaatgggcgcttcttccgacttgtcatctctcgcgaatgttttatcagaaaacttggaggcaggccgacgaagatctgctgtttgtaaaggctagaaacgatgagcgtcaggaatttccggacgccggcactaggagtgccgtgcacgacgtagttcgatag

SEQ ID NO: 13552 - DNA, 687 bp, unidentified
  misc_feature 1..687: note = Synthetic
  source 1..687: mol_type = other DNA
atgccggggatgaacgcgctgcgccactgccacggctgcaagcacaacgggctcgtgctggagcagggctacgagttctgcatcttctgccaggcggtcttccagcactgcgccaaggtggccaagcgctccaacttccacgtctccaacaagctcatccacctgcgcaacgtgctgcgccgcctgctctcgaagcagtgctcgggagacatcatcgcggagctgcgcgcgctcatggcgcgcaaccagctggcgcccgcggacatcgacgccaacttcgtctcgagcttcctcaaggcgcacgagaagatcaacaagaaggactacaagctggtcttcgagatcatcaaccagatcaaggacgagcgcctggagctggacacgcagaagattaacgaggtcatcgagatcttcaagcacctggtcttcttttgccaggaaaacacgccctccaagacaatcaactactccttcttcttggacaagatcttcactctgacgtcggtcacgcgcaacctgcgtccgcagacggtcaagaactacaccaagaacaacagcaaccagctcatctgggagaactttctggtttacatgcgcggcaagaagctgaacacgtgcgtgcacgactacggacacgagtacgtcttcgtggaccacggcttcgcggcgtgctcgctggagctctga

SEQ ID NO: 13553 - DNA, 30 bp, unidentified; identical to SEQ ID NO: 5549
  misc_feature 1..30: note = Synthetic
  source 1..30: mol_type = other DNA

SEQ ID NO: 13554 - DNA, 30 bp, unidentified; identical to SEQ ID NO: 5549
  source 1..30: mol_type = other DNA
  misc_feature 1..30: note = Synthetic

SEQ ID NO: 13555 - DNA, 42 bp, unidentified; identical to SEQ ID NO: 2370
  misc_feature 1..42: note = Synthetic
  source 1..42: mol_type = other DNA

SEQ ID NO: 13556 - DNA, 42 bp, unidentified; identical to SEQ ID NO: 2370
  misc_feature 1..42: note = Synthetic
  source 1..42: mol_type = other DNA

SEQ ID NO: 13557 - DNA, 1854 bp, unidentified
  source 1..1854: mol_type = other DNA
  misc_feature 1..1854: note = Synthetic
atggactatttcctgccgctgcgcaacatctggaaccgcgtccgcgagttcccgcgcgcctccaccaccgccgccggcatcacctggatgtcccgctacctctacggctaccaccgcctcatgctcgaggacctggccccgggcgcgccggccacccagcgctggccgctctaccgccagccgccgccgcacttcctagtcggctaccagtacctcgtgcgcacctgcaatgactacgtcttcgactcgcgcgccttctcgcggctcaggtactccgaggtcgtgcaacccggcctgcagaccgtcaactggtcgctcatggccaactgcacctacaccatcaacaccggggcctaccaccgctttgtcgacatggacgacttccaggacaccctcacccgcgtgcaacaggccatcctcgccgagcgcgtcgtcgccgacctggcgctcgtgcagccgctcaggggcgtcggggtcacccgcatggaagactccgcctccgccagtgatgacatcgagaggctcatgcatgactactacaagaacctgagccggtgtcagggccaggcctggggcatggccgagcggctccgcatccagcaagcgggacccaaggacctggtcctcctcgccaccatccgccgcctcaaaaacgcctacttcaattacatcatcagcaaccgcaattctaacagcgtccacagggctgctacgtgtttgagcttaccttgcgactgcgattggctagacgctttcctcgaaagattctccgatccggtcgatctcgacgcgctcacgtcccctacaccgcaattgataagatgcatcgtcagcgccctatcgctgcccaacggggacccgccccattaccgggagatgaccggcggcgtcttcacgctgcgtcctcgcgaacggggtcgcgccgtcaccgaaaccatgcgtcgccgccgcggggagatgatcgagcgcttcgtcgaccgtctcccggtgcgtcgccgtcgtcgtcgggccccgccaccaccaccgcccccagaggaagaaatagaagaagaggtcgtcatggaagaagaggaagaagaggaggcccccggggatttcgagcgcgaggtgcgcgccaccatcgccgagctcatccggctcctggaagacgagctcacggtctcggcccgcaatgcccagtttttcaacttcgccgtggatttctacgaggccatggaaaggctggaggccatcggcgacatcagcgagatgcccctgcgccgctggatcatgtacttcttcgtcaccgagcacatcgccaccaccctcaactacctcttccagcgcctgcgcaactacgccgtcttcacgcggcacgtggagctcaacctcgcgcaggtggtcatgcgcgcacgcgacgccgacggggacgtggtctacagccgcgtctggaacgagagcggcctgggcgccttctcgcagctcatgggccgcatctccaatgacctcgccgccaccgtggagcgcgcgggccgcggcgatctccaggaggaggagatcgaacagttcatgaccgagatcgcctaccaggacaactcgggcgacgtgcaagagatcctgcgtcaggccgccgtcaatgacgcagagattgattctgttgaactgtctttcaggttcaaagtcacggggcccgtggtcttcacgcagaggcggcagatccaggatgtcaaccgccgcgtcgtcgcgcacgccagcgctctcagggcgcagcaccgggacctgcccgagcgccacgccgacgtgcctctgccgcccctgcccgcggggccagaaccgccgctgccgccgggagcacgcccgcgacaccgcttctaa

SEQ ID NO: 13558 - DNA, 237 bp, unidentified
  source 1..237: mol_type = other DNA
  misc_feature 1..237: note = Synthetic
atgactgcgcgcgtctcaccggccagaccgtgccgaccatggactatttcctgccgctgcgcaacatctggaaccgcgtccgcgagttcccgcgcgcctccaccaccgccgccggcatcacctggatgtcccgctacctctacggctaccaccgcctcatgctcgaggacctggccccgggcgcgccggccacccagcgctggccgctctaccgccagccgccgccgcacttcctag

SEQ ID NO: 13559 - DNA, 120 bp, unidentified; identical to SEQ ID NO: 5550
  misc_feature 1..120: note = Synthetic
  source 1..120: mol_type = other DNA

SEQ ID NO: 13560 - DNA, 114 bp, unidentified; identical to SEQ ID NO: 5551
  misc_feature 1..114: note = Synthetic
  source 1..114: mol_type = other DNA

SEQ ID NO: 13561 - DNA, 1749 bp, unidentified
  misc_feature 1..1749: note = Synthetic
  source 1..1749: mol_type = other DNA
atggagccctccaaactcttcacaatgtcagacaatgccacctttgcacctgggcctgttatcaatgcggctgacaagaagacattccgaacctgcttccgaatattggtactgtctgtacaagctgttacccttatattagttattgtcactttaggtgagcttgtgaggatgatcaatgatcaaggcttgagcaatcagttgtcttcaattgcagacaagataagagagtcagctactatgattgcatctgctgtgggagtaatgaatcaagttattcacggagtaacggtatccttacccctacaaattgagggaaaccaaaatcaattgttatccacgcttgccacaatctgtacaggcaaaaaacaagtctcaaactgctctacaaacatccccttagttaatgaccttaggtttataaatgggatcaataaattcatcattgaagattatgcaactcatgatttctctatcggccatccactcaacatgcctagctttatcccaactgcaacttcacccaatggttgcacaagaattccatccttttctctaggtaagacacactggtgctacacacataatgtaattaatgccaactgcaaggatcatacttcgtccaaccaatatatttccatggggatacttgttcagaccgcgtcagggtatcctatgttcaaaaccttaaagatccaatatctcagtgatggcctgaatcggaaaagctgctcaattgcaacagtccctgatggatgcgcaatgtactgttatgtctcaactcaacttgaaaccgacgactatgcggggtccagcccacctacccagaaacttaccctgttattctataatgataccgtcacagaaaggacaatatctccaactggtctcgaagggaactgggccactttggttccaggagtggggagtggaatatatttcgagaataaattgatctttcctgcatatgggggtgtcttgcccaatagttcactcggagttaaatcagcaagagaatttttccggcctgttaatccatataatccatgttcaggaccacaacaagatttagatcagcgtgctttgagatcatacttcccaagttacttctctaatcgaagagtacagagtgcatttcttgtctgtgcctggaatcagatcctagttacaaattgcgagctagttgtcccctcaaacaatcagacactgatgggtgcagaaggaagagttttattgatcaataatcgactattatattatcagagaagtaccagctggtggccgtatgaactcctctatgagatatcattcacatttacaaactctggtcaatcatctgtgaatatgtcctggatacctatatattcattcactcgtcctggttcaggcaactgcagtggtgaaaatgtgtgcccaactgcttgtgtgtcaggggtttatcttgatccctggccattaactccatatagccaccaatcaggcattaacagaaatttctatttcacaggtgcactattaaattcaagcacaactagagtaaatcctaccctttatgtctctgcccttaataatcttaaagtactagccccatatggtaatcagggactgtttgcctcgtacactacaaccacctgctttcaagataccggtgatgctagtgtgtattgtgtttatattatggaactagcatcgaatatcgttggagaattccaaattctacctgtgctaaccagattgaccatcacttga

SEQ ID NO: 13562 - DNA, 39 bp, unidentified; identical to SEQ ID NO: 3373
  source 1..39: mol_type = other DNA
  misc_feature 1..39: note = Synthetic

SEQ ID NO: 13563 - DNA, 42 bp, unidentified; identical to SEQ ID NO: 5561
  misc_feature 1..42: note = Synthetic
  source 1..42: mol_type = other DNA

SEQ ID NO: 13564 - DNA, 888 bp, unidentified
  source 1..888: mol_type = other DNA
  misc_feature 1..888: note = Synthetic
atgtataaaaaggcagaggcatcattttggacagtggaagaagtagatatatctaaagatatcaatgattggaataaactaacaccagacgaaaaatattttataaaacatgtattggcgttttttgcagccagtgacggaatagtgaatgaaaatttggcggaacgattttgtacagaagtacagattaccgaggctagatgtttctacggatttcagatggccattgaaaacattcattcggaaatgtatagtcttttgatcgatacttatgttaaagatagtaatgaaaaaaactatctctttaatgccatagaaacgatgccttgtgtaaaaaagaaggccgattgggctcaaaagtggatacatgacagcgccggttatggagagagacttattgcctttgctgcagtagaaggaatcttcttttctggatcattcgcttccatattttggcttaaaaagcgtggcctaatgcccggactcacgttttccaacgaactaattagtagagacgagggtctgcactgcgatttcgcatgtttgatgtttaaacatttattgcatccaccgagtgaagaaaccgttagatctattataacagatgcggtatccattgaacaagaatttcttactgcggctcttccagttaaacttataggaatgaattgtgaaatgatgaaaacatatatagaattcgtcgcggatagattgatttctgaattgggatttaaaaaaatttataatgttaccaatccgtttgatttcatggaaaatatatcattggaaggaaaaactaattttttcgaaaaacgtgtgggtgaataccaaaaaatgggagttatgtctcaagaagataatcatttttctttagatgttgacttttaa

SEQ ID NO: 13565 - DNA, 288 bp, unidentified
  misc_feature 1..288: note = Synthetic
  source 1..288: mol_type = other DNA
atgggcaactgcaatcgaactcagaaacccagttcgtcttctaacaacctcgagaagccaccacaagctgcagaatttagaagaacggcagagcccagtctatatgggaggtacaattgcaaatgttgttggtttgctgacaaaaacttaatcacctgtagtgaccattatctttgtctaagatgtcaccaaatcatgctgagaaactcagagctgtgcaacatctgctggaagcccctgccaacatccataagagtcccgctagaggcaagtgctccggatctgtaa

SEQ ID NO: 13566 - DNA, 231 bp, unidentified
  misc_feature 1..231: note = Synthetic
  source 1..231: mol_type = other DNA
gtgcgcacgctgcagttcaactttacacccagcaccttcttctcgcccaccgcgctgaactccaacgtctccaggggcaaggacaagctggcggtgcgcgtgaccaccgcgcacatggaggcgcacaacccgctcatgtacgtaccgcgccagatggtcgtggtgtgcaacgaggtgtaccggctcagctacgacgcggggatcgtggccgagaaggtgactgcgcagtag

SEQ ID NO: 13567 - DNA, 48 bp, unidentified; identical to SEQ ID NO: 5566
  source 1..48: mol_type = other DNA
  misc_feature 1..48: note = Synthetic

SEQ ID NO: 13568 - DNA, 36 bp, unidentified; identical to SEQ ID NO: 5567
  misc_feature 1..36: note = Synthetic
  source 1..36: mol_type = other DNA

SEQ ID NO: 13569 - DNA, 27 bp, unidentified
  misc_feature 1..27: note = Synthetic
  source 1..27: mol_type = other DNA
atgatctttttctcccggatgaattag

SEQ ID NO: 13570 - DNA, 87 bp, unidentified; identical to SEQ ID NO: 5569
  source 1..87: mol_type = other DNA
  misc_feature 1..87: note = Synthetic

SEQ ID NO: 13571 - DNA, 291 bp, unidentified
  source 1..291: mol_type = other DNA
  misc_feature 1..291: note = Synthetic
atgggcctcgcgttctccggggcgcggccctgctgctgccgacacaacgtcatcaccaccgacggcggggaggtcgtctcgctgaccgcccacgaatttgacgtcgtggacatcgagtccgaagaagagggtaacttctacgtgccccccgacgtgcgcgtggtcacccgggcgccggggccccagtaccggcgcgcatcggaccccccatcgcgtcacaccagacggcgggaccccgacgtggcccgccctcctgccacgctcacgcccccactctctgatagcgaataa

SEQ ID NO: 13572 - DNA, 75 bp, unidentified; identical to SEQ ID NO: 2440
  misc_feature 1..75: note = Synthetic
  source 1..75: mol_type = other DNA

SEQ ID NO: 13573 - DNA, 63 bp, unidentified; identical to SEQ ID NO: 5576
  source 1..63: mol_type = other DNA
  misc_feature 1..63: note = Synthetic

SEQ ID NO: 13574 - DNA, 999 bp, unidentified
  source 1..999: mol_type = other DNA
  misc_feature 1..999: note = Synthetic
ataactgaaaaaaaaattactactattgttaatttagttatggaacctatccttgcaccaaatccaaatagatttgttattttcccaatccaatatcatgacatctggaatatgtataaaaaggcagaggcatcattttggacagtggaagaagtggatatatctaaagatatcaatgattggaataaactaacaccagacgaaaaatattttataaaacatgtattggcgttttttgcagccagtgatggaatagtgaatgaaaatttagcagaacgattttgtacagaagtgcagattaccgaggctagatgtttctacggatttcagatggccattgaaaacattcattcggaaatgtatagtcttttgatcgatacttatgttaaagatagtaatgaaaaaaactatctctttaatgccatagaaacgatgccttgtgtaaaaaagaaggccgattgggctcaaaagtggatacatgacagcgccggttatggagagagacttattgcctttgctgcagtagaaggaatcttcttttccggatcattcgcttccatattttggcttaaaaagcgtggcctaatgcccggactcacgttttctaacgaattaattagtagagacgagggtctgcactgcgatttcgcatgtttgatgtttaaacatttattacatccaccgagtgaagaaaccgttagatttattataacaaatgcggtatccattgaacaagaatttcttactgtggctcttccagttaaactcataggaatgaattgtgaaatgatgaaaacatatatagaattcgtcgcagatagattgatttctgaattgggatttaaaaaaatttacaatgttaccaatccgtttgatttcatggaaaatatatcattggaaggaaaaactaattttttcgaaaaacgtgtgggtgaataccaaaaaatgggagttatgtctcaagaagacaatcatttttctttagatgttgacttttaa

SEQ ID NO: 13575 - DNA, 99 bp, unidentified
  source 1..99: mol_type = other DNA
  misc_feature 1..99: note = Synthetic
atcatgacatctggaatatgtataaaaaggcagaggcatcattttggacagtggaagaagtggatatatctaaagatatcaatgattggaataaactaa

SEQ ID NO: 13576 - DNA, 15 bp, unidentified
  source 1..15: mol_type = other DNA
  misc_feature 1..15: note = Synthetic
atgtgcagttcctga

SEQ ID NO: 13577 - DNA, 201 bp, unidentified
  source 1..201: mol_type = other DNA
  misc_feature 1..201: note = Synthetic
atggtcaacaaaacggccggtaacactaacacattcatccactttgtcgaagatagtgagctggtggagaatcccgcatactttaggcgcagcgatcaccgagcctttatgatcgtcatattgacgcaagtggtttttgtagtgttcattattaacgcctcttttatctggagctggacgtttaggcgtcacaagaggtga

SEQ ID NO: 13578 - DNA, 648 bp, unidentified; identical to SEQ ID NO: 12303
  misc_feature 1..648: note = Synthetic
  source 1..648: mol_type = other DNA

SEQ ID NO: 13579 - DNA, 90 bp, unidentified; identical to SEQ ID NO: 5585
  source 1..90: mol_type = other DNA
  misc_feature 1..90: note = Synthetic

SEQ ID NO: 13580 - DNA, 225 bp, unidentified
  misc_feature 1..225: note = Synthetic
  source 1..225: mol_type = other DNA
gtgcagtccgaggccctgctccttagatacaggaacaccctgactgggcaactgctgttcgagtgcaagctctacaacgaaggttacatcgccttgtcttattccggctcaggacccctcaccttcccgaccgatggcatctttgaggtcgtcagttgggttcctcgcctttaccaattggcctctgtgggaagtttggcaacaggccgaatgctcaaacaataa

SEQ ID NO: 13581 - DNA, 225 bp, unidentified; identical to SEQ ID NO: 13580
  misc_feature 1..225: note = Synthetic
  source 1..225: mol_type = other DNA

SEQ ID NO: 13582 - DNA, 240 bp, unidentified
  source 1..240: mol_type = other DNA
  misc_feature 1..240: note = Synthetic
acgaaggttacatcgccttgtcttattccggctcaggacccctcaccttcccgaccgatggcatctttgaggtcgtcagttgggttcctcgcctttaccaattggcctctgtgggaagtttggcaacaggccgaatgctcaaacaataatggctggtgctctttttggagcgattggaggtggcctgatgggcataattggcaattccatctcaaatgttcaaaaccttcaggcaaataa

SEQ ID NO: 13583 - DNA, 240 bp, unidentified; identical to SEQ ID NO: 13582
  misc_feature 1..240: note = Synthetic
  source 1..240: mol_type = other DNA

SEQ ID NO: 13584 - DNA, 879 bp, unidentified
  source 1..879: mol_type = other DNA
  misc_feature 1..879: note = Synthetic
acggactgtttcatcgacgcctaccttagaccgacagcggtcgtaagcggcagcatgggcgacaccgcctcggtttccgaacaccatgagtcgccgacggtcaccatcgtgccgctccatcgcagccacgcgctggtggccgaacagcagctcttccaatggttgaaacgctttaagctgctcatggaggtctatcacgggctcgtgtggcagctggcttgtaccctcacggtctgcttgctggcttggctcgccttccccgatgtgcagggacagtgcgccaacggcatagtgccagccctatcctccatcgtacccgtgtccacgctggctatgctacgcggtttcgccgagtttcgcccacacaccaccaattttgctcatctcacagtggcgtgcttgctgatcaacaccggcatcaccgtgtgcacgggcttttgcggagaaaggcgcgtcatcggtctgtcgtttgccctggtgatggtctttttcgttctctgcagcggtctcacctacctggccggcaacaatcccacgcgctggaaagtcatcgggattggctacggctggtccgtcatcgtcttttacctattgctttacttttcgcccgtgctgtgggtcagcaagatctacagcggactctacgtcctggtggtgaccgccgcttcggccgtgcttatttacgagaccctggatctcatctaccagcgtggaacgttgtctaaaaacagcgtctgtgtcagcgtcgtgttgtacaccatcgtcatgagtctcctaaacatgagcgtcgccatctttagcggccacgtctgggtgcagcagtacgccgagaaacacggcggacgcatcgacggcgtgagtctcctcagcttgttgtaa

SEQ ID NO: 13585 - DNA, 81 bp, unidentified; identical to SEQ ID NO: 5523
  source 1..81: mol_type = other DNA
  misc_feature 1..81: note = Synthetic

SEQ ID NO: 13586 - DNA, 129 bp, unidentified; identical to SEQ ID NO: 5244
  source 1..129: mol_type = other DNA
  misc_feature 1..129: note = Synthetic

SEQ ID NO: 13587 - DNA, 63 bp, unidentified; identical to SEQ ID NO: 5245
  misc_feature 1..63: note = Synthetic
  source 1..63: mol_type = other DNA

SEQ ID NO: 13588 - DNA, 24 bp, unidentified
  source 1..24: mol_type = other DNA
  misc_feature 1..24: note = Synthetic
ttggagtcaggaactaaagaatag

SEQ ID NO: 13589 - DNA, 57 bp, unidentified; identical to SEQ ID NO: 5590
  misc_feature 1..57: note = Synthetic
  source 1..57: mol_type = other DNA

SEQ ID NO: 13590 - DNA, 1215 bp, unidentified
  source 1..1215: mol_type = other DNA
  misc_feature 1..1215: note = Synthetic
atgctcaagtgtaagcagcccggggcccgcttcattcacggggccgtgcacctgccatcgggacagattgtcttccacaccatccacagccccactcttgcctcggcgctgggactgcctggggaaaatgtacccatcccggccctcttccgtgcctcgggcctcaacgtccgtgagagcctacccatgaccaacatgagggcaccgatcatctcgctggctcgcctcatcctggcccccaacccctatatcctagagggacagctgacggtgggcatgacacaggacaacggcattcccgtgctttttgccaggcctgtcattgaggtaaaaagcgggcctgagtccaacattaaagcctcctcgcaacttatgatagcagaagactcctgcctgaatcagatcgcccccttttccgcatcagaacaccccgccttctccatggttgagtccgtaaaacgagtccgggtcgatgagggagcaaacacccggcgcaccatccgggatattctggagatccccgtgactgtgctctcatccctgcaactgtctcccaccaagtccatcctgaaaaagacaccggagcccccacctccggagccccaagccaccttcgatgccaccccctatgcccgcatcttttacgacatcgggcgacaggtgcccaagctgggcaatgcccccgccgcgcaggtcagcaacgtgctcatcgccaaccgctcccacaactctctaaggctggtgcccaatccggacttgctgcctctccagcatttgtacctcaagcacgtagtgctaaagagtctgaatctggagaatatagtgcaggactttgaggccatcttcacctcccagtctgataccatcagtgaggctgaaaccaaggcctttgagaagctggtagagcaagccaaaaacaccgtagagaacatagtcttttgcctcaacagcatctgttccacctctacactcccagatgtcgtccccgatgtcaataacccaaacattagcctggctctagagaagtattttctcatgttccctccctcaggcaccattatgagaaatgtcagattcgccacccccatcgtccggctcttgtgccaaggggctgagcttggcaccatggcacagtttctaggaaagtacatcaaggtcaagaaggaaaccggaatgtacacactggtcaagctttattacctgctgcgcatctaa

SEQ ID NO: 13591 - DNA, 90 bp, unidentified; identical to SEQ ID NO: 5594
  misc_feature 1..90: note = Synthetic
  source 1..90: mol_type = other DNA

SEQ ID NO: 13592 - DNA, 162 bp, unidentified
  misc_feature 1..162: note = Synthetic
  source 1..162: mol_type = other DNA
attgttcccggggggcttctggctaagcagtttggtgataatatgagagagtatctacaactagaacttagagaagaacttagagccaagggcatgtcaattgatgatgccattcttaatttgctacaggtgacacaggagcaagatattttgtcattatga

SEQ ID NO: 13593 - DNA, 30 bp, unidentified; identical to SEQ ID NO: 5597
  misc_feature 1..30: note = Synthetic
  source 1..30: mol_type = other DNA

SEQ ID NO: 13594 - DNA, 57 bp, unidentified; identical to SEQ ID NO: 5603
  source 1..57: mol_type = other DNA
  misc_feature 1..57: note = Synthetic

SEQ ID NO: 13595 - DNA, 57 bp, unidentified; identical to SEQ ID NO: 5603
  source 1..57: mol_type = other DNA
  misc_feature 1..57: note = Synthetic

SEQ ID NO: 13596 - DNA, 1215 bp, unidentified
  misc_feature 1..1215: note = Synthetic
  source 1..1215: mol_type = other DNA
atgctcaagtgtaagcagcccggggcccgcttcattcacggggccgtgcacctgccatcgggacagattgtcttccacaccatccacagccccactcttgcctcggcgctgggactgcctggggaaaatgtacccatcccggccctcttccgtgcctcgggcctcaacgtccgtgagagcctacccatgaccaacatgagggcaccgatcatctcgctggctcgcctcatcctggcccccaacccctatatcctagagggacagctgacggtgggcatgacacaggacaacggcattcccgtgctttttgccaggcctgtcattgaggtaaaaagcgggcctgagtccaacattaaagcctcctcgcaacttatgatagcagaagactcctgcctgaatcagatcgcccccttttccgcatcagagcaccccgccttctccatggttgagtccgtaaaacgagtccgggtcgatgagggagcaaacacccggcgcaccatccgggatattctggagatccccgtgactgtgctctcatccctgcaactgtctcccaccaagtccatcctgaaaaaggcaccggagcccccacctccggagccccaagccaccttcgatgccaccccctatgcccgcatcttttacgacatcgggcgacaggtgcccaagctgggcaatgcccccgccgcgcaggtcagcaacgtgctcatcgccaaccgctcccacaactctctaaggctggtgcccaatccggacttgctgcctctccagcatttgtacctcaagcacgtagtgctaaagagtctgaatctggagaatatagtgcaggactttgaggccatcttcacctccccgtctgataccatcagtgaggctgaaaccaaggcctttgagaagctggtggagcaagccaaaaacaccgtagagaacatagtcttttgcctcaacagcatctgttccacctctacactcccagatgtcgtccccgatgtcaataacccaaacattagcctggctctagagaagtattttctcatgttccctccctcaggcaccattatgagaaatgtcagattcgccacccccatcgtccggctcttgtgccaaggggctgagcttggcaccatggcacagtttctaggaaagtacatcaaggtcaagaaggaaactggaatgtacacactggtcaagctttattacctgctgcgcatctaa

SEQ ID NO: 13597 - DNA, 1215 bp, unidentified
  source 1..1215: mol_type = other DNA
  misc_feature 1..1215: note = Synthetic
atgctcaagtgtaagcagcccggggcccgcttcattcacggggccgtgcacctgccatcgggacagattgtcttccacaccatccacagccccactcttgcctcggcgctgggactgcctggggaaaatgtacccatcccggccctcttccgtgcctcgggcctcaacgtccgtgagagcctgcccatgaccaacatgagagcaccgatcatctcgctggctcgcctcatcctggcccccaacccctatatcctagagggacagctgacggtgggcatgacacaggacaacggcattcccgtgctttttgccaggcctgtcattgaggtaaaaagcgggcctgagtccaacattaaagcctcctcgcaacttatgatagcagaagactcctgcctgaatcagatcgcccccttttccgcatcagagcaccccgccttctccatggttgagtccgtaaaacgagtccgggtcgatgagggagcaaacacccggcgcaccatccgggatattctggagatccccgtgactgtgctctcatccctgcaactgtctcccaccaagtccatcctgaaaaaggcaccggagcccccacctccggagccccaagccaccttcgatgccgccccctatgcccgcatcttttacgacatcgggcgacaggtgcccaagctgggcaatgcccccgccgcgcaggtcagcaacgtgctcatcgccaaccgctcccacaactctctaaggctggtgcccaatccggacttgctgcctctccagcatttgtacctcaagcacgtagtgctaaagagtctgaatctggagaatatagtgcaggactttgaggccatcttcacctccccgtctgataccatcagtgaggctgaaaccaaggcctttgagaagctggtggagcaagccaaaaacaccgtagagaacatagtcttttgcctcaacagcatctgttccacctctacactcccagatgtcgtccccgatgtcaataacccaaacattagcctggctctagagaagtattttctcatgttccctccctcaggcaccattatgagaaatgtcagattcgccacccccatcgtccggctcttgtgccaaggggctgagcttggcaccatggcacagtttctaggaaagtacatcaaggtcaagaaggaaactggaatgtacacactggtcaagctttattacctgctgcgcatctaa

SEQ ID NO: 13598 - DNA, 246 bp, unidentified
  misc_feature 1..246: note = Synthetic
  source 1..246: mol_type = other DNA
atgttccagaacaatgttgttaatataccagctaatcagatggcagtcttcaatgtggaaactgcgggcaacacatttcaaattgctatcatgccaaatggttattgtgttaccaatgcagctgttggtactcaccagctcctggattacgagacaagttttaggtttgttggacttttcccccaaagcactagtcttcaagggcccaatgggaacgctggacgggccgtcagattccttgaataa

SEQ ID NO: 13599 - DNA, 327 bp, unidentified
  misc_feature 1..327: note = Synthetic
  source 1..327: mol_type = other DNA
atgttgttaatataccagctaatcagatggcagtcttcaatgtggaaactgcgggcaacacatttcaaattgctatcatgccaaatggttattgtgttaccaatgcagctgttggtactcaccagctcctggattacgagacaagttttaggtttgttggacttttcccccaaagcactagtcttcaagggcccaatgggaacgctggacgggccgtcagattccttgaataatgtcttggttcacaggagcagctcttgcagccgggtccctcgtggacatggctggtactgtatcatccattgtggcacaacaccgccaaattga

SEQ ID NO: 13600 - DNA, 210 bp, unidentified; identical to SEQ ID NO: 10359
  source 1..210: mol_type = other DNA
  misc_feature 1..210: note = Synthetic

SEQ ID NO: 13601 - DNA, 81 bp, unidentified; identical to SEQ ID NO: 5616
  misc_feature 1..81: note = Synthetic
  source 1..81: mol_type = other DNA

SEQ ID NO: 13602 - DNA, 243 bp, unidentified
  misc_feature 1..243: note = Synthetic
  source 1..243: mol_type = other DNA
atgctgtttccctgcaaaacgtgcgagagaatgaatcagaatttcaacatttgcttcacacacggggtcagagactgctcagagtgtttccccggcgtgtcagaatctcaaccggtcgtcagaaagaggacgtatcggaaactctgtgcgattcatcatctgctggggcgggctcccgagattgcttgctcggcctgcgatctggtcaacgtggacctggatgactgtgtttctgagcaataa

SEQ ID NO: 13603 - DNA, 909 bp, unidentified
  misc_feature 1..909: note = Synthetic
  source 1..909: mol_type = other DNA
atggcttctgtagcaggtaacgctagtaatatctcaccacagcccccgtcgggcgttccaaccggaggggaatttgtactgatacctaccgcgtattattcacagctgttaaccgggcagactaaaaatccgcaggtatcaattggagctccaaataacggacagtatatcgtcgggccatatggatctccacacccgcctgccttcccacctaatacagggggttatggttgccctccgggacacttcgggggaccgtacgggtttccgggatatccaccacccaatcgtttggaaatgcaaatgtccgcatttatgaacgcattggccgccgaacggggtattgacttgcagaccccgtgtgtaaattttccagacaaaaccgatgtccgtcgtccaggaaaacgggatttcaagagcatggatcaaagggaattggattctttttatagtggggagtctcaaatggacggagagtttccctcaaatatatattttcccggtgaaccaacgtatataacgcatcggagacgtcgagtttctccatcatattggcagaggagacacagagtttctaatggtcagcacgaagagcttgctggggttgtggcaaaactgcaacaggaggttacagagctaaaatcacaaaatgggacacaaatgcctttgtcgcaccatacaaatataccagaggggacacgggatcctcgaatatcgattttattaaaacagcttcaaagcgtttcgggtctatgctcatcccaaaatacaacaagcaccccacatacagatacagttggacaagatgtaaatgcagtggaggcgagttccaaggcccctttaatacaggggtccacggcagacgacgccgatatgtttgcaaatcagatgatggtggggcggtgttaa

SEQ ID NO: 13604 - DNA, 36 bp, unidentified; identical to SEQ ID NO: 5621
  source 1..36: mol_type = other DNA
  misc_feature 1..36: note = Synthetic

SEQ ID NO: 13605 - DNA, 801 bp, unidentified
  misc_feature 1..801: note = Synthetic
  source 1..801: mol_type = other DNA
acgcagcgcaccatgagaagagaaaaagggtttcaagtacccaccgatggcacggtcatctacgtgccccccgggatccaagagacccggctggcgacccgcagtctggcttgggtcgactgttgccgcgtggcgctgcacacctatggcgccgtgggttggcagctggccggcttgaccgcgttgttgagcgccttctgctacgcggcgcccgcgacgtggtttcaccattcccgtctgtgtctcacggagtcctcgcccagcctcgtctttgtcatacccgtcacgtcggtgatcttcattcactgttacgaaacatcgcatcccagcaatatcggcgttctgctcttttacacgctgcttcacgtgccgccgttgatcgtaatatgtctctgcctggacggtacgttggtcatctcggccgcgttgttcaccttactggcctttctcagctgcaccggcgtagcgttgttggctcccgaacgtaccgtccgccgtcagatcgtggtcatccatgctttgatcacgttgaccttcacggcaatcgtggtggtcatcttgaggcgtggttggtcctggtgctttaagatcgtcttgtccttcagcgtgctcattacctgtctagccgtctcgcatttccacgaagcggccctggctgtacgctacgagacgccgctggaacgcgcgcttttggcggccgtcaaggtgtttctcagcctggttttcactctgctgatggtgctgagaatcatgaccctgcgcacctttttgcaaacctacttttcctctgacaagctgtag

SEQ ID NO: 13606 - DNA, 129 bp, unidentified; identical to SEQ ID NO: 5625
  source 1..129: mol_type = other DNA
  misc_feature 1..129: note = Synthetic

SEQ ID NO: 13607 - DNA, 738 bp, unidentified
  source 1..738: mol_type = other DNA
  misc_feature 1..738: note = Synthetic
ataacaattcatccaatggataaattggaactagtcaatgatggcctcaatattattgactttattcagaagaaccaaaaagaaatacagaagacatacggacgatcaagtattcaacaacccagcatcaaagatcaaacaaaagcctgggaagattttctgcagtgcaccagtggagaatctgaacaagttgaggggggaatgtctaaggatgatggagatgttgaaagaagaaacttggaggatctatccagtacttctcccacagatggaactattggaaagagagtgtcgaacacccgtgactgggcagaaggttcagatgacatacaactggacccagtggttacagacgttgtataccatgatcatggaggagaatgtaccggatatggatttacttcaagccctgagagagggtggagtgattacacatcaggagcaaacaatgggaatgtatgtcttgtatctgatgcaaagatgctgtcctatgctcccgaaattgcagtttctaaagaagatcgggaaactgatctagttcatcttgagaataaactatctactacaggactgaatcccacagcagtaccgttcactctgagaaacctgtctgatcctgcaaaagactctcctgtgattgctgaacactactacggactaggagttaaagagcaaaacgttggccctcagactagcagaaatgtcaatttggacagcatcaaattgtacacatcagat

SEQ ID NO: 13608 - DNA, 498 bp, unidentified
  misc_feature 1..498: note = Synthetic
  source 1..498: mol_type = other DNA
atggcctcaatattattgactttattcagaagaaccaaaaagaaatacagaagacatacggacgatcaagtattcaacaacccagcatcaaagatcaaacaaaagcctgggaagattttctgcagtgcaccagtggagaatctgaacaagttgaggggggaatgtctaaggatgatggagatgttgaaagaagaaacttggaggatctatccagtacttctcccacagatggaactattggaaagagagtgtcgaacacccgtgactgggcagaaggttcagatgacatacaactggacccagtggttacagacgttgtataccatgatcatggaggagaatgtaccggatatggatttacttcaagccctgagagagggtggagtgattacacatcaggagcaaacaatgggaatgtatgtcttgtatctgatgcaaagatgctgtcctatgctcccgaaattgcagtttctaaagaagatcgggaaactgatctag

SEQ ID NO: 13609 - DNA, 267 bp, unidentified
  misc_feature 1..267: note = Synthetic
  source 1..267: mol_type = other DNA
atggacgtgttaggattatgggaaagccgcccccacactctaggtttggagttacgcggcgtaaactgtggcggcacggacggtgactggttagagattttaaaacagcccgatgtgcaaaagacagtcagcgggagtcttgtggcatgcgtgatcgtcacacccgcattggaagcctggcttgtgttacctgggggttttgctattaaaggccgctatagggcgtcgaaggaggatctggtgttcattcgaggccgctatggctag

SEQ ID NO: 13610 - DNA, 267 bp, unidentified; identical to SEQ ID NO: 13609
  misc_feature 1..267: note = Synthetic
  source 1..267: mol_type = other DNA

SEQ ID NO: 13611 - DNA, 75 bp, unidentified; identical to SEQ ID NO: 5636
  misc_feature 1..75: note = Synthetic
  source 1..75: mol_type = other DNA

SEQ ID NO: 13612 - DNA, 237 bp, unidentified
  source 1..237: mol_type = other DNA
  misc_feature 1..237: note = Synthetic
atggcgaggttggcgatggctgagtctccatgcttgttgttcctccctaggagaacacaatggccggccgcggaggaagtcagtcagagcgccgccgggagcgcacccccgaacgcggaaggggctctgccagccatccgccaagtcgcggcggcgagagcccgtcgcctccgcctctgcccccgaagagacatacctaccgccgcgtggcctcggaccaagaagaggaagagatag

SEQ ID NO: 13613 - DNA, 36 bp, unidentified; identical to SEQ ID NO: 5639
  source 1..36: mol_type = other DNA
  misc_feature 1..36: note = Synthetic

SEQ ID NO: 13614 - DNA, 36 bp, unidentified; identical to SEQ ID NO: 5639
  source 1..36: mol_type = other DNA
  misc_feature 1..36: note = Synthetic

SEQ ID NO: 13615 - DNA, 2277 bp, unidentified
  misc_feature 1..2277: note = Synthetic
  source 1..2277: mol_type = other DNA
atggatgtcaatccgactttacttttcttaaaagtgccagcgcaaaatgcaataagtaccacattcccttatactggagatcccccatatagccatggaacaggaacaggatacaccatggacacagtcaacagaacacatcaatattcagaaaaagggaggtggacaacaaacacagagaccggagcaccccaactcaaccctattgatggaccattacctgaagacaatgagccgagcgggtatgcacaaacagattgtgtattggaagcaatggctttccttgaagaatcccacccaggactctttgaaaactcatgtcttgaaacgatggaagttgtccagcaaacgagagtggataagctgacccaaggtcgccagacttatgactggacattgaatagaaaccagccggctgcaactgctttggccaacaccatagaagtattcagatcgaacggtctaacagccaatgagtcaggaaggttaatagatttcctcaaggacgtaatggaatcaatggataaggaagaaatggaaataacaacacatttccagagaaagagaagagtgagggacaacatgaccaagaaaatggtcacacaaagaacaatagggaagaagaagcaaaagctgacaaaaaagagctacctaataagagcactgacactgaacacaatgacaaaagatgctgaaaggggaaaattgaaaagacgagcgattgcaacacccggaatgcaaatcagaggattcgtgcactttgtcgaagcactagcaaggagcatctgtgaaaaacttgagcaatctggactccccgttggagggaatgagaagaaggctaaattggcaaatgttgtgagaaagatgatgactaactcacaagacacagagctctcctttacagttaccggagacaacaccaaatggaatgagaatcagaatcctcgaatatttctagcaatgataacatacatcacaaggaaccaacctgaatggtttagaaatgtcttgagcattgcccctataatgttctcaaataaaatggcgaggttaggaaaaggatacatgttcgagagtaagagcatgaagctacggacacaaataccagcagaaatgcttgcaaacattgacttgaaatacttcaacgaatcgacgagaaagaaaattgagaaaataagacctctactaatagagggcacagcctcattgagtccagggatgatgatgggcatgtttaatatgctaagtacggtcttaggagtctcaatcttaaatcttgggcagaagaggtacaccaaaaccacatactggtgggatgggctccaatcctctgatgatttcgctctcatagtgaatgcaccaaatcatgagggaatacaagcaggagtggatagattctataggacttgcaagctagttggaatcaacatgagcaaaaagaagtcttacataaatcggacaggaacatttgagttcacaagctttttctaccgctatgggtttgtagccaacttcagcatggagctgcccagctttggagtttccggaattaatgaatcggctgacatgagcattggagttacagtgataaagaataatatgataaacaacgaccttggaccagcaacagcccagatggctcttcagctgttcattaaagactacagatacacctaccgatgccacagaggtgatacacaaattcaaactagaagatcatttgaattgaagaagctgtgggagcagacccgctcaaaggcaggactgttggtttcagatggagggccgaatttatacaacatccggaatcttcacattccagaagtttgcttgaagtgggagttgatggatgaagattaccagggaagactgtgtaaccctctgaacccgtttgtcagtcataaggaagttgaatccgtcaacaatgctgtggtaatgccagcccatggtccggccaagagcatggaatatgatgccgttgcaactacacattcatggattcccaagagaaatcgctccattctcaacactagccaaaggggaattcttgaggatgaacaaatgtaccagaagtgctgcactctattcgagaaattcttccctagcagttcatatcggaggccagttggaatttccagcatgatggaggccatggtgtctagggcccgaattgatgcacggattgacttcgagtctggaaggattaagaaagaagaatttgctgagatcttgaagatctgttccaccattgaagagctcggacggcaagggaagtga

SEQ ID NO: 13616 - DNA, 294 bp, unidentified
  source 1..294: mol_type = other DNA
  misc_feature 1..294: note = Synthetic
ctggagatcccccatatagccatggaacaggaacaggatacaccatggacacagtcaacagaacacatcaatattcagaaaaagggaggtggacaacaaacacagagaccggagcaccccaactcaaccctattgatggaccattacctgaagacaatgagccgagcgggtatgcacaaacagattgtgtattggaagcaatggctttccttgaagaatcccacccaggactctttgaaaactcatgtcttgaaacgatggaagttgtccagcaaacgagagtggataagctga

SEQ ID NO: 13617 - DNA, 1683 bp, unidentified
  source 1..1683: mol_type = other DNA
  misc_feature 1..1683: note = Synthetic
atggaaacaatatcactaataactatactactagtagtaacagcaagcaatgcagataaaatctgcatcggccaccagtcaacaaactccacagaaactgtggacacgctaacagaaaccaatgttcctgtgacacatgccaaagaattgctccacacagagcataatggaatgctgtgtgcaacaagcctgggacatcccctcattctagacacatgcactattgaaggactagtctatggcaacccttcttgtgacctgctgttgggaggaagagaatggtcctacatcgtcgaaagatcatcagctgtaaatggaacgtgttaccctgggaatgtagaaaacctagaggaactcaggacactttttagttccgctagttcctaccaaagaatccaaatcttcccagacacaacctggaatgtgacttacactggaacaagcagagcatgttcaggttcattctacaggagtatgagatggctgactcaaaagagcggtttttaccctgttcaagacgcccaatacacaaataacaggggaaagagcattcttttcgtgtggggcatacatcacccacccacctataccgagcaaacaaatttgtacataagaaacgacacaacaacaagcgtgacaacagaagatttgaataggaccttcaaaccagtgatagggccaaggccccttgtcaatggtctgcagggaagaattgattattattggtcggtactaaaaccaggccaaacattgcgagtacgatccaatgggaatctaattgctccatggtatggacacgttctttcaggagggagccatggaagaatcctgaagactgatttaaaaggtggtaattgtgtagtgcaatgtcagactgaaaaaggtggcttaaacagtacattgccattccacaatatcagtaaatatgcatttggaacctgccccaaatatgtaagagttaatagtctcaaactggcagtcggtctgaggaacgtgcctgctagatcaagtagaggactatttggagccatagctggattcatagaaggaggttggccaggactagtcgctggctggtatggtttccagcattcaaatgatcaaggggttggtatggctgcagatagggattcaactcaaaaggcaattgataaaataacatccaaggtgaataatatagtcgacaagatgaacaagcaatatgaaataattgatcatgaattcagtgaggttgaaactagactcaatatgatcaataataagattgatgaccaaatacaagacgtatgggcatataatgcagaattgctagtactacttgaaaatcaaaaaacactcgatgagcatgatgcgaacgtgaacaatctatataacaaggtgaagagggcactgggctccaatgctatggaagatgggaaaggctgtttcgagctataccataaatgtgatgatcagtgcatggaaacaattcggaacgggacctataataggagaaagtatagagaggaatcaagactagaaaggcagaaaatagagggggttaagctggaatctgagggaacttacaaaatcctcaccatttattcgactgtcgcctcatctcttgtgcttgcaatggggtttgctgccttcctgttctgggccatgtccaatggatcttgcagatgcaacatttgtatataa

SEQ ID NO: 13618 - DNA, 72 bp, unidentified
  misc_feature 1..72: note = Synthetic
  source 1..72: mol_type = other DNA
aggcgctcagactcgagccagtccagggatcgtgggaaggtgcccaaaaccacatttaaccccctgatttga

SEQ ID NO: 13619 - DNA, 72 bp, unidentified; identical to SEQ ID NO: 13618
  misc_feature 1..72: note = Synthetic
  source 1..72: mol_type = other DNA

SEQ ID NO: 13620 - DNA, 72 bp, unidentified; identical to SEQ ID NO: 10669
  misc_feature 1..72: note = Synthetic
  source 1..72: mol_type = other DNA

SEQ ID NO: 13621 - DNA, 15 bp, unidentified
  misc_feature 1..15: note = Synthetic
  source 1..15: mol_type = other DNA
atggtcattgtgtag

SEQ ID NO: 13622 - DNA, 93 bp, unidentified; identical to SEQ ID NO: 5648
  misc_feature 1..93: note = Synthetic
  source 1..93: mol_type = other DNA

SEQ ID NO: 13623 - DNA, 672 bp, unidentified
  misc_feature 1..672: note = Synthetic
  source 1..672: mol_type = other DNA
atgggaaattgttttcgacgattatctctgtttggacagccgactcaggcaaattatgagatgttgtgctcttccgacgatttagaaagtgaagagctgacgtattttctggatatgacgtataaagattttggagtttatcagaatgatattataagtcatcaaaaagacacggaaactatgaaaactctgttaggtttattaccaatgtacaaaaaaactaagctcaggcataccattatggagcgatgtttatccaattgtcctaaccacgttaaagatgcactctgtgtagagcttatgaaagctgaaaaaatattacaaacgatggatgtcgtttttatgaaaactttaattggcgagttttctatgtgcaccgataatcttaatcagttgcttaacaaattcgctacagatcagtcaacacttagcgatgtcgagaaaataaacagtctcatagagattgatggcgaaaacagcaagcgtcttttagtagagttggatccgattctccatgaggagacaggattatatcaagcgctgccaaatgttgtgacggaagctccgagtgaaaaggttaaatcgatacacgtcgagtctgaaggtgagagtgtatggtcaagcgttactgaaggcggcataatgaaacaagaaaaaggaactggcgtctag

SEQ ID NO: 13624 - DNA, 243 bp, unidentified
  misc_feature 1..243: note = Synthetic
  source 1..243: mol_type = other DNA
atgctgtttccctgcaaaacgtgcgagagaatgaatcagaatttcaacatttgcttcacacacggggtcagagactgtttagagtgtttccccggcgtgtcagaatctcaaccggtcgtcagaaaaaagacgtatcggaaactctgcgcgattcatcatctgctggggcgggcgcccgagattgcttgctcggcctgcgacctggtcaacgtggacctggacgactgcgtttctgagcaataa

SEQ ID NO: 13625 - DNA, 243 bp, unidentified
  source 1..243: mol_type = other DNA
  misc_feature 1..243: note = Synthetic
atgctgtttccctgcaagacatgcgagagaatgaatcagaatttcaacatttgcttcacgcacgggacgagagactgttcagagtgcttccccggcgtgtcagaatctcaaccggtcgtcagaaagaggacgtatcggaaactctgtgccattcatcatctgctggggcgggctcccgagattgcttgctcggcctgcgatctggtcaacgtggacctggatgactgtgtttctgagcaataa

SEQ ID NO: 13626 - DNA, 63 bp, unidentified; identical to SEQ ID NO: 5653
  misc_feature 1..63: note = Synthetic
  source 1..63: mol_type = other DNA

SEQ ID NO: 13627 - DNA, 1620 bp, unidentified; identical to SEQ ID NO: 10519
  misc_feature 1..1620: note = Synthetic
  source 1..1620: mol_type = other DNA

SEQ ID NO: 13628 - DNA, 21 bp, unidentified
  source 1..21: mol_type = other DNA
  misc_feature 1..21: note = Synthetic
atggccctgaacatgaggtag

SEQ ID NO: 13629 - DNA, 21 bp, unidentified
  misc_feature 1..21: note = Synthetic
  source 1..21: mol_type = other DNA
atggccctgaacatgaggtag

SEQ ID NO: 13630 - DNA, 123 bp, unidentified; identical to SEQ ID NO: 5659
  source 1..123: mol_type = other DNA
  misc_feature 1..123: note = Synthetic

SEQ ID NO: 13631 - DNA, 123 bp, unidentified; identical to SEQ ID NO: 5659
  source 1..123: mol_type = other DNA
  misc_feature 1..123: note = Synthetic

SEQ ID NO: 13632 - DNA, 21 bp, unidentified
  source 1..21: mol_type = other DNA
  misc_feature 1..21: note = Synthetic
atggccctgaacatgaggtag

SEQ ID NO: 13633 - DNA, 12 bp, unidentified
  source 1..12: mol_type = other DNA
  misc_feature 1..12: note = Synthetic
atgtggttgtag

SEQ ID NO: 13634 - DNA, 18 bp, unidentified
  source 1..18: mol_type = other DNA
  misc_feature 1..18: note = Synthetic
atgcgcaatacaaaataa

SEQ ID NO: 13635 - DNA, 51 bp, unidentified; identical to SEQ ID NO: 5666
  misc_feature 1..51: note = Synthetic
  source 1..51: mol_type = other DNA

SEQ ID NO: 13636 - DNA, 18 bp, unidentified
  misc_feature 1..18: note = Synthetic
  source 1..18: mol_type = other DNA
atgcgagactgccggtaa

SEQ ID NO: 13637 - DNA, 27 bp, unidentified
  misc_feature 1..27: note = Synthetic
  source 1..27: mol_type = other DNA
atgctctgttcaatctgtaaatattga

SEQ ID NO: 13638 - DNA, 21 bp, unidentified
  misc_feature 1..21: note = Synthetic
  source 1..21: mol_type = other DNA
ctgttgcagaaaaagctttga

SEQ ID NO: 13639 - DNA, 18 bp, unidentified
  source 1..18: mol_type = other DNA
  misc_feature 1..18: note = Synthetic
acggctactaggcgctaa

SEQ ID NO: 13640 - DNA, 1095 bp, unidentified
  misc_feature 1..1095: note = Synthetic
  source 1..1095: mol_type = other DNA
atggggcaaacgctgacggcgctgcgcgtggaggacaccgccgtacccggggagaagatgctgcgcgtggagtacagccgcgcggcagacaacaccagcgtgcccttctccgaggaaacgcagcacttcgcagacgactcgctgccagagatccgcccgcgcttctgcctgctccccgaaatggcccccgccttttgcggcggctttctcacgcccgcgctgcgcaagcgctacttgctggcgcgcggagagcagtgccgctcgctgtccttccgacccggctcgctcatcaccgacacgcgcccgccgcccaagggcgtagagcaatacgtggcgcttggcgagcgctgccgcttcgtgcgcggagacttccttgcgcaggaccgcgacctggcgcgctgctgcacgcagcctaacgcgcaagactgccccgagcgcctgcgcaacggctacagcacgcccgattgcgacgctgccatggccagcttctgcgccgcgcagcccggaagcgcgccgtgcctggcctggctcgacacgcggcgcgcgcccgcgctggccgcgtacgcggacatctgcgcgcgcgacttggaccgtagctactgctcgcagttcgtgaacgtctcgcggccagagttctttgcctactccgacgccgcgatcttgcaatactgtcgcacacaccgcgcgcgccgcgagtgttggtgcgtggcgccgcccacgcctcgcgtgcgcaatgccgaggtcttcctgggcccgcgagtgtgctggctgcacgagtgcacggaccagtcgcgcgaccgcaagtacctgctcttcgaccaggacgtgcagcgcaagaagtgccagtacgtgggctgcaacatcacggtggacatgttacagctcgagaatgcgagcgccacgcttgtgtccgactgcgtaggcaccgatgcgccgggggacgagagtccgggcacgcggagcgcgcacgtgcccgcgctgcccgtgctgccagtaacttccgcgctgctggcggctgccgtgctcttctacttcctggcgctgtacgcgcggcgccgcgttcccgacaggcccgtgcgcacgcggcggcgctag

SEQ ID NO: 13641 - DNA, 213 bp, unidentified
  misc_feature 1..213: note = Synthetic
  source 1..213: mol_type = other DNA
gtggctgcaataattttctggatcattttaaatggcctacaggcacaggaggccgttccggaggtaccggagaaggtaccgaagatggaggggccggaaggtccaccaccgacgtacctggagacctttccaccgcttcggctggaggaggaggtggagacatcccagacgaggatctgctgttgtaaggatcaccagacccaaaaaacataa

SEQ ID NO: 13642 - DNA, 1683 bp, unidentified
  source 1..1683: mol_type = other DNA
  misc_feature 1..1683: note = Synthetic
acgggcagaagccacatgtgccacagccaaatgcacaaatcagaaatggcacgtttctctcaggagattttcggtctgagcactattctattgattgctcaaacatgtcagggctcgatagacggaagattaacgcttgctgcagggattgttcctgttggtgaccggcccattagcatatatacatcatcccaaacgggaattatagttgtcaaattgatcccaaatttacctgacaataagaaagattgtgccaaacaatcattgcaatcttataatgaaacattatcccgcattctaacaccacttgccacggcaatgtctgcaataaggggcaattcaacaactcaagtgagagaaaacagactggttggggcaattatagggagtgttgccttaggtgttgcaactgctgctcagatcacagctgcaacagctttaattcaagctaatcaaaatgctgccaatattgctagattggcaaacagcattgccaaaactaatgaggcagtaacagatttaactgaggggctcggcacactagccataggggtcggtaagctgcaagactatgttaatgagcaattcaacaacacggcagtagcaatagactgcctaacccttgaatccaggctaggtatccagctaagtctatatctcacagagctgatgggtgtattcggtaaccagcttacgtcgcctgcattgacaccaataacaattcaagccctgtacaatctagccgggggaaatcttaatgcattactgtcacgtctaggtgccagtgaaactcaactaggatcgctgataaatagcggcttaattaaaggaatgccgattatgtatgatgatgcaaacaagttactagccgtacaggtagagttaccaagcatagggaagctcaacggtgcccgttcaaccttactagaaacattagctgtggatacgactcgaggaccatcatcaccaatcattcccagcgccgtgattgaaattggaggagccatggaggagttagaccttagcccttgtataacaactgacttagacatgttctgtacaaagatcatatcatacccccttagccaatctactttgtcatgtctcaatggaaatctaagtgattgtgtgttttcaaggagtgaaggcgtcctttcaacaccttacatgacaattaaggggaaaatagtggccaattgcaaacaggtcatctgtcgttgtatggacccacctcagatactttctcaaaattatggggaagcccttctcttgattgatgagagcacatgccgatctttagagctgagtggtgttatcctaaagttagcaggaacatatgaatcagaatatacgcgcaatctaacagttgatccaagtcaagtgataattacaggacctcttgatatatcagcagaattatcaaaagtcaatcagagtattgattcagcgaaagagaatatagcagaaagcaataagttcctatctcaagttaatgtcaaattgctaagcagttccgccatgattacttacatcgttgctacagtggtatgcttaataattgcaatcacaggatgtgttatcgggatatataccttgacaaagcttaaatctcagcaagagaccctcctgtggttggggaataatgctgagatgcatggcagtcggtccaaaaccagtttctaa

SEQ ID NO: 13643 - DNA, 60 bp, unidentified; identical to SEQ ID NO: 5680
  misc_feature 1..60: note = Synthetic
  source 1..60: mol_type = other DNA

SEQ ID NO: 13644 - DNA, 15 bp, unidentified
  misc_feature 1..15: note = Synthetic
  source 1..15: mol_type = other DNA
ctggagcaggcttaa

SEQ ID NO: 13645 - DNA, 45 bp, unidentified; identical to SEQ ID NO: 5681
  misc_feature 1..45: note = Synthetic
  source 1..45: mol_type = other DNA

SEQ ID NO: 13646 - DNA, 66 bp, unidentified; identical to SEQ ID NO: 4182
  source 1..66: mol_type = other DNA
  misc_feature 1..66: note = Synthetic

SEQ ID NO: 13647 - DNA, 81 bp, unidentified; identical to SEQ ID NO: 5687
  misc_feature 1..81: note = Synthetic
  source 1..81: mol_type = other DNA

SEQ ID NO: 13648 - DNA, 1716 bp, unidentified
  misc_feature 1..1716: note = Synthetic
  source 1..1716: mol_type = other DNA
atttttgtcttagtcttctacacaacgcgaactatggctcactccaaagaaatccccagcttccgctggactcaatctctaaggagagaactagggatgttcacagaaccaaccaaatcaagtgttcttaatgatgcaaagctcattgcagactcccttgatttcacacaagtttctcaagttcaaagactcctacgtaagtccaaacgaggagacactgatcttgataaacttagggacttaaataaagaagttgatagactgatgagcatgaaaagtgttcagaacaacacagttctgaaagttggtgatttgggcaaagatgaattaatggacttggcctcagatctagaaaaactaaagaagaagattggagatagggaaagcaatagtccaaggatgtacatgggaaacttgacgcagtcacaattggaaaaaagagcagggattcttagaaccctgggattccaacaacaaaggggggctgcaggtggggttgtcaggttgtgggatgtatctgatccctccaaactgaataaccaatttggttcaatgccagctcttaccattgcctgcatgacagttcagggaggagaaacaatgaacaatgttgtgcaggcactaacatcacttggtcttctctacactgtcaaatatcccaatcttgatgacctggaaaaactaactttagaacacgactgcctacagattataacaaaggatgagagtgcactcaacatatctggttataacttcagtctttcagctgctgtaaaagctggtgcatcacttatagatggtggcaacatgctggagacaataaaagtcacacccaacaacttctcttctattgtcaaggccgcattgaacgtcaaaagaagagaaggcatgttcatagatgagagaccgggcaatagaaacccttatgagaaccttctctacaagctgtgtttgtctggggagggttggccatatattggatcaaggtcacaaatactcgggaggtcttgggacaacacaagtgtcgatttaaatgcaagacctgtaacaggtccccgagctcctgaaaagaatggacaaaatatcagactatcaaatctttctgaaatgcaagaagcgatcgtaaaggaagcaatgaggaaattagattcatcagacacaatctggatggacattgaaggcccgccaactgatcctgtggagttggcagttttccaaccttcttcaggaaactatgtacactgtttcagaaaacctcatgatgagaaaggttttaaaaatggaagtaggcactcacacggcatactattaaaggaccttgaagatgctcaacctggtctattgagttacgtcattggcttattgccacagggttcagttatcactgttcaaggggcagatgacatcaaaaagcttttcgacatacatggaaggaaagatttaaaacttgttgatgtcagactgactggggaacagtccagaatttttgaacaggaagtttgggaaaaatttggccacctctgcagagcacacaatggtgtcattgttcctaagaagaaaaacaaggaggctaactccacgaaggagccacactgtgctcttctcgattgcatcatgtttcagtctgttcttgatggtcatcttcccgacaccattcccattcaactgctaccaaacacattagtgttccaagccaagagcgcatttgtgatgtag

SEQ ID NO: 13649 - DNA, 12 bp, unidentified
  source 1..12: mol_type = other DNA
  misc_feature 1..12: note = Synthetic
ttggacagatag

SEQ ID NO: 13650 - DNA, 105 bp, unidentified; identical to SEQ ID NO: 5695
  misc_feature 1..105: note = Synthetic
  source 1..105: mol_type = other DNA

SEQ ID NO: 13651 - DNA, 15 bp, unidentified
  misc_feature 1..15: note = Synthetic
  source 1..15: mol_type = other DNA
ctgccagcaaattga

SEQ ID NO: 13652 - DNA, 27 bp, unidentified
  source 1..27: mol_type = other DNA
  misc_feature 1..27: note = Synthetic
atagaacaaaccaaatatacatattaa

SEQ ID NO: 13653 - DNA, 54 bp, unidentified; identical to SEQ ID NO: 5703
  source 1..54: mol_type = other DNA
  misc_feature 1..54: note = Synthetic

SEQ ID NO: 13654 - DNA, 39 bp, unidentified; identical to SEQ ID NO: 5705
  misc_feature 1..39: note = Synthetic
  source 1..39: mol_type = other DNA

SEQ ID NO: 13655 - DNA, 1449 bp, unidentified; identical to SEQ ID NO: 12704
  source 1..1449: mol_type = other DNA
  misc_feature 1..1449: note = Synthetic

SEQ ID NO: 13656 - DNA, 87 bp, unidentified
  source 1..87: mol_type = other DNA
  misc_feature 1..87: note = Synthetic
atgaaagcacaagtggagaatccgaagaagaagaagaaccaaaagacacacaagacaatagtcaagaagatgacatttaccagttaa

SEQ ID NO: 13657 - DNA, 684 bp, unidentified
  misc_feature 1..684: note = Synthetic
  source 1..684: mol_type = other DNA
atgaaaccaatgccgaaacagagagagatgcgacgtcttagagatagaatctcagatattgaaagacagttgagtgactgcagacgtaataatgaaagcaatgctgatatggaaagagagatgcaacgtcttagagatagaatcatggatcttgatagacagcttaacgagtgtaaacgcaacggtaacggaacatcttctgaggaggtaaataggctaaagactagaatcaggaatcttaaacgatcgctagagatctgctcaaaggatgaatcagaactctattcagcatataaaactaaactcggacgtgctagggaacaaattagtaacttgcaagaaagtctacgtagagagcgtgaatctgacaaaacagatagttactacaggagggaattgactcgcgaaagaaataaaatcgtagaattggaaaaagaacttaataagtgtttcgatgccaagtacatcgacgaaatcaattccaagaaaacccgtatttctgatctcgaacgacaactagcagcctgtaaatctaatggtggtagcaatggaaacatggaccaatacaaacgggaaattgaatctcttaaacgcgagctcgccgagtgtagacgtggtaacaatggatcccatagtgattgtaagtactatgacgaagaagcaagagattgtgttaagagctga

SEQ ID NO: 13658 - DNA, 159 bp, unidentified
  misc_feature 1..159: note = Synthetic
  source 1..159: mol_type = other DNA
atgcggttcaaaatagaaaattgtaaggttgtaaattttaatattgaaaatactaattgtttaaataacccaagtattgaaactatatatggaaactttaaccagttcgtctcaatctttaatatcgtcaccgatgtcaaaaaaagattattcgagtga

SEQ ID NO: 13659 - DNA, 174 bp, unidentified
  misc_feature 1..174: note = Synthetic
  source 1..174: mol_type = other DNA
acgttagttaataacatgcggttcaaaatagaaaattgtaaggttgtaaatttcaatattgaaaatactaattgtttaaataacccgagtattgaaactatatatggaaactttaaccagttcgtctcaatctttaatatcgtcaccgatgtcaaaaaaagattattcgagtga

SEQ ID NO: 13660 - DNA, 27 bp, unidentified
  source 1..27: mol_type = other DNA
  misc_feature 1..27: note = Synthetic
atgagtgtgcaactgtcgatgagttag

SEQ ID NO: 13661 - DNA, 30 bp, unidentified; identical to SEQ ID NO: 5719
  source 1..30: mol_type = other DNA
  misc_feature 1..30: note = Synthetic

SEQ ID NO: 13662 - DNA, 159 bp, unidentified
  misc_feature 1..159: note = Synthetic
  source 1..159: mol_type = other DNA
atgcggttcaaaatagaaaattgtaaggttgtaagtttcaatattgaaaatactaattgtttaaataacccgagtattgaaactatatatggaaactttaaccagttcgtctcaatctttaatgccgttaccgatgtcaaaaaaagattattcgagtga

SEQ ID NO: 13663 - DNA, 93 bp, unidentified; identical to SEQ ID NO: 5721
  misc_feature 1..93: note = Synthetic
  source 1..93: mol_type = other DNA

SEQ ID NO: 13664 - DNA, 261 bp, unidentified
  misc_feature 1..261: note = Synthetic
  source 1..261: mol_type = other DNA
gtgtccgtcttcaccgtcctcgtcgtcaccacctcccccctcgagcccaccgctcgtaccagccgcgggctccgcgtcctcgtcgatcaccagcggtcgcgtcggcaccggagaatccacgtcatcctgcacgtcgttttcctcctctccgtcgtcatcgtccagaaacggcacccgctgcttagcccaggacattctttttccgcgtcctcaatcagcggcgccgatcgccatgaatccgagtacccacgtgagcagtaa

SEQ ID NO: 13665 - DNA, 2154 bp, unidentified
  source 1..2154: mol_type = other DNA
  misc_feature 1..2154: note = Synthetic
atcaccagcggtcgcgtcggcaccggagaatccacgtcatcctgcacgtcgttttcctcctctccgtcgtcatcgtccagaaacggcacccgctgcttagcccaggacattctttttccgcgtcctcaatcagcggcgccgatcgccatgaatccgagtacccacgtgagcagtaacggcccaacgactccccctcacgggccccacaccacgtttcttcccccgaccagcccggccccgtccaccagctccgtcgccgccgctaccttgtgcagtccgcaacgacaggccgtttcgcgttacagcggctggagcaccgagtacacccagtggcactcggacttgacaactgagctgctatggcacgcgcacccgcgtcaagtacctatggacgaagcgctggccgccgcggcggccgcctcataccaggtgaatcctcaacaccccgccaaccgttaccgtcactacgaattccagacgctcagcctcggcacctcggaggtagacgaactgctcaactgctgtgcggaagaaaccacgtgcggcggcacgcaatccaccgtactcaccaatgcgaccaacaccactagctgcggcggagccgtcgccggcagtagcaacgcaggacccgccggcgcttcggccgcctgcgacctagatgcagaactggccggcctcgaaacctcggcggccgactttgaacaactgcggcgactgtgcgcgccgctggccatcgacacgcgctgtaacctatgcgccatcatcagcatctgcctcaaacaggactgcgaccagagctggctcctcgagtacagcttgctgtgcttcaaatgcagttacgcgccccgtgcggcgctcagcacgctcatcatcatgtccgagtttacgcatctgctgcagcagcacttttccgatctgcgcatcgacgacctgttccgacaccacgttctcacggtcttcgatttccacctgcactttttcataaatcgttgctttgaaaaacaagtgggcgacgcggttgataacgagaatgtcaccctgaaccatctagccgtggtgcgggccatggtcatgggcgaagacacggtgccttacaacaagcctcggcgccacccgcaacagaagcaaaaaaacaacccttatcacgtcgaagtgccgcaagaactgatcgacaactttctagaacacagctcacctagccgcgaccgcttcgtgcagctgcttttctatatgtgggccggcaccggcgtcatgagcaccacgccactcacggaacttacgcacactaagttcgcgcgactagacgcgttatccacggcctcggaaagagaagacgcaaggatgatgatggaagaagaggaggatgaagaaggaggagaaaaaggaggagacgatccgggccgtcacaacggcggtggcaccagcggggggttcagcgagagcacgctaaaaaagaacgtgggtcccatttacctatgtcccgtacccgccttttttaccaagaaccaaactagtaccgtgtgtctgctgtgcgaactcatggcctgctcctattacgataacgtcgtcctgcgcgagctgtaccgccgcgtcgtctcgtactgtcagaacaatgtgaagatggtggaccgcattcagctggtattggccgacctgttgcgcgaatgcacgtcgccgctcggcgcggcgcacgaggacgtggcgcgctgtggactcgaagcgcccacctcgcccggaggcgactcggactatcacggcctgagcggcgtcgacggcgcactggcgcgacccgacccggtattttgccacgtcctgcgtcaggcgggcgtcacgggcatctacaagcactttttctgcgacccgcagtgcgccggcaacatccgcgtcaccaacgaggccgtgctcttcggacacctgcacccccaccacgtccaggaggtgaaactggccatctgtcacgacaattactatataagtcgacttccgcgacgtgtgtggctctgcatcacactcttcaaggcctttcagattacaaaacgcacctacaaaggcaaagtgcacctggcggactttatgcgcgatttcacgcagctgttggagaattgcgacatcaagctggtggaccccacgtacgtgatagacaagtatgtctag

SEQ ID NO: 13666 - DNA, 162 bp, unidentified; identical to SEQ ID NO: 5725
  source 1..162: mol_type = other DNA
  misc_feature 1..162: note = Synthetic

SEQ ID NO: 13667 - DNA, 21 bp, unidentified
  source 1..21: mol_type = other DNA
  misc_feature 1..21: note = Synthetic
atgcctggacagcgacactga

SEQ ID NO: 13668 - DNA, 42 bp, unidentified; identical to SEQ ID NO: 5728
  source 1..42: mol_type = other DNA
  misc_feature 1..42: note = Synthetic

SEQ ID NO: 13669 - DNA, 48 bp, unidentified
  misc_feature 1..48: note = Synthetic
  source 1..48: mol_type = other DNA
atggggaacatctacttactggaaaataggcgtgcaaaaggtagctaa

SEQ ID NO: 13670 - DNA, 1458 bp, unidentified
  misc_feature 1..1458: note = Synthetic
  source 1..1458: mol_type = other DNA
atggagaacaagattgtcgcagagtcccgggaggagttccacgcctggttcaaggcctattcagataagcacaaactcagtaaaacacacaccgagtcggcctctttctgcagagaggttccctcccttgaaacctaccggctgaaaatgcagtttgcagccacagaggccgaaaaggatgctgtgtacagtaccgcactcattgaggccacaaagttctgtgctcccataatggaatgtgcctggtcctcatcaactggcatggtgcgcaagggcctagagtggttcgagaccaacaaagagagtgagatcgtcaaggtctgggatgcaaactatgcgactctaaggcgtgggacccctgacgcagaagcactaactgcctaccagaaggctgcaattgcctggagaaaggaggtaggttacaacctgaaccctcagacccatgtgctcaaacaggctattgcagctgagtacaaagtgcctggcaccattgttgccaacataaaagagatgctgagtgacatgatccgacgtaggaacctcattctcagcggagggtctgatgatgcacccaagagaggccctgttggccgggagcatatcgactggtgcagagagtttgcgaagggaaagttccttgcagtgctcaacccgccatggggagagattggcaaggccggcaagtcaggatacccgcttcttgcaacaggtctagccaagctagctgagcttgagggccctgatgttctcaataaggcgaaagaaaacattgtcaagtttcaagattggctaaagcaaaacaaagaccaacttgatgaggagcgagcaaaggttatccttgacagcctggtcgcaagccacaagacagctgttgcgctggccaagcagtccaatgcctttcgagcacagggtgcacagatcgacaccgtcttcagcagctactactggatctggaaggcaggagtaaccccaatcacctttccctctgtctctcaatttctattcgagcttggcagaaacccaaaggggcagaaaaaaatgcacaaggctctcaccaacactcctctcaagtggggcaagaagatgatcgagctttttgcagacaatgacttcaagcagaaccgcatctacatgcatccctgcgtcttaacctccggaaggatgtctgagcttggggtcaccttcggtgcagtccctgtcacagatccagatgatgccgcacatggctcaggtcacaccaaagccgtgctcaactacaagacaggagccgactctggcaacccctgtgcccgcatcatctcagagctctttgagatccagaaggccggctatgatatacagagcatggacattgtggcatctgagcatctcctgcatcagtctctcgtcggcaaacggtcccccttccagaacgcataccttgtgaagggcaatgcaaccaacatcaacatcatctaa

SEQ ID NO: 13671 - DNA, 1131 bp, unidentified
  source 1..1131: mol_type = other DNA
  misc_feature 1..1131: note = Synthetic
atggcttcgtacccctgccatcaacacgcgtctgcgttcgaccaggctgcgcgttctcgcggccataacaaccgacgtacggcgttgcgccctcgccggcagcaaaaagccacggaagtccgcctggagcagaaaatgcccacgctactgcgggtttatatagacggtccccacgggatggggaaaaccaccaccacgcaactgctggtggccctgggttcgcgcgacgatatcgtctacgtacccgagccgatgacttactggcgggtgttgggggcttccgagacaatcgcgaacatctacaccacacaacaccgcctcgaccagggtgagatatcggccggggacgcggcggtggtaatgacaagcgcccagataacaatgggcatgccttatgccgtgaccgacgccgttctggctcctcatatcgggggggaggctgggagctcacatgccccgcccccggccctcaccctcatcttcgaccgccatcccatcgccgccctcctgtgctacccggccgcgcgataccttatgggcagcatgaccccccaggccgtgctggcgttcgtggccctcatcccgccgaccttgcccggcacaaacatcgtgttgggggcccttccggaggacagacacatcgaccgcctggccaaacgccagcgccccggcgagcggcttgacctggctatgctggccgcgattcgccgcgtttatgggctgcttgccaatacggtgcggtatctgcagggcggcgggtcgtggcgggaggattggggacagctttcgggggcggccgtgccgccccagggtgccgagccccagagcaacgcgggcccacgaccccatatcggggacacgttatttaccctgtttcgggcccccgagttgctggcccccaacggcgacctgtataacgtgtttgcctgggctttggacgtcttggccaaacgcctccgtcccatgcacgtctttatcctggattacgaccaatcgcccgccggctgccgggacgccctgctgcaacttacctccgggatggtccagacccacgtcaccaccccaggctccataccgacgatctgcgacctggcgcgcacgtttgcccgggagatgggggaggctaactga

SEQ ID NO: 13672 - DNA, 39 bp, unidentified
  source 1..39: mol_type = other DNA
  misc_feature 1..39: note = Synthetic
atctacttactggaaaataggcgtgcaaaaggtagctaa

SEQ ID NO: 13673 - DNA, 39 bp, unidentified
  source 1..39: mol_type = other DNA
  misc_feature 1..39: note = Synthetic
atctacttactggaaaataggcgtacaaaaggtagctaa

SEQ ID NO: 13674 - DNA, 48 bp, unidentified
  misc_feature 1..48: note = Synthetic
  source 1..48: mol_type = other DNA
atggggaacatctacttactggaaaataggcgtacaaaaggtaactaa

SEQ ID NO: 13675 - DNA, 24 bp, unidentified
  misc_feature 1..24: note = Synthetic
  source 1..24: mol_type = other DNA
ctgggcccaggagtcgaaggttga

SEQ ID NO: 13676 - DNA, 24 bp, unidentified
  source 1..24: mol_type = other DNA
  misc_feature 1..24: note = Synthetic
ctgggcccaggagtcgaaggttga

SEQ ID NO: 13677 - DNA, 135 bp, unidentified; identical to SEQ ID NO: 5747
  source 1..135: mol_type = other DNA
  misc_feature 1..135: note = Synthetic

SEQ ID NO: 13678 - DNA, 135 bp, unidentified; identical to SEQ ID NO: 5747
  misc_feature 1..135: note = Synthetic
  source 1..135: mol_type = other DNA

SEQ ID NO: 13679 - DNA, 45 bp, unidentified
  source 1..45: mol_type = other DNA
  misc_feature 1..45: note = Synthetic
ctgaaaaaaacacccgggtttcgcaggctgcagtgtagagtctga

SEQ ID NO: 13680 - DNA, 45 bp, unidentified; identical to SEQ ID NO: 13679
  misc_feature 1..45: note = Synthetic
  source 1..45: mol_type = other DNA

SEQ ID NO: 13681 - DNA, 60 bp, unidentified; identical to SEQ ID NO: 5749
  misc_feature 1..60: note = Synthetic
  source 1..60: mol_type = other DNA

SEQ ID NO: 13682 - DNA, 66 bp, unidentified; identical to SEQ ID NO: 5750
  misc_feature 1..66: note = Synthetic
  source 1..66: mol_type = other DNA

SEQ ID NO: 13683 - DNA, 24 bp, unidentified
  source 1..24: mol_type = other DNA
  misc_feature 1..24: note = Synthetic
atggccgattatcttaatcattaa

SEQ ID NO: 13684 - DNA, 1170 bp, unidentified
  misc_feature 1..1170: note = Synthetic
  source 1..1170: mol_type = other DNA
atggcattcaccggtgatgaactggcgcgcatgttgcagtttaaggataagatgatttcttcggcggggtccgctctgagatttgagaaagttgtacaggaagctatggcttccggaattgttcttcaacatatcacttgtatcaaagttcggatctgtgacaattccgatattctatctgaccgtcagttgagatgtttattaataaacgggttgtatccttttgagggtaggatgagtatgtttggtgtaacggaggaatgggaaggtgcatctgcggctccggagagacaagttgtttttttgttatcgtcaactggtcaagtgcttggatatgaagatggtgtgatattttatttgtcacctacgttttcagatttctggacaactgccatggagttctcgtgtcagaacgcgatcttgagtaattttattgcacagaagtcccgcgatgaatacagtgatcaatttcaaaaatattttacgagaatgagacataccccaatttctttgacaggtgtattacctagacggtttcagaaggtagagagtggtgcttgcgtggaagaagatgctcgtgcttccatgagaccaattcagtctgactctttcggtgctaagggtccattttgttggccgacggaagaattgttgcagccatctgcgaaaaaagatgttggggggacggtgtgtatggctttatcgtgtcaagaagacaactccgctcgccattgcacaatctatggacttaccaaaactcctggtataaaaattatgttatcgaggcatacacagacagatcggtctgaggcgatgtgtgacgctgccactcaaactgaagacgtggtggataattcttcagaaactctgtttctcggtggaaatttggttcatcagtcaattttggaaacggaagtccaagcgaccgcaaaaaatacctttgatgtctctgatcctcgaatcgactcggtgtacgatacaacagtggtcggtgctatggcaaccgatgatgtaggttgtaaacatgttcagggtggtgcgtctttggcgcaagaaaaacctttaaaaggttattgtatcattgctactccatcggaatgcaaaccgaacattcattggcttaagagcccagaaaatgctgttcatgaatcggcagctgtgctgaggtag

SEQ ID NO: 13685 - DNA, 312 bp, unidentified
  source 1..312: mol_type = other DNA
  misc_feature 1..312: note = Synthetic
aggattgtgcagacactgtgggtcggtagaatgattgggaaagaagctactataccagaggtggttctagaactgcaagagcttgtccaacccactgctgacctgcattgttacgaagaattgacagaagaacctgcagaggaggagcagtgtctcactccctacaagatcgtagctggctgtggttgcggtgcaagacttcgtttatacgtgcttgctacaaatttaggaattcgagcgcaacaggaacttttgctgggtgatatacaactggtgtgtccggagtgccgaggcagacttcgccatgagtga

SEQ ID NO: 13686 - DNA, 39 bp, unidentified; identical to SEQ ID NO: 5761
  misc_feature 1..39: note = Synthetic
  source 1..39: mol_type = other DNA

SEQ ID NO: 13687 - DNA, 1404 bp, unidentified
  misc_feature 1..1404: note = Synthetic
  source 1..1404: mol_type = other DNA
atggataccatattagcgggcggtagcggcacctccgacgcttcggataatacctgcaccatatgcatgagcaccgtttccgatctcggaaaaaccatgccgtgtttgcacgacttctgctttgtttgtattcgggcatggacctccaccagcgtccagtgtcctctctgccggtgtccagtgcaatccatcctgcataagatcgtaagtgatacaagttacaaggaatatgaagtgcacccatccgacgacgatggtttttctgagccgtcatttgaagattccatcgacatcctaccgggagatgtcatagatcttctgccaccaagcccaggaccgagtcgggagtccatccaacagccaacatcaagatcgagtcgggagcccattcaatcaccaaaccctgggccccttcaatcgtcggctagagagcccacagcagagtcaccaagtgactctcaacaggattctatacaaccaccgacccgagactcgagccctggtgtaaccaaaacatgctctaccgcatcatttttacggaaggtattttttaaagaccaacctgctgttcgatcggcgaccccggtggtgtatggctcgattgaatctgcacagcaaccccggaccggggggcaggactaccgtgatcgtccagtatctgtgggaattaatcaagacccacgaaccatggacagactgccttttcgagccacggatagaggaacagagggaaacgcgagattcccgtgttacatgcaacctttactcggatggcttgatgatcaacttgcggaactgtatcaacccgaaattgtagagcctacaaaaatgttgatattaaactatataggtatttacgggcgtgatgaggcgggattaaaaacatccctgcgttgtcttttgcatgattcaacaggaccgtttgtaacaaacatgttattcttgttggatcgatgtaccgatccaacccgcctaaccatgcaaacctggacctggaaagatacagccatccaactaattacaggtccaattgtaagaccagaaaccacctcaaccggggagacctctcgtggcgatgaaagggatacccgattggtaaatacaccccaaaaagtcaggcttttttctgtgttaccggggattaaaccgggaagcgcaaggggtgctaagcgccgtttatttcataccggcagagacgttaaacgatgcttaacaatagacctgacatctgagtctgattcggcatgtaagggaagtaaaacccgcaaagttgcctctccacagggggagtccaataccccctccacctccggatcaacatcaggttcactgaaacaccttaccaaaaaaagctctgccggtaaagcgggtaaaggtattccaaacaagatgaagaagtcctag

SEQ ID NO: 13688 - DNA, 138 bp, unidentified
  source 1..138: mol_type = other DNA
  misc_feature 1..138: note = Synthetic
atgcatgagcaccgtttccgatctcggaaaaaccatgccgtgtttgcacgacttctgctttgtttgtattcgggcatggacctccaccagcgtccagtgtcctctctgccggtgtccagtgcaatccatcctgcataa

SEQ ID NO: 13689 - DNA, 207 bp, unidentified
  misc_feature 1..207: note = Synthetic
  source 1..207: mol_type = other DNA
atcctgtgccgcccgcccgcgcccaccatcaccaccgttagtgaaaacgtgcctgctctcacagatcacgggacgctaccgctgcgcagcagtatccgcggagtccagcgagtgaccgttactgacgcccgtcgccgcacctgtccctacgtctacaaggccctgggcatagtcgcgccgcgcgtgctctccagtcgcaccttctag

SEQ ID NO: 13690 - DNA, 171 bp, unidentified
  source 1..171: mol_type = other DNA
  misc_feature 1..171: note = Synthetic
gtgcccacgagttttgttttccgcttcggcgagatctgcctctgcgcacgcgaggaagctgccatgtacttcgtggcgcttttctgtccgtgccgccacgaacttccgcgcccactcgtgctgtgcgtgttcccggtgcccgaagcgcgcgtgccgccaaaaatgaaatag

SEQ ID NO: 13691 - DNA, 276 bp, unidentified
  source 1..276: mol_type = other DNA
  misc_feature 1..276: note = Synthetic
ctgtggggggacggcgacctggcggacggatggatgagtccgggcgacagcgacctgctagtcatgtggcagctgacatcagcccccaaggtgcacaccgacgctccttcaaggcctggctcgcgtcctacatacactccctcagccgccgggcgtccggacgcccaagcggcccctccccccgagacggcgccgtctccggagcccgccccgggtcccgccgccgatccagcttccgggagcggcttcgcgcgggactgtcccgatggcgagtga

SEQ ID NO: 13692 - DNA, 27 bp, unidentified
  misc_feature 1..27: note = Synthetic
  source 1..27: mol_type = other DNA
ataattcaagagtgtgtgtctctctaa

SEQ ID NO: 13693 - DNA, 1137 bp, unidentified
  misc_feature 1..1137: note = Synthetic
  source 1..1137: mol_type = other DNA
atggaccgcctccgcacctgctacgagcgcttctacgacatcagccgcgatcacctgagccgcggcaccgggctctgcgtggactgcctggacttcgacacggacgtggacacgctcgtcagcatggtgcccgtgctcgagagctcagtgtgccccatcgcgccggaaatgagcgaggcggacgtgctggcgctgatgaagcacttcaactaccaggcgctctccttctggttcctgaagtcgaacgcggtggcgaagtccgtgtacaacagcatcgccgacgcggaggggaagcgcgagttcgcgcgcgtgttccgagacgtgctcctggccgcgcagacgctggtctcgctgaacgcgatgtaccgcaacatgcgcaacgacaccgaggagatcatcgacgactccaagaagatcatggagatgatatcgcacgtccgcggagccagcggagccaacgcggtcatgaagatcctgcagaaccactacagcttcctggtgaagtgtctgaacaaggtcttctcggacgagaactacgtgctcaagctggtggcggtattcgacaactcgctgatgacggacaagcagaagctcaaggagtaccaggagcttctgcgcgtctccgcggagagcgcggagcacggaatccgctgcgtgtccgacctcgaggtctcgagcgtgagcgtcgatggcgaccgcgcgaagtacctgaacttcatgaagaaggtgatgagcagcatgctggtcttccagaacaaggatctcaagcccgcgaagttcgccacggtcgtgtgcaagctctacgtggtgctgtacaacgagtttaagaccaacgtggagatcggcaagctcgtccgggacgtcttcgtgtcgctgcgcgagaagttctcgccgcaggacctcaagagcgtgggcgtgaagaacatccagacgctggtgcggtacgtggccaaccaccgcgcgttgtacaaggaggtgctcgcgcgcgagtactgggagcgcgagggctcgctggtggacatcgcgcagagcgtgatatccgaaaacggcattacgtaccgcggctgccccatcgtggtgcgcgagctgctggacatgataaaagaaaaaatctcggaggccgccgagtcggagtag

SEQ ID NO: 13694 - DNA, 144 bp, unidentified; identical to SEQ ID NO: 5772
  source 1..144: mol_type = other DNA
  misc_feature 1..144: note = Synthetic

SEQ ID NO: 13695 - DNA, 48 bp, unidentified; identical to SEQ ID NO: 5773
  source 1..48: mol_type = other DNA
  misc_feature 1..48: note = Synthetic

SEQ ID NO: 13696 - DNA, 204 bp, unidentified
  source 1..204: mol_type = other DNA
  misc_feature 1..204: note = Synthetic
acggtcatcccacaacctgtagaatacccggctgggggagtacaatatcaaagagcggcaacgcattattcttggatgctaatcattgtcatcattctcatcatttttattatcatctgtctacgagcacctcgaaaaatctaccatcactggaaagacagtaaacagtacggacaagtgtttatgacagacacggaactgtga

SEQ ID NO: 13697 - DNA, 21 bp, unidentified
  source 1..21: mol_type = other DNA
  misc_feature 1..21: note = Synthetic
atgagggtttatctactttga

SEQ ID NO: 13698 - DNA, 45 bp, unidentified
  misc_feature 1..45: note = Synthetic
  source 1..45: mol_type = other DNA
ataaaacggagtatgagcagatgcaaaatgagaattcatttatag

SEQ ID NO: 13699 - DNA, 21 bp, unidentified
  misc_feature 1..21: note = Synthetic
  source 1..21: mol_type = other DNA
atgagggtttatctactttga

SEQ ID NO: 13700 - DNA, 45 bp, unidentified; identical to SEQ ID NO: 13698
  misc_feature 1..45: note = Synthetic
  source 1..45: mol_type = other DNA

SEQ ID NO: 13701 - DNA, 21 bp, unidentified
  source 1..21: mol_type = other DNA
  misc_feature 1..21: note = Synthetic
atgagggtttatctactttga

SEQ ID NO: 13702 - DNA, 33 bp, unidentified
  source 1..33: mol_type = other DNA
  misc_feature 1..33: note = Synthetic
atgggcagatgcaaaatgagaattcatttatag

SEQ ID NO: 13703 - DNA, 135 bp, unidentified; identical to SEQ ID NO: 5781
  misc_feature 1..135: note = Synthetic
  source 1..135: mol_type = other DNA

SEQ ID NO: 13704 - DNA, 462 bp, unidentified
  source 1..462: mol_type = other DNA
  misc_feature 1..462: note = Synthetic
aagagtatcgttatgatgcttagaacgtggatatcattaccgatggtactgcttgacgcgtactgtttttgtatttttgtgagttgttcaatcagcacgacgactgctcccgtggaatggaagtctcccgaccgtcagattcctatgaatattacttgcgctaattactcagggaccgtcaacggcaacgttacatttcgaggtcttcagaacaaaacggaagattttttgcactggctgttagggtggggtcataagtccatttgttcattttttccgaaactccaaggcaataaagaacaacattatatgtatggaataacgaatctcacgtataactgtacctatgaccgcctgacgttgctgaatttgacgacggaaaacagcggaaagtattatttcaaacgagaagatgtgaattccaccttttattactcttgttacaacctgaccgtgacctaa

SEQ ID NO: 13705 - DNA, 48 bp, unidentified
  source 1..48: mol_type = other DNA
  misc_feature 1..48: note = Synthetic
atggaagtctcccgaccgtcagattcctatgaatattacttgcgctaa

SEQ ID NO: 13706 - DNA, 1203 bp, unidentified
  misc_feature 1..1203: note = Synthetic
  source 1..1203: mol_type = other DNA
atgcgcgcttcaaagagcgaccgttttctcatgtcctcctgggtcaagctgttgtttgtggctgtaattatgtacatttgctctgcagtcgtgcccatggccgccacgtacgagggccttggtttcccctgctacttcaacaatctggtaaactacagcgcgctaaacctcacggtgcgcaactcagcgaagcacctcaccccgaccctgtttttagagaaaccagagatgctggtgtacatattttggacttttatcgtggacggcattgccatagtatactactgtctcgcggcggtggccgtatatcgggccaagcatgttcacgccactaccatgatgagcatgcaatcctggatagcgctacttggatcacatagcgtgctttatgtcgccatcttaaggatgtggagcatgcaactgtttatccatgttctgtcatataaacacgtacttatggcagcctttgtctactgcattcatttttgcatatcctttgcccacatccagtcactgataacatgtaactccgcccagtgggaaatacctctcctggaacagcacgtacctgataataccatgatggagtcactgctgactcggtggaaaccggtctgcgtcaacctgtacctatcaacaaccgccttggaaatgctgctgttttcattgagcaccatgatggccgttggcaacagcttttacgtgctcgtgtcagacgccatttttggtgcggtgaacatgttcctagccttgacggtcgtgtggtacataaacacggaatttttcctggtaaagtttatgagacggcaggtaggcttttacgtgggagtattcgtgggttatctgattctactgctgcctgtcatcaggtatgaaaacgcgttcgtgcaggctaatctccactacatagtggctatcaatatctcctgtatccctatactgtgcatcctagccatcgttatacgcgttataaggagcgactggggactctgtacgccgagtgcggcatacatgcctctggcgacgtcggcgccgacggtcgatagaactccgactgttcaccagaaaccgccgcccctcccagcaaagaccagagcccgcgccaaagtgaaggacatatcgacgcccgccccgaggacccaataccagtccgaccatgaaagtgacagtgaaatcgacgaaacgcaaatgatattcatttag

SEQ ID NO: 13707 - DNA, 1203 bp, unidentified
  source 1..1203: mol_type = other DNA
  misc_feature 1..1203: note = Synthetic
atgcgcgcttcaaagagcgaccgttttctcatgtcctcctgggtcaagctgttgtttgtggctgtaattatgtacatttgctctgcagtcgtgcccatggccgccacgtacgagggccttggtttcccctgctacttcaacaatctggtaaactacagcgcgctaaacctcacggtgcgcaactcagcgaagcacctcaccccgaccctgtttttagagaaaccagagatgctggtgtacatattctggacttttatcgtggacggcattgccatagtatactactgtctcgcggcggtggccgtatatcgggccaagcatgttcacgccactaccatgatgagcatgcaatcctggatagcgctacttggatcacatagcgtgctttatgtcgccatcttaaggatgtggagcatgcaactgtttatccatgttctgtcatataaacacgtacttatggcagcctttgtctactgcattcatttttgcatatcctttgcccacatccagtcactgataacatgtaactccgcccagtgggaaatacctctcctggaacagcacgtacctgataataccatgatggagtcactgctgactcggtggaaaccggtctgcgtcaacctgtacctatcaacaaccgccttggaaatgctgctgttttcattgagcaccatgatggccgttggtaacagcttttacgtgctcgtgtcagacgccatttttggtgcggtgaacatgttcctagccttgacggtcgtgtggtacataaacacggaatttttcctggtaaagtttatgagacggcaggtaggcttttacgtgggagtattcgtgggttatctgattctactgctgcctgtcatcaggtatgaaaacgcgttcgtgcaggctaatctccactacatagtggctatcaatatctcctgtatccctatactgtgcatcctagccatcgttatacgcgttataaggagcgactggggactctgtacgccgagtgcggcatacatgcctctggcgacgtcggcgccgacggtcgatagaactccgactgttcaccagaaaccgccgcccctcccagcaaagaccagagcccgcgccaaagtgaaggacatctcgacgcccgccccgaggacccaataccagtccgaccatgaaagtgacagtgaaatcgacgaaacgcaaatgatattcatttag

SEQ ID NO: 13708 - DNA, 222 bp, unidentified
  misc_feature 1..222: note = Synthetic
  source 1..222: mol_type = other DNA
atgtccatgggcgcgctcaccgacctcggccagaacatgctctatgccaactccgcccacgcgctagacatgaatttcgaagtcgaccccatggatgagtccacccttctctatgttgtcttcgaagtcttcgacgtcgtccgagtgcaccagccccaccgcggcgtcatcgaggccgtctacctgcgcacccccttctcggccggtaacgccaccacctaa

SEQ ID NO: 13709 - DNA, 126 bp, unidentified
  misc_feature 1..126: note = Synthetic
  source 1..126: mol_type = other DNA
atgttgtcttcgaagtcttcgacgtcgtccgagtgcaccagccccaccgcggcgtcatcgaggccgtctacctgcgcacccccttctcggccggtaacgccaccacctaaattgctacttgcatga

SEQ ID NO: 13710 - DNA, 39 bp, unidentified; identical to SEQ ID NO: 5792
  source 1..39: mol_type = other DNA
  misc_feature 1..39: note = Synthetic

SEQ ID NO: 13711 - DNA, 201 bp, unidentified
  misc_feature 1..201: note = Synthetic
  source 1..201: mol_type = other DNA
atgtacctgagcattgtcagaattattctggttgcatgcttagggcttgtattaaaactgcccaagctgatacagctggtctttatacaaattttcgaattgacgtcccatctgcagaatcaactggtactcaatcagtttctgtcgatcgtgagtcaacttcaactcatgatggtcctaccgaacatgttactagtgtga

SEQ ID NO: 13712 - DNA, 33 bp, unidentified; identical to SEQ ID NO: 5799
  source 1..33: mol_type = other DNA
  misc_feature 1..33: note = Synthetic

SEQ ID NO: 13713 - DNA, 1713 bp, unidentified
  source 1..1713: mol_type = other DNA
  misc_feature 1..1713: note = Synthetic
atggcgctctccgggcacgtcttgatagaccccgcccgactgcccagggacacaggccccgaactcatgtgggccccaagccttcgcaactcactgcgcgtgtcccccgaagcgctcgagctggcagagcgggaggccgaaagggccaggtcggagcggtgggacaggtgtgcccaggtgctcaaaaataggctgctccgcgtggagctggacggcatcatgcgtgaccacctggccagggcggaggagatccgccaggacctggatgctgtagtggccttctctgatggcctggagagcatgcaggtcaggtccccctccacgggagggcgctctgcgccagccccgccctccccatccccagcccagccgttcactcggctcaccgggaacgcccagtatgcagtctcaatctctcccacggacccccctctgatggtggccggcagcctggctcaaacgctgcttggtaatctgtacgggaacatcaaccagtgggtaccgtccttcggaccctggtacaggaccatgtcggctaatgccatgcagcggcgcgtgttccctaagcagctgaggggcaacctgaactttaccaactccgtctccctaaagctgatgacagaagtggtggcggtgcttgagggcaccacccaggactttttctcagacgtcaggcacctgccagacctccaggctgccctgatcctctcggtggcctacctgctactccaggggggctcctcacaccagcagcgccccctccctgcctcacgggaagagctgctggagctgggcccggagagcctagagaaaatcatcgccgacctcaaggccaagtcacccggcggaaattttatgattttaacaagcggaaacaaggaagcgcgccagtcaatagcccctctcaaccgacaggcggcatatccacccggcacattcgcggacaataagatttacaacctgtttgtgggagcgggactactgcccacgacggccgcgctgaacgtgcccggggcggcgggtcgggaccgggacctggtgtaccggatcgccaaccagatctttggggaggatgtgccccccttctcatctcaccagtggaacctgcgcgtaggtttagccgcactcgaggccctgatgctcgtctacacgctctgcgagaccgccaacctggccgaggcggccacccggcgtctacacctatcgtccctgctcccccaggcaatgcagcggcgcaagcctgccatggcgtcagctggtatgccgggcgcctatccagtccagacgcttttccgccacggggagctcttccgcttcatctgggcccactacgtgaggcccacggtggcggcagacccccaggcctccatcagctctcttttccccgggctggttttgctggccctggagctgaagttgatggatgggcaggctccctcccattatgccataaacctgaccggacaaaagtttgacaccctctttgagattatcaaccagaagcttttatttcacgacccggctgccatgctggcggcgcgcacacagctgcgtctagccttcgaggacggcgtcggtgttgccctggggcgcccctcgcccatgcttgcggcgcgggagatcctggagcgtcagttctcagcctcggatgactacgaccggctgtacttcctgacgctgggctacctggcctccccggtggccccaagctga

SEQ ID NO: 13714 - DNA, 1713 bp, unidentified
  source 1..1713: mol_type = other DNA
  misc_feature 1..1713: note = Synthetic
atggcgctctccgggcacgtcttgatagaccccgcccgactgcccagggacacaggccccgaactcatgtgggccccaagccttcgcaactcactgcgcgtgtcccccgaagcgctcgagctggcagagcgggaggccgaaagggccaggtcggagcggtgggacaggtgtgcccaggtgctcaaaaataggctgctccgcgtggagctggacggcatcatgcgtgaccacctggccagggcggaggagatccgccaggacctggatgctgtagtggccttctctgatggcctggagagcatgcaggtcaggtccccctccacgggagggcgctctgcgccagccccgccctccccatccccagcccagccgttcactcggctcaccgggaacgcccagtatgcagtctcaatctctcccacggacccccctctgatggtggccggcagcctggctcaaacgctgcttggtaatctgtacgggaacatcaaccagtgggtaccgtccttcggaccctggtacaggaccatgtcggctaatgccatgcagcggcgcgtgttccctaagcagctgaggggcaacctgaactttaccaactccgtctccctaaagctgatgacagaagtggtggcggtgcttgagggcaccacccaagactttttctcagacgtcaggcacctgccagacctccaggctgccctgatcctctcggtggcctacctgctactccaggggggctcctcacaccagcagcgccccctccctgcctcacgggaagagctgctggagctgggcccggagagcctagagaaaatcatcgccgacctcaaggccaagtcacccggcggaaattttatgattttaacaagcggaaacaaggaagcgcgccagtcaatagcccctctcaaccgacaggcggcatatccacccggcacattcgcggacaataagatttacaacctgtttgtgggagcgggactactgcccacgacggccgcgctgaacgtgcccggggcggcgggtcgggaccgagacctggtgtaccggatcgccaaccagatctttggggaggacgtgccccccttctcatctcaccagtggaacctgcgcgtaggtttagccgcactcgaggccctgatgctcgtctacacgctctgcgagaccgccaacctggccgaggcggccacccggcgtctacacctatcgtccctgctcccccaggcaatgcagcggcgcaagcctgccatggcgtcagctggtatgccgggcgcctatccagtccagacgcttttccgccatggggagctcttccgcttcatctgggcccactacgtgaggcccacggtggcggcagacccccaggcctccatcagctctcttttccccgggctggttttgctggccctggagctgaagttgatggatgggcaggctccctcccattatgccataaacctgaccggacaaaagtttgacaccctctttgagattatcaaccagaagcttttatttcacgacccggctgccatgctggcggcacgcacacagctgcgtctagccttcgaggacggcgtcggtgttgccctggggcgcccctcgcccatgcttgcggcgcgggagatcctggagcgtcagttctcagcctcggatgactacgaccggctgtacttcctgacgctgggctacctggcctccccggtggccccaagctga

SEQ ID NO: 13715 - DNA, 1713 bp, unidentified
  misc_feature 1..1713: note = Synthetic
  source 1..1713: mol_type = other DNA
atggcgctctccgggcacgtcttgatagaccccgcccgactgcccagggacacaggccccgaactcatgtgggccccaagccttcgcaactcactgcgcgtgtcccccgaagcgctcgagctggcagagcgggaggccgaaagggccaggtcggagcggtgggacaggtgtgcccaggtgctcaaaaataggctgctcggcgtggagctggacggcatcatgcgtgaccacctggccagggcggaggagatccgccaggacctggatgctgtagtggccttctctgatggcctggagagcatgcaggtcaggtccccctccacgggagggcgctctgcgccagccccgccctccccatccccagcccagccgttcactcggctcaccgggaacgcccagtatgcagtctcaatctctcccacggacccccctctgatggtggccggcagcctggctcaaacgctgcttggtaatctgtacgggaacatcaaccagtgggtaccgtccttcggaccctggtaccggaccatgtcggctaatgccatgcagcggcgcgtgttccctaagcagctgaggggcaacctgaactttaccaactccgtctccctaaagctgatgacagaagtggtggcggtgcttgagggcaccacccaggactttttctcagacgtcaggcacctgccagacctccaggctgccctgatcctctcggtggcctacctgctactccaggggggctcctcacaccagcagcgccccctccctgcctcacgggaagagctgctggagctgggcccggagagcctagagaaaatcatcgctgacctcaaggccaagtcacccggcggaaattttatgattttaacaagcggaaacaaggaagcgcgccagtcaatagcccctctcaaccgacaggcggcatatccacccggcacattcgcggacaataagatttacaacctgtttgtgggagcgggactactgcccacgacggccgcgctgaacgtgcccggggcggcgggtcgggaccgggacctggtgtaccggatcgccaaccagatctttggggaggatgtgccccccttctcatctcaccagtggaacctgcgcgtaggtttagccgcactcgaggccctgatgctcgtctacacgctctgcgagaccgccaacctggccgaggcggccacccggcgtctacacctatcgtccctgctcccccaggcgatgcagcggcgcaagcctgccgtggcgtcagctggcatgccgggcgcctatccagtccagacgcttttccgccatggggagctcttccgcttcatctgggcccactacgtgaggcccacggtggcggcagacccccaggcctccatcagctctcttttccccgggctggttttgctggccctggagctgaagttgatggatgggcaggctccctcccattatgccataaacctgaccggacaaaagtttgacaccctctttgagattatcaaccagaagcttttatttcacgacccggctgccatgctggcggcgcgcacacagctgcgtctagccttcgaggacggcgtcggtgttgccctggggcggccctcgcccacgcttgcggcgcgggagatcctggagcgtcaattctccgcctcggatgactacgaccggttgtacttcctgacgctgggctacctggcctcccctgtggccccaagctga

SEQ ID NO: 13716 - DNA, 162 bp, unidentified; identical to SEQ ID NO: 5802
  misc_feature 1..162: note = Synthetic
  source 1..162: mol_type = other DNA

SEQ ID NO: 13717 - DNA, 162 bp, unidentified; identical to SEQ ID NO: 5802
  source 1..162: mol_type = other DNA
  misc_feature 1..162: note = Synthetic

SEQ ID NO: 13718 - DNA, 558 bp, unidentified
  misc_feature 1..558: note = Synthetic
  source 1..558: mol_type = other DNA
acgctcccgggcaaacagggcagagaggcgggaatgtccgccaccctccccctgccccgttgcaccgatagcatggccgccagagttccaatagaggagctccgagagttccgccacctccgggggcactgtcgagaagacgttgtaggtgtccagcgctctggtcgccccctctgcctccggccgccccgggcccgggaccgcgccctcctctgggccgcccggcctcgccttctcctcagcctccaacaggtgcccgagcccagcctgccggacttcattctcaaacagtcccgagaccggctccggattcaccggcaccgccaggtggttacaggagacgtgggtcccctctgccgtggaagggttgccgtggttgggcagaaccatcagctcgcccacacagcgccagcagggcacagaggtgatgtagaggcgcgggtctgggatgggacttacgccccgaaagcggcccagcagatccagggcccgttccaggctctccagccccatggtgtgagacatgcaataaaacacgctattgattctcttcattaa

SEQ ID NO: 13719 - DNA, 30 bp, unidentified; identical to SEQ ID NO: 5808
  source 1..30: mol_type = other DNA
  misc_feature 1..30: note = Synthetic

SEQ ID NO: 13720 - DNA, 2574 bp, unidentified
  source 1..2574: mol_type = other DNA
  misc_feature 1..2574: note = Synthetic
atgactcggcgtagggtgctaagcgtggtcgtgctgctagccgccctggcgtgccgcctcggtgcgcagaccccagagcagcccgcaccccccgccaccacggtgcagcctaccgccacgcgtcagcaaaccagctttcctttccgagtctgcgagctctccagccacggcgacctgttccgcttctcctcggacatccagtgtccctcgtttggcacgcgggagaatcacacggagggcctgttgatggtgtttaaagacaacattattccctactcgtttaaggtccgctcctacaccaagatagtgaccaacattctcatctacaatggctggtacgcggactccgtgaccaaccggcacgaggagaagttctccgttgacagctacgaaactgaccagatggataccatctaccagtgctacaacgcggtcaagatgacaaaagatgggctgacgcgcgtgtatgtagaccgcgacggagttaacatcaccgtcaacctaaagcccaccgggggcctggccaacggggtgcgccgctacgccagccagacggagctctatgacgcccccgggtggttgatatggacttacagaacaagaactaccgtcaactgcctgataactgacatgatggccaagtccaacagccccttcgacttctttgtgaccaccaccgggcagactgtggaaatgtcccctttctatgacgggaaaaataaggaaaccttccatgagcgggcagactccttccacgtgagaactaactacaagatagtggactacgacaaccgagggacgaacccgcaaggcgaacgccgagccttcctggacaagggcacttacaccctatcttggaagctcgagaacaggacagcctactgcccgcttcaacactggcaaacctttgactcgaccatcgccacagaaacagggaagtcaatacattttgtgactgacgagggcacctctagcttcgtgaccaacacaaccgtgggcatagagctcccggacgccttcaagtgcatcgaagagcaggtgaacaagaccatgcatgagaagtacgaggccgtccaggatcgttacacgaagggccaggaagccattacatattttataacgagcggaggattgttattagcttggctacctctgaccccgcgctcgttggccaccgtcaagaacctgacggagcttaccactccgacttcctcaccccccagcagtccatcgccccccgccccacccgcggcccgcgggagcacctccgccgccgttctgaggcgccggaggcgggatgcggggaatgccaccacaccggtgccccccgcggcccccgggaagtccctgggcaccctcaacaatcccgccaccgtccagatccaatttgcctacgattccctgcgccgccagatcaaccgcatgctgggagacctcgcgcgggcctggtgcctggagcagaagaggcagaacatggtgctgagagaactaaccaagattaatcccaccaccgtcatgtccagcatctacggtaaggcggtggcggccaagcgcctgggggatgtcatctcagtctcccagtgcgtgcccgttaaccaggccaccgtcaccctgcgcaagagcatgagggtccctggctccgagaccatgtgctactcgcgccccctggtgtccttcagctttatcaacgacaccaagacctacgagggacagctgggcaccgacaacgagatcttcctcacaaaaaagatgacggaggtgtgccaggcgaccagccagtactacttccagtccggcaacgagatccacgtctacaacgactaccaccactttaaaaccatcgagctggacggcattgccaccctgcagaccttcatctcactaaacacctccctcatcgagaacattgactttgcctccctggagctgtactcacgggacgaacagcgtgcctccaacgtctttgacctggagggcatcttccgggagtacaacttccaggcgcaaaacatcgccggcctgcggaaggatttggacaatgcagtgtcaaacggaagaaatcaattcgtggacggcctgggggaacttatggacagtctgggtagcgtgggtcagtccatcaccaacctagtcagcacggtggggggtttgtttagcagcctggtctctggtttcatctccttcttcaaaaaccccttcggcggcatgctcattctggtcctggtggcgggggtggtgatcctggttatttccctcacgaggcgcacgcgccagatgtcgcagcagccggtgcagatgctctaccccgggatcgacgagctcgctcagcaacatgcctctggtgagggtccaggcattaatcccattagtaagacagaattacaagccatcatgttagcgctgcatgagcaaaaccaggagcaaaagagagcagctcagagggcggccggaccctcagtggccagcagagcattgcaggcagccagggaccgttttccaggcctacgcagaagacgctatcacgatccagagaccgccgccgcactgcttggggaggcagagactgagttttaa

SEQ ID NO: 13721 - DNA, 30 bp, unidentified; identical to SEQ ID NO: 5808
  source 1..30: mol_type = other DNA
  misc_feature 1..30: note = Synthetic

SEQ ID NO: 13722 - DNA, 30 bp, unidentified; identical to SEQ ID NO: 5808
  misc_feature 1..30: note = Synthetic
  source 1..30: mol_type = other DNA

SEQ ID NO: 13723 - DNA, 2574 bp, unidentified
  misc_feature 1..2574: note = Synthetic
  source 1..2574: mol_type = other DNA
atgactcggcgtagggtgctaagcgtggtcgtgctgctagccgccctggcgtgccgtctcggtgcgcagaccccagagcagcccgcaccccccgccaccacggtgcagcctaccgccacgcgtcagcaaaccagctttcctttccgagtctgcgagctctccagccacggcgacctgttccgcttctcctcggacatccagtgtccctcgtttggcacgcgggagaatcacacggagggcctgttgatggtgtttaaagacaacattattccctactcgtttaaggtccgctcctacaccaagatagtgaccaacattctcatctacaatggctggtacgcggactccgtgaccaaccggcacgaggagaagttctccgttgacagctacgaaactgaccagatggataccatctaccagtgctacaacgcggtcaagatgacaaaagatgggctgacgcgcgtgtatgtagaccgcgacggagttaacatcaccgtcaacctaaagcccaccgggggcctggccaacggggtgcgccgctacgccagccagacggagctctatgacgcccccgggtggttgatatggacttacagaacaagaactaccgtcaactgcctgataactgacatgatggccaagtccaacagccccttcgacttctttgtgaccaccaccgggcagactgtggaaatgtcccctttctatgacgggaaaaataaggaaaccttccatgagcgggcagactccttccacgtgagaactaactacaagatagtggactacgacaaccgagggacgaacccgcaaggcgaacgccgagccttcctggacaagggcacttacacgctatcttggaagctcgagaacaggacagcctactgcccgcttcaacactggcaaacctttgactcgaccatcgccacagaaacagggaagtcaatacattttgtgactgacgagggcacctctagcttcgtgaccaacacaaccgtgggcatagagctcccggacgccttcaagtgcatcgaagagcaggtgaacaagaccatgcatgagaagtacgaggccgtccaggatcgttacacgaagggccaggaagccattacatattttataacgagcggaggattgttattagcttggctacctctgaccccgcgctcgttggccaccgtcaagaacctgacggagcttaccactccgacttcctcaccccccagcagtccatcgcccccagccccatccgcggcccgcgggagcacccccgccgccgttctgaggcgtcggaggcgggatgcggggaacgccaccacaccggtgccccccacggcccccgggaagtccctgggcaccctcaacaatcccgccaccgtccagatccaatttgcctacgactccctgcgccgccagatcaaccgcatgctgggagaccttgcgcgggcctggtgcctggagcagaagaggcagaacatggtgctgagagaactaaccaagattaatccaaccaccgtcatgtccagcatctacggtaaggcggtggcggccaagcgcctgggggatgtcatctcagtctcccagtgcgtgcccgttaaccaggccaccgtcaccctgcgcaagagcatgagggtccctggctccgagaccatgtgctactcgcgccccctggtgtccttcagctttatcaacgacaccaagacctacgagggacagctgggcaccgacaacgagatcttcctcacaaaaaagatgacggaggtgtgccaggcgaccagccagtactacttccagtccggcaacgagatccacgtctacaacgactaccaccactttaaaaccatcgagctggacggcattgccaccctgcagaccttcatctcactaaacacctccctcatcgagaacattgactttgcctccctggagctgtactcacgggacgaacagcgtgcctccaacgtctttgacctggagggcatcttccgggagtacaacttccaggcgcaaaacatcgccggcctgcggaaggatttggacaatgcagtgtcaaacggaagaaatcaattcgtggacggcctgggggaacttatggacagtctgggtagcgtgggtcagtccatcaccaacctagtcagcacggtggggggtttgtttagcagcctggtctctggtttcatctccttcttcaaaaaccccttcggcggcatgctcattctggtcctggtggcgggggtggtgatcctggttatttccctcacgaggcgcacgcgccagatgtcgcagcagccggtgcagatgctctaccccgggatcgacgagctcgctcagcaacatgcctctggtgagggtccaggcattaatcccattagtaagacagaattacaagccatcatgttagcgctgcatgagcaaaaccaggagcaaaagagagcagctcagagggcggccggaccctcagtggccagcagagcattgcaggcagccagggaccgttttccaggcctacgcagaagacgctatcacgatccagagaccgccgccgcactgcttggggaggcagagactgagttttaa

SEQ ID NO: 13724 - DNA, 195 bp, unidentified
  source 1..195: mol_type = other DNA
  misc_feature 1..195: note = Synthetic
aagatggaggaagaaatagaaaacataaaaaaagaatatgaaagtataaaagatgaaacatcaagtttacaagaagaaactaaaaaattagtagacgatatttctactgctcgcgaaacaacgatggaggcacttaactctataatgaaggaattaacacaaaaaattcaaactggtaatttaattggcaactaa

SEQ ID NO: 13725 - DNA, 7296 bp, unidentified; identical to SEQ ID NO: 11679
  source 1..7296: mol_type = other DNA
  misc_feature 1..7296: note = Synthetic

SEQ ID NO: 13726 - DNA, 2292 bp, unidentified
  source 1..2292: mol_type = other DNA
  misc_feature 1..2292: note = Synthetic
attatattcaatatggaaagaataaaagaactaagaaatttgatgtcgcaatctcgcactcgcgagatactgacaaaaaccactgtggatcatatggccataattaagaagtacacatcaggaagacaggagaagaatcccgctcttagaatgaaatggatgatggcgatgaaatacccgatcacagctgacaaaagaataatggagatgatccctgaaaggaatgagcaaggccaaactctttggagcaaaacaaatgacgctggatcagacagggtaatggtatcacctctggctgtaacgtggtggaacagaaatggaccaacaacaagtacagtccattatccaaaggtgtataaaacctactttgaaaaggttgaaagattaaaacacggaacctttggccctgttcatttccggaatcaagtcaaaatacgccgcagggttgacatgaaccctggccatgcagatctcagcgctaaagaagcacaagatgtcatcatggaggtcgttttcccaaatgaagttggagccaggatattgacatcagaatcacagctgacaataacaaaggaaaagagggaggaactcaagaattgtaatattgctcctttaatggtggcatatatgttggaaagagaattggttcgcaagaccagattcctacccgtggctggcgggacaagcagcgtatatatagaagtattgcatttgactcaaggaacttgctgggagcagatgtacacaccaggaggggaggtaagaaatgatgatgttgaccaaagtttaatcattgctgctaggaacattgtcaggagagcaacagtatcagcagacccattggcttcactcctggaaatgtgccatagcacacaaattggcggagtaagaatggtagacatccttaaacaaaacccaacagaagagcaagctgtagatatatgcaaggcagcaatgggtttgaaaatcagctcatccttcagctttggagggttcactttcaaaagaacaaaggggtcttctgtcaaaagagaggaagaagtgcttacaggcaacctccaaacattgaagataaaagtacatgaaggatatgaggaattcacaatggttggacgaagagcaacagccattctaagaaaagcaaccagaaggatgatccaactgatagtcagcggaagggacgagcaatcaattgctgaggcaattattgtggcaatggtgttctcacaagaagattgcatggtaaaggcagtccgaggtgatttgaatttcgtaaacagagcaaatcaacgactgaatcccatgcaccaactcctgagacactttcaaaaggatgcaaaggtgctgtttcaaaactggggaattgaacccatcgacaatgtcatgggtatgattggaatattgcctgacatgacccccagcacggaaatgtcactaagaggagtgagagttagcaaaatgggggtggatgaatattctagcactgaaagggtggtcgtgagcattgaccgtttcttaagggtccgagatcagcgaggaaatgtactcctatcccctgaagaagttagtgaaacacagggaatggaaaagttgacgataacttattcatcgtctatgatgtgggagattaacgggccagaatcagtgctagttaacacatatcaatggatcattaggaattgggagactgtaaagatccaatggtcccaagaacccaccatgctatacaataagatggagtttgaaccatttcaatctttagtaccaaaggctgccagaagccaatatagtggatttgtgagaacgctattccagcagatgcgtgatgttttgggaacgttcgacactgttcaaataatcaaactactaccatttgcagcagccccaccggaacagagtaggatgcaattttcttctctgactgtgaatgtgaggggatcaggaatgagaatacttgtgagaggtaactcccctgcatttaactacaacaagacaactaagaggcttacaatacttgggaaggacgcaggtgcgcttacagaggacccagatgaaggaacagcaggagtagagtctgcagtattgagaggatttctaatcctcggcaaagaagacaaaagatatggaccagcattaagcatcaatgaactgagcaatcttacgaaaggggagaaagctaatgtattgatagggcaaggagacgtagtgttggtaatgaaacggaaacgggactctagcatacttactgacagccagacagcgaccaaaagaattcggatggccatcaattag

SEQ ID NO: 13727 - DNA, 1626 bp, unidentified
  misc_feature 1..1626: note = Synthetic
  source 1..1626: mol_type = other DNA
atgccacaacaacaagttgcccatacatgcgtgatgttgtggggtatcatatctacagtgagcggtatcaacactgaagcgctcagtcagtatggtgtcgtagtaaccaacgttagacaactcacctactacacacaggcaggcagtacataccttgcagtccgcctccttccatcacttgcttctccagaccagtcttgtgccctgcatagtataatcaactataatgcaaccttacaggctatcttaagtcccattgctgaaaatctgaatctaatcagcacagctctaagagagcaacaccgcaaaaaacgttttgcaggtgttgcgattggtttaactgcactaggggttgccacggctgcacaggccaccgccgctgtggcacttgttcgggccaacaaaaacgcagagaaagtcgaacaactaagccaggcacttggtgaaactaatgccgctatttccgatctcatcgatgcaactaagaatcttggctttgccgttcaagcaatccaaaatcagatcaatacagcaatattaccacaaatccacaatttatcatgtcaggtgatagatgcacaacttggtaacattctgtccttgtatctcacagaattgaccacagtattccagccccaattaactaatcctgctctatctcccctcacgattcaggcgctcagggctgtgttaggtacaacattacctgctctgttgtcagagaagcttaaatctaatatcccgctgggtgaccttatgagctcgggattgctcaaaggtcaattagtaggattaaacctccagaatatgctcatgattattgaattatacatccctaccctgtccactcatagcacagccaaagtattggatcttgtcacgatatcctcacatgtcaatggcagagaggtggaaattcaggtaccgaatcgagtcctagaattaggcagcgaggtactcggatatgggggttcagagtgtgccctcactatgagtcacatcctatgtccttttaatgacgccagggtactatcaactgatatgaagtattgtttacaaggcaatatcacacattgcatattctcacctgtagtaggcagcttcttaagaagatttgccctagtcaatggtgttgtcattgccaactgtgcagacatgtcttgcgtgtgctttgatccacaagagattatttatcagaactttcaagagcccaccacagtcatcgatattaagaaatgtggcaaagtgcagctggacaccctcaccttcacaatcagcacatttgcaaatcgcacatatggaccccctgcttatgttcctccagacaatataatacaatctgaaccattagatatctctggaaatttaattgcagtaaacaactctctgagttctgctttaaatcacctggctaccagtgagattctgcggaacgagcagatttggacaagtagtctaggaatctccactattgttgcattggtaattattggcatcctgatcatctgcttagttgtaacatgggctgctctatgggcactcttgaaagaagtgcgaggactgaactctgctgttaacagccaattgtcatcatatgttatgggagataaattcattagatactga

SEQ ID NO: 13728 - DNA, 78 bp, unidentified
  source 1..78: mol_type = other DNA
  misc_feature 1..78: note = Synthetic
atggacctcgtcaacgaaagaataatgatcctgaataaaaaggcgaaaaaggagatgggccaggcgtcctctgcgtga

SEQ ID NO: 13729 - DNA, 21 bp, unidentified
  misc_feature 1..21: note = Synthetic
  source 1..21: mol_type = other DNA
atgtattttaacactaattag

SEQ ID NO: 13730 - DNA, 75 bp, unidentified; identical to SEQ ID NO: 5833
  source 1..75: mol_type = other DNA
  misc_feature 1..75: note = Synthetic

SEQ ID NO: 13731 - DNA, 27 bp, unidentified
  misc_feature 1..27: note = Synthetic
  source 1..27: mol_type = other DNA
atgttaacaatactgcgactttgttaa

SEQ ID NO: 13732 - DNA, 111 bp, unidentified; identical to SEQ ID NO: 5838
  source 1..111: mol_type = other DNA
  misc_feature 1..111: note = Synthetic

SEQ ID NO: 13733 - DNA, 87 bp, unidentified
  source 1..87: mol_type = other DNA
  misc_feature 1..87: note = Synthetic
ctgacccagccaatcaaagcattataccagaccatggaatgcataccaaacattattgacactaatgacacacaaaattggttttaa

SEQ ID NO: 13734 - DNA, 459 bp, unidentified
  misc_feature 1..459: note = Synthetic
  source 1..459: mol_type = other DNA
atcccgaataccgcaaccaaaatatcgcggcacttcttagactcatctaaaaccatgcaggctatactaccaatatttttgcttctattgcttccctacgctgtctcaaccccagctgcctatagtactccaccagaacaccttagaaaatgcaaattccaacaaccgtggtcatttcttgcttgctatcgagaaaaatcagaaattcccccaaatttaataatgattgctggaataattaatataatctgttgcaccataatttcatttttgatataccccctatttgattttggctggaatgctcccaatgcacatgatcatccacaagacccagaggaacacattcccctacaaaacatgcaacatccaatagcgctaatagattacgaaagtgaaccacaacccccactactccctgctattagttacttcaacctaaccggcggagatgactga

SEQ ID NO: 13735 - DNA, 93 bp, unidentified
  source 1..93: mol_type = other DNA
  misc_feature 1..93: note = Synthetic
atgcaaattccaacaaccgtggtcatttcttgcttgctatcgagaaaaatcagaaattcccccaaatttaataatgattgctggaataattaa

SEQ ID NO: 13736 - DNA, 1191 bp, unidentified
  misc_feature 1..1191: note = Synthetic
  source 1..1191: mol_type = other DNA
atgcatcccgtactgcggcagatgcgcccccaccaccctccaccgcaacaacagccccctcctccacagccggcgcttctgcccccgccccagcagcagcagcaacttccagccacgaccgccgcggccgccgtgagcggggctggacagacttctcagtatgatcacctggccttggaagagggcgaggggctggcgcgcctgggggcgtcgtcgccggagcggcacccgcgcgtgcagatgaaaagggacgctcgcgaggcctacgtgcccaagcagaacctgttcagagacaggagcggcgaggagcccgaggagatgcgcgcggcccggttccacgcggggcgggagctgcggcgcggcctggaccgaaagagggtgctgagggacgaggatttcgaggcggacgagctgacggggatcagccccgcgcgcgcgcacgtggccgcggccaacctggtcacggcgtacgagcagaccgtgaaggaggagagcaacttccaaaaatccttcaacaaccacgtgcgcaccctgatcgcgcgcgaggaggtgaccctgggcctgatgcacctgtgggacctgctggaggccatcgtgcagaaccccaccagcaagccgctgacggcgcagctgttcctggtggtgcagcatagtcgggacaacgaggcgttcagggaggcgctgctgaatatcaccgagcccgagggccgctggctcctggacctggtgaacattctgcagagcatcgtggtgcaggagcgcgggctgccgctgtccgagaagctggcggccatcaacttctcggtgctgagtctgggcaagtactacgctaggaagatctacaagaccccgtacgtgcccatagacaaggaggtgaagatcgacgggttttacatgcgcatgaccctgaaagtgctgaccctgagcgacgatctgggggtgtaccgcaacgacaggatgcaccgcgcggtgagcgccagcaggcggcgcgagctgagcgaccaggagctgatgcacagcctgcagcgggccctgaccggggccgggaccgagggggagagctactttgacatgggcgcggacctgcactggcagcccagccgccgggccttggaggcggcaggcggtcccccctacatagaagaggtggacgatgaggtggacgaggagggcgagtacctggaagactga

SEQ ID NO: 13737 - DNA, 15 bp, unidentified
  source 1..15: mol_type = other DNA
  misc_feature 1..15: note = Synthetic
atgacgttagtatga

SEQ ID NO: 13738 - DNA, 15 bp, unidentified
  source 1..15: mol_type = other DNA
  misc_feature 1..15: note = Synthetic
atgacgttagtatga

SEQ ID NO: 13739 - DNA, 78 bp, unidentified; identical to SEQ ID NO: 5850
  misc_feature 1..78: note = Synthetic
  source 1..78: mol_type = other DNA

SEQ ID NO: 13740 - DNA, 78 bp, unidentified; identical to SEQ ID NO: 5850
  misc_feature 1..78: note = Synthetic
  source 1..78: mol_type = other DNA

SEQ ID NO: 13741 - DNA, 15 bp, unidentified
  source 1..15: mol_type = other DNA
  misc_feature 1..15: note = Synthetic
atggcgttagtatga

SEQ ID NO: 13742 - DNA, 15 bp, unidentified
  misc_feature 1..15: note = Synthetic
  source 1..15: mol_type = other DNA
atggcgttagtatga

SEQ ID NO: 13743 - DNA, 15 bp, unidentified
  misc_feature 1..15: note = Synthetic
  source 1..15: mol_type = other DNA
atggcgttagtatga

SEQ ID NO: 13744 - DNA, 15 bp, unidentified
  source 1..15: mol_type = other DNA
  misc_feature 1..15: note = Synthetic
atggcgttagtatga

SEQ ID NO: 13745 - DNA, 15 bp, unidentified
  misc_feature 1..15: note = Synthetic
  source 1..15: mol_type = other DNA
atggcgttagtatga

SEQ ID NO: 13746 - DNA, 15 bp, unidentified
  misc_feature 1..15: note = Synthetic
  source 1..15: mol_type = other DNA
atggcgttagtatga

SEQ ID NO: 13747 - DNA, 15 bp, unidentified
  misc_feature 1..15: note = Synthetic
  source 1..15: mol_type = other DNA
atggcgttagtatga

SEQ ID NO: 13748 - DNA, 15 bp, unidentified
  misc_feature 1..15: note = Synthetic
  source 1..15: mol_type = other DNA
atggcgttagtatga

SEQ ID NO: 13749 - DNA, 39 bp, unidentified; identical to SEQ ID NO: 2609
  source 1..39: mol_type = other DNA
  misc_feature 1..39: note = Synthetic

SEQ ID NO: 13750 - DNA, 39 bp, unidentified; identical to SEQ ID NO: 2609
  misc_feature 1..39: note = Synthetic
  source 1..39: mol_type = other DNA

SEQ ID NO: 13751 - DNA, 39 bp, unidentified; identical to SEQ ID NO: 2609
  misc_feature 1..39: note = Synthetic
  source 1..39: mol_type = other DNA

SEQ ID NO: 13752 - DNA, 39 bp, unidentified; identical to SEQ ID NO: 2609
  source 1..39: mol_type = other DNA
  misc_feature 1..39: note = Synthetic

SEQ ID NO: 13753 - DNA, 33 bp, unidentified; identical to SEQ ID NO: 5852
  source 1..33: mol_type = other DNA
  misc_feature 1..33: note = Synthetic

SEQ ID NO: 13754 - DNA, 36 bp, unidentified; identical to SEQ ID NO: 5853
  source 1..36: mol_type = other DNA
  misc_feature 1..36: note = Synthetic

SEQ ID NO: 13755 - DNA, 36 bp, unidentified; identical to SEQ ID NO: 5853
  misc_feature 1..36: note = Synthetic
  source 1..36: mol_type = other DNA

SEQ ID NO: 13756 - DNA, 1029 bp, unidentified
  misc_feature 1..1029: note = Synthetic
  source 1..1029: mol_type = other DNA
ctgagcgggacgttggcggcgaccccctttctgtggtgttttatcttcaaggccctgtactcgttcacactctttaccacagagatcacggccgtgtttttctggtcgctgccagtcacgcacttggccctgatatgcatgtgtctgtgccctgcggcgcaaaaacagctggaccggaggctggaatggatctgcgcgtcagcagtgtttgctgctgtagtttgcgcggccttttctgggtttacattttctcgtgtgcccttcataccgggtctgtgcgtacttaactgtttactgctgttaccttatccgctagccaccgcaacggcggtgtatcaggcgccgccaatagtacacaggtactatgagctgggcttctgcggagcatttatggtgtactaccttctgttgtttaagaaggtctttgtgtccggcgttttctggctgcccttcattgtcttcttggtcgggggacttttggcatttaggcacctggaacagcatgtgtacatcagggccggaatgcaaaggaggagggccatattcatcatgcccgggaagtacatcacctattcagtgttccaggcctgggcctactgtaggcgcgaggttgtcgtgtttgtgaccttactgctggccaccctgatatcgacggcctcgatcggcctgctgactccggtcctgattggcctggataagtatatgacgctattttatgttgggttactgtcatgcgtgggcgtatccgtcgcctcccgacgagcgctatttgttctcctgcctttggcggcagtgttgctcaccttggtgcacatacttggatcaggtccggatatgctcctagttaggtcctgcctctgctgcctattcctcgtgagcatgctggccgcaatgggggtcgagattcagctaattaggcgaaaactccacagggcacttaacgctccacagatggtattggccctatgcacggttggaaatttatgtatctcatgtctcctgtcggtaataaataaagttgttggctaa

SEQ ID NO: 13757 - DNA, 1029 bp, unidentified; identical to SEQ ID NO: 13756
  misc_feature 1..1029: note = Synthetic
  source 1..1029: mol_type = other DNA

SEQ ID NO: 13758 - DNA, 87 bp, unidentified
  source 1..87: mol_type = other DNA
  misc_feature 1..87: note = Synthetic
atgacttgcgagcgccaaaagcgatcacaagtccgcggctctgacaacacgagcctcgactccggagaggattcttctcgaaaatga

SEQ ID NO: 13759 - DNA, 39 bp, unidentified; identical to SEQ ID NO: 5856
  source 1..39: mol_type = other DNA
  misc_feature 1..39: note = Synthetic

SEQ ID NO: 13760 - DNA, 219 bp, unidentified
  source 1..219: mol_type = other DNA
  misc_feature 1..219: note = Synthetic
atgcaaggtgttaagctaggcaccggtttctctttgtctgacttgcccgcttatgttacagttgctaaggtgtcacacctttgcacttataagcgcgcattcttagacaaggtagacggtgttagcggttttgctgtttatgtgaagtccaaggtcggaaattaccgactgccctcaaacaaaccgagtggcgcggacaccgcattgttgagaacctaa

SEQ ID NO: 13761 - DNA, 27 bp, unidentified
  source 1..27: mol_type = other DNA
  misc_feature 1..27: note = Synthetic
gtgttagcggttttgctgtttatgtga

SEQ ID NO: 13762 - DNA, 87 bp, unidentified
  source 1..87: mol_type = other DNA
  misc_feature 1..87: note = Synthetic
atgatgatctttatgttccgtctctttacgaactgtatgatcttgatgtggagtctgccggtgaagataataatgaacaggcggtga

SEQ ID NO: 13763 - DNA, 15 bp, unidentified
  source 1..15: mol_type = other DNA
  misc_feature 1..15: note = Synthetic
atggcagtgacgtaa

SEQ ID NO: 13764 - DNA, 6771 bp, unidentified
  source 1..6771: mol_type = other DNA
  misc_feature 1..6771: note = Synthetic
atcactatggagacatacaagatcaatatttttagagacaggatcaaccagtgtcgaagtgctgaagaagccaaagacattgttgctgatcttcttatggctagacatgactattttggtagagaggtatgttattacctggatatcgagttccggcaggacgttccagcttatgacatacttcttgaatttctgccagccggcactgcttttaacatccgcaattgtacgccagacaattttatcattcataatggcaaactttatgtcattgattacaaggtatcaactgatcatgcatatggccaaaaaacttatgaaaaatacacccaaatctttggagacgcattgtcagaattgccgtttgattttgaggttgtgatcatccgtgctgaccctttgcgagatactattcatgtcaattcaaatcaattcttggaaatatttgggccgctcaacataaaccttgattttacttggttcttcaacttacgatccctaatatatgaaaaatataaggatgatgacagattccttgaaattgtgaatcaaggtgaattcacaatgactggaccctggatcgatgaggataccccggagctttattcgcaccctgtctttttagagttctatgattctttagatgagatggcaaagctgacattccatgaatctatgacatttgatgcaactcgcggtgaaaagtggaatcaaaacctgcaaaaagttataaatagatatggcaatgattataacgtttttgtgaaagacgccgctgcaggaatctttagatgtgaagggaattatcctaaaccaaatcatgatgagattacaatcggttggaatcaaatggttcagagagtgagtactgagcgaaatctgactcaggatgtcagcaagcaaaagccatctatccatttcatatggggccaacctgatgaagcatcaaatgcaacaacaccaaaactaatcaaaattgcaaaggcacttcaaaatatctctggtgagtctacatatataggcgcattcagagcactgggcatgcttatggacttttctgagaacacagccttatatgaagcacatactagcaagttgaaaagtatggcaagacagacatcaaagagaattgatactaaactggagccaataaaaataggcactgcaacaatttattgggagcaacaatttaaattggatactgaaataatgaatacaaaagataaatcacatttgctaaaggacttccttggtatagggggtcatgtgcaattctcaaaaaagaccattgacgatttagatactgacaaacctactattttggatttcaacaaaaaggaagtcattgatttctgcaaattccagtatgaaaatgtaaagaaaatattatctgaagataataatctagagcgtatagggtgttatttagaagaatatggtgcaaacattgcatcatgctcaaaggatacatggaatcagataaatcgaatagggaagtcaaattattgggcttgtattaaagatttttcagtcttgatgaaaaatatgctagcagtctctcaatataataggcacaatacttttcgcgtagtgtgttgtgcgaacaataatctgtttgggtttgtgatgccttcttctgatatcaaagcaaaacgatccacacttgtttatttcttagctgtattgcattctacccctcagaatgtgatgcatcatggtgcattgcatgcaacatttaaaacaggttcaaaataccttagtatctctaagggaatacgattggataaagaaagatgtcagcgtatagttagttcaccaggactttttatgttgactacattaatgtttacaggagacaatccaacactcaatttgactgatgtcatgaattttacattccacacttccctgtctataactaaggctatgctgtcacttacagaaccatcaaggtatatgataatgaattcattagccatatccagccatgttagagattacatagcagaaaaatttggcccttatacaaagaccagtttctctgtggtaatggcaaacttgattaaaagaggatgttatatggcatataatcaaagagataaagtggacatgagaaatatctgcctaactgattatgaaataacccaaaaaggtgtgagggataacagagatctatcatcgatctggtttgaaggctatgtatcattaaaggaatatattaaccagatatatctgccgttttactttaattcaaaaggtttgcatgaaaagcatcatgttatgatagatctggctaagacaattttagatatagaaagggatcagaggttaaatatcccaggaatatggtctacaacacctagaaagcagactgcaaatttaaatataactatttatgcagttgcaaaaaatctaataatggacactgctagacataattatatcaggtcacggatagaaaacacaaacaacttaaatagatcgatatgcactatttctacattcaccagctccaaatcatgtattaaggtaggagactttgagaaagaaaaaagctcagcaataaaaaaggctgcagattgtatgtcaaaagaaataaagaagtataccattgcaaacccagaatttgttgatgaagaattaatgaatgcaactataaggcattcacgctatgaagacttaaaaaaagcaatcccaaattatattgatattatgtcaaccaaagtatttgactctctataccagaaaataacaaggaaagagataaatgataaacccactgtgtatcacatactctctgctatgaagaatcacacagattttaagttcacattctttaataaaggccaaaaaacagcaaaggatagggaaatattcgtaggcgaatttgaggcaaaaatgtgcttgtatctagtggaaaggatatctaaagaacgctgcaagttgaacccagatgagatgatcagcgaaccaggcgattctaaattgaaaaaattggaagagcttgcagaatctgaaatacgattcacagcagcaactatgaaacaaatcaaagaacgttacttagcagaaatgggagaagcaagccatatgatcacatataaaccacattctgttaagattgaaatcaatgcagacatgtcaaaatggagtgctcaggatgttttattcaaatatttctggttgtttgcattggaccctgcactttatctgcaagaaaaagaaaggatattatacttcctgtgcaattatatgcaaaaaaagctagttttgcctgatgaaatgctctgtagtatccttgaccagcgtattaaacatgaggatgatataatatatgaaatgaccaatggcttatcacaaaattgggtcaatatcaaacgaaactggctgcaagggaatctcaattatacaagtagctacctgcattcatgttctatgaatgtttacaaggatattctaaagagggcagccactttactagaaggagaggtcttagtcaattctatggtccattctgatgacaatcatacttcaatagtgatgatccaggacaaattagatgatgacattattattgaattttctgcaaagctctttgaaaaaatatgcctaactttcggaaaccaggcaaatatgaagaagacatacataacaaatttcataaaagaatttgtttcactcttcaatatttacggcgagccattttctgtttatggtcgctttattttgacatctgttggcgattgtgcttttcttggaccatatgaagatgttgccagcaggttatctgcaacacagacagcaatcaaacatggagcaccgccatcgcttgcatggactgccattgcattaactcaatggataacacatagtacatataacatgctcccaggccaaatcaatgatcctacttcagttttacctagtcatgataggtttgagctgcctatagaattatgtggcttgataaattcagaattgcccactatagctatagcaggtttggaagcagataatctaagttatttagttaggttatcgaaaagaatgtctcctatacatctttgccgtgaaccaatccagcatcaatatgagaatatacatacatgggatattagcaggctgacgcaatgtgatatattcagacttaagcttttaagatacatgacattagactcaaccatgtcatctgatgacgggatgggcgaaactagcgagatgagatctaggtctcttttaacaccaaggaaattcactactgctagctcattgtctagattgcattcatatgctgattaccagaaaacaatacaagatcaacagaaagttgaagaattatttgaatattttatagccaatcctcaactattggtcacaaaaggtgagacttgtgaagagttttgtatgtctgtattgttcaggtacaacagtcgcaagttcaaagaatcattgtctattcagaatccagctcagctcttcatagagcaagtgttgtttgcaaataaacctatgatagactatacaagcattcatgataggttatttggtatacaagatgacccaaatataaatgatactacatgtattattggcaagaagacttttgttgaaacatatcagcaaataaaagctgatgtagaaaagtttacacttgatgtagaagacataaaaacaatttacagcttctgtataatgaatgaccctatattggttgcttgtgcaaacaacttgttaatttcaatacagggtgtagagatgcagcgattgggtatgacatgctgttatatgccagagattaaaagtcttaaagtaatttatcatagtcctgctcttgtactgcgtgcttatgtaacagataactatgagcaaaaagggatggagccagatgaaatgcgcagagacatatatcatttagaagaatttatagaaaagactaaattaagggcaaatatgcaagggagaattgcaaacaatgaggttaaattaatgaagcgagatttgaaatttgaagtgcaggaactaactaaattctatcagatctgttatgaatatgtgaaatcgacagaacacaaaattaaaatatttattcttccaaaaaaagcttacactcccattgatttctgctcattggtgacaggcaatctaatatcagacaataaatggatggttgttcattatttaaaacaaataactgtcccagcaaagaaagcacaaatagccacatctatagatctggagatacaaatagcctatgaatgtttcaggttaattacacactttgctgatatgtttctgaatgatgattctaaaaaggcttatattaatgcgatcattagcacatacacatacaaggacgttcaagtatccaatctctacaagaaaatcaaaagttcaaggttacgctcaaaaatcataccattattatatcacttgggcgacttgcaacaagtggatgttgacagatttgatgcagaaaaagcagaagagcagatcacgtggaataactggcaaacatcacgagaatttactactggcccgattgatctatcaatcaaaggttatggacggtcaataaggatcataggtgaagacaacaagcttacagctgcagaaatgcagttgtcaagagtgaggagtgacattgtatcaaggcatggacaagccttgttgaacaaaccccacgggctgaaattagagaaaatggaaccagtgactgatctaaacccaaaattatggtatattgcataccaattacgcgagaaaaagcggtatcactatggggtctttagtacatcttacatagaagagcacaactcaaggatagaggcgtctcggatacgtaagaccaataaatggataccagtttgccctattgctatatcaaagcaatcgtctgatgggaagcctaatcttgcgaagatccctatgttgaatattggggagataaaatttacaaaattgcagattgcagtagatgaccatgcaatgattaggaaggccccattcagtaagatggttttctttgatggcccacctatacaaagtggtggcattgatattggaaagcttatgaagaatcaaaatattctcaatctaagattagataatatacagagtataacgttgttagacttgtgccgtatattttcatgtcgaggatctaaagtggatcaagatgcatttgaatttttatctgatgaacctttagacgaagatgttattgatgaattagacagctcacctgcattagtagtatcttacacaaagaaatcaaccaagtccaatagttttaaaaatgttatagttagagcattgataagagaatgcgatatatttgaagatataatggatataacagacgatggatttacatctgatagtaatctagaagtactagaaaacttaacatggattttgaatatgctggcaacaaatcaatggtctacagaattattagcatgtatacacatgtgcttatatcgtaatgagatggaccatatctatcataattttcaagttccagaaatatttgtggacaatccaatttcattaaatgtaaaatgggatgaagtagtcatgtttttaaatgtactgcgagacagggattataaaattgaaccatgggtatctatactagatcattccttaactaaggctatagaatatgcttacaagaagatggatgaggagaggaagcaaaaatcaacaggcattaataaattcttaaagggtaaaaagatgggtggcagatcaaaatttgatttccaatag

SEQ ID NO: 13765 - DNA, 321 bp, unidentified
  source 1..321: mol_type = other DNA
  misc_feature 1..321: note = Synthetic
ctgaagaagccaaagacattgttgctgatcttcttatggctagacatgactattttggtagagaggtatgttattacctggatatcgagttccggcaggacgttccagcttatgacatacttcttgaatttctgccagccggcactgcttttaacatccgcaattgtacgccagacaattttatcattcataatggcaaactttatgtcattgattacaaggtatcaactgatcatgcatatggccaaaaaacttatgaaaaatacacccaaatctttggagacgcattgtcagaattgccgtttgattttgaggttgtga

SEQ ID NO: 13766 - DNA, 132 bp, unidentified
  source 1..132: mol_type = other DNA
  misc_feature 1..132: note = Synthetic
atttctagccgcgctaagaaccgtcttcccaggaccttaacgccgtcaccaccgtacacgagttttacgcgctttttttcggagacagggtgcctactcgcgacgcgtccgcctcttcctcgtgcaaattga

SEQ ID NO: 13767 - DNA, 2112 bp, unidentified
  misc_feature 1..2112: note = Synthetic
  source 1..2112: mol_type = other DNA
atgaacgcgcacttggccaacgaggtccagtacgatctcggccacggcccgggtcggccctcgtctttggttcacgtcatcatatccagcgagtgcctggcggccgcgggaatccctctggccgccctgatgcgcggccgccccggactcgggacggccgcaaacttccaggtcgaaatccagactcgggctcatgccaccggcgactgtaccccgtggtgcacggcgtttgccgcctacgtgcccgcggatgcggtgggggagcttctggcccccgtcgtgccggcacaccctggcctccttccgcgtgcgtccagcgccggggggttgttcgtctccctgcccgtggtgtgtgacgcgcagggcgtctatgacccgtacgccgtggcggcgctgcgccttgcgtggggctcgggggcgagctgtgcccgcgtgattctgtttagttacgacgagctcgtcccccccaacacgcgctacgcggccgacagcacgcgcatcatgcgcgtctgtcggcatttgtgccgctacgtcgctctgcttggcgccgccgccccgccggccgcgaaggaggctgcggcccacctgtccatgggtctgggggaaagcgcgtccccgcgtccgcagcccttggcccggccccacgcgggggcgcccgcagacccgcccatcgtcggggcgtccgacccccccatctccccggaggagcagctgacggcccccggcggcgacacgaccgcggcccaggacgtgtccatcgcacaggagaacgaggagatcctcgcgttggttcagcgggcagtgcaggacgtcacccgccgccacccggtccgagcgcggaccgggcgtgcggcctgtggcgttgcatcggggctacgccagggcgccctggttcaccaggccgtcagcgggggcgccatgggggcggctgacgcagatgcggtgctggcgggtctggagccccccggcgggggccgctttgtggccccagcgccccacgggcccgggggcgaggacatcctgaacgacgttctaacccttacccctggtaccgcaaagccgcggtcgctggtcgagtggttggatcgcggatgggaagccctggccggcggcgaccggccggactggctgtggagccgtcgttctatctccgtggtcctgcgccaccactacggaaccaagcagcgcttcgtcgtcgtctcctacgagaactccgtggcgtggggcgggcgacgcgcccgccctccgctgctgtcctcggcgctggccacggccctgaccgaggcctgcgccgcagaacgcgtcgtgcgcccccaccagctgtctcccgctgggcaggcggagctgctgctacgctttcccgcgctcgaggtgcccctgcgccacccgcgccccgtcctgccgccctttgacatcgccgccgaggtcgcctttaccgcgcgcatacatctggcgtgcctccgggccctgggccaggccatccgggccgcgcttcagggcggcccgcgaatctcacagcgcctgcgctatgactttggccccgaccaacgcgcgtggttgggggaggtgaccaggcgcttccccattctcctcgagaacctgatgcgcgccgtcgaggggaccgcccccgacgccttttttcacaccgcgtatgccctggccgtcctggcacacctggggggacggggcggtcgggggcggcgggtcgtcccgctcggcgacgacctcccggcccgctttgccgactccgacggccattacgtttttgactactacagcacaagcggagacacgctgcggcttaacaatcgtccaatcgccgtggcgatggatggtgacgtcagtaaacgcgagcagagtaaatgtcgcttcatggaggccgtcccctccacagccccacgcagggtctgcgagcaatacctgcccggggaaagctacgcctacctctgcctggggtttaatcgccgcctctgtggcatagttgtctttcccggcggctttgcgttcaccattaacatcgcggcctaccttagcctctcggaccccgtcgcgcgggccgctgtccttaggttttgtcgcaaggtgtcgtccgggaacggccggtctcgctag

SEQ ID NO: 13768 - DNA, 1599 bp, unidentified
  source 1..1599: mol_type = other DNA
  misc_feature 1..1599: note = Synthetic
atgaccgctcgcggattccacgcttgcacggggaagcacgcgcgcgtttccgtggcgtgcgtcgtggtcgtgtgcgtactgggagctttccttgcgcttgtcctcttggcccctcccggtagcgggagaatacgcttccttgatgcagagcccactcacgtctcatacctgccaaccacgactggggttcctttcgtgaccacgaccgtgaacggaaccatcggcgttgccgacaatggcacgaacgggtctgacaacagcacgaacggcgccaacagcgccaacgtcaccggcaactggccctcgaacagcactgttccaagcactcgcccgcgagttcgcacaactagcaagcctctgacgccgccaccgggctttcacatcggggcaactcctcgtcgggaactgcctttgccctcggaggccgactatcttctttacggaacgccctggttctggaagaatcggactcggacagtggatacccgctgtaagcgcgtgatggcgatggaaacagaaaccctggtcctgtcgaactcgcgggtgcagggccctgttttgtacgctcacgtggtgcacacgacgagtagctccacgcggtatgtgaccctcaagactgtggacggaacttgcatgagcggctgcgcgggcgacggaagtgggcggcacgggtacatgcgcatgctcctggggggagtgtccgtgagtgtcgcgaccgtagaagatgctggcatgtaccttgtcactgtcgcgacaacaacaagctacacggtcaactgttactcggctacaatcttggcacgcctacaaaggcctcggcttgagatcgtgcacgcgggctacggggaagaaatgtgctcgttccgccttcgctgttcgatgcctggagacacgcctgcgaaaatcatcctctccggattgtacgatcggagaaattcacagctctggacatcgagtcccggccaggaccttgacgtgctcctcaccgtgagcgggtacggctatgacaaggtcgcatgccacgcgatgacataccgcgattccgtggctagcaaaagcttgcctctctccgagatctgcaggaaagaccgcattgacaccagggcgccggacgattcctccgcttgctcgctccgtgtttcggacctggagggacaactcgccaacaagtgtcctaagccttggtgccccaaatgtagtcagtgtccgacgccagaaaccaagcccgagtgtccgcgtacaaactcggagctctcgggaaagctggtcgtcgcggcagcagtttcggcagtgctcaatctcatcacggcggcggtgctggtgtggcgcggtctgtgtcgcttgtgcaaggtgttgctggctgcacgtacccggcaaccacaataccactttctggaagagggcgggcatctgccgccgccgcctccgtactgtcctgtgccgccgccgtacagtgacaacactcgcccggatgccagccctggcgccggccaggatgttgcccaggacaccagctctgacgctggcccaggcgccgccccggacgccggcacggagaccgtacccacgaacgccgccttgccggtagctcttccctga

SEQ ID NO: 13769 - DNA, 1065 bp, unidentified
  misc_feature 1..1065: note = Synthetic
  source 1..1065: mol_type = other DNA
ctgaaacctgttctccatcacagagctggtatggcctccagtcgtgtagacaccattaatttacggatctggctggtctctataatctgtgcagccttgtcatttataaacgtcacggtccatctgatagccataaactttccaaatttaggatttccgtgcgcctactttgaaatcaatgacctcaaagcggtcaatctctccgctaataatgaaatatatcagatgacgcatcaactttacataaaccctgtgcagattatatgctacgtactgataatggctatcttattcctcctgattattatttattacattgtctgctgtgcaaaagtgttctcctctaacaaaacatctaacgttaaccaaacaacgagggatattacctggatgggggacacctcatcctgctttcaattcatcttaatcatggatacatttcagttattcgtcaccgccctgtctttcagactggtcgccctaggtgcatttgcctattccatcttcttcgtgtgtttcaccacctttaacgttacgctgataacgcaatttcagtcagcggacaagtcgtttttcgcctttcagaaaattcatcctaacctaaaggggaccgtacaattcaagaccgttgtcatcaatctaagcgaactcatgctaggttactctacgatgtttctcggcattactacttgcctgggcgtcggaaatagtatctacatacgttccatcaccgtcgctttctcttccatcaatacctttcttgtcatggcttgtatatatagtatagtaatagaagccgtcctggttcgctacgttaaacccttgttcggctattacgtcggtatgttttgtggcgccgtaggcctatctttccctattctccagtacgaaactttctttgaatccgagtggagcacaggacttattatcaatttatcggtcgtcgccataatttcgatcggtttcataatttgtcgactcgtacgctacctagttaaaaagaagcgtcggtacaagcaactacttaacgctgaaagctcgagcctaatggatgaaaacgaatga

SEQ ID NO: 13770 - DNA, 42 bp, unidentified; identical to SEQ ID NO: 1180
  misc_feature 1..42: note = Synthetic
  source 1..42: mol_type = other DNA

SEQ ID NO: 13771 - DNA, 48 bp, unidentified; identical to SEQ ID NO: 5887
  source 1..48: mol_type = other DNA
  misc_feature 1..48: note = Synthetic

SEQ ID NO: 13772 - DNA, 48 bp, unidentified; identical to SEQ ID NO: 5887
  source 1..48: mol_type = other DNA
  misc_feature 1..48: note = Synthetic

SEQ ID NO: 13773 - DNA, 30 bp, unidentified; identical to SEQ ID NO: 5888
  misc_feature 1..30: note = Synthetic
  source 1..30: mol_type = other DNA

SEQ ID NO: 13774 - DNA, 6765 bp, unidentified
  misc_feature 1..6765: note = Synthetic
  source 1..6765: mol_type = other DNA
atggagacatacaaaataaacatctttagagataggatcaatcaatgtcgaagtgctgaagaagccaaggacattgttgctgatctactcatggctagacacgattatttcggtagagaagtatgttattatttggacatcgaatacaggcaagatgttccagcttatgatatacttcttgagttcctgccacctggtactgcttttgatgtccgcaattgcacaccggacaacttcattgttcacaatgggaaactttacatcattgattataaagtctcaacagaccatacatatggtcaaaaaacatatgaaaaatatacacaaatcttcggagatgcactatcagaattaccatttgagtttgaagttgtaattatccgtgctgatcctttaagagatacaatccatgtcaattcgaatcagtttctagagatattcggtccacttaacattaatcttgatttcacatggtttttcaatttgcggtcactgatatatgaaaagtataaagatgatgatagattcctagaaattgtaaatcaaggtgagttcacaatgactggaccctggattgaagaagacaccccggaattgtactcgcaccctatttttttggaattctatgattctctagatgaaatggctaagttaacattccatgaatctatgacgtttgatgcgacacgcggagaaaaatggaatcagaatctacaaaaggttataaatagatatggtaatgattacaacatttttgtgaaagatgcagctgcagggatcttcaaatgtgaagggaattatcctaaaccagatcatgatgaaattacaattggttggaaccaaatggtccaaagagtgagtgtagaaagaaatcttactcaagatatcagcaagcaaaagccatctatccatttcatatggggccaacctgatgagacatcgaatgcaacaataccaaagttaatcaaaattgccaaagcacttcaaaatatttctggtgagtccacatatataaatgcatttaaggcactaggctcccttatggatttttctgagaatatagccttgtatgaagcacataccagtaaattaaaaagtatggcaagacaaacatcaaagagaatagatgccaaactagaacctataaaaataggtactgcaacaatatactgggagcaacaattcaagttggatagcgagataatgaacccgaaggataaatcgcatttgctaaaggatttccttggcatagggggtcatgtacaattttcaaaaaagactattgaagatctagatactgataaacctactattctagatttcaataaaaaagaggttattgatttttgtaaattccaatatgagaatgtgaagaaaatattatctgaagaaaataatttagagcgtataggatgttatttagaagaatatggtgcaaacatttcatcatcttcaaaagatacatggaaccagatcaatcagataggcaaatcgagctattgggcttgcattaaagacttctcaatcctgatgaaaaatatgctagcagtatctcaatacaataggcacaacacattccgtgtagtatgttgtgcaaacaataatttatttggatttgtcatgccttcctctgacatcaaggcaaaaagatcaacacttgtttatttcttggctgtattacattctggttcccaaaatataatgcatcatggtgcactgcatgcaacattcaagacaggttccaaatatctcagcatctccaaaggaattcgactggataaagagagatgccaacgcatagttagctcaccaggactcttcatgctgacaacactgatgtttgcaggagataacccaacacttaatctaaatgatgttatgaattttactttccatacttcattgtctataactaaagcaatgttgtccttgacagagccatcaagatacatgataatgaactcactagctatatctagccatgtgagagattacattgcagaaaaatttggaccttatacaaaaactagcttttcagtagtgatggcaaatttaattaaaagaggatgttacatggcatataatcagagggacaaagttgatatgcggaacatctgcttaactgattatgagataactcaaaagggtgttagggataatagagatttatcatcgatctggtttgatggttatgtatcattaaaggaatatatcaaccagatatatttgccattttatttcaattcaaagggtttacatgagaagcaccatgttatgatagatctggctaagacaattctagacatagagagggaccagaggctgaatatcccaggaatatggtcttcgacaccaaggaaacagactgcaaatttgaatgtgactatctatgctgttgcaaaaaacttaataatggacactgcaagacataattatatcaggtcacggatagaaaacacaaataacctgaatagatcaatatgcactatttctacatttactagctccaaatcgtgcatcaaagtggggaattttgaaaaggaaaagagtttagcagtaaaaaaagcagcagattgcatgtcaaaagagataaagaaatacactatcgcaaacccagaatttgttgatgaggaattaatgaatgcaacaataagacactcacgttatgaagatctaaaaaaggctatcccaaattacattgatgtcatgtcaaccaaagtatttgattctctataccagaaaataaagaagaaagaaatagatgacaagcctactgtgcaccatatactcactactatgaaaaatcatacagatttcaaatttacatttttcaataaaggtcagaagacagcaaaagatagagagatatttgtaggtgagtttgaagccaaaatgtgtttatatttagtggaaaggatatccaaagaacgttgcaagttaaacccagatgagatgattagtgagccaggcgactcaaaattaaagaaattagaagaacttgcagagtctgagatacgctttacagcagcaactatgaagcagattaaagaacgctacttagcagaaatgggagaagcaagccatatgatcacgtataaaccacactctgttaaaatagagatcaatgcagatatgtcaaagtggagtgctcaagatgtcctgtttaaatatttttggttatttgctttagatcctgcactctatttgcaggagaaagaaagaatattgtatttcttatgtaattatatgcagaaaaaactgatattgcctgatgaaatgctctgcagtatccttgatcaacgaataaaacatgaagatgatataatatatgagatgactaatggtttgtcacagaactgggtcaacatcaaacgcaattggttgcaagggaatcttaattacacgagcagttatttgcattcatgctctatgaatgtttacaaagatgtcttaaagagggcagccattctgttggaaggagaagttcttgtgaattctatggtacactctgatgacaatcatacttcaatagtaatgattcaagacaaattaaatgatgacgttattattgagttttctgcaaagttatttgaaaaaatatgtttgactttcggaaatcaagcaaacatgaaaaagacctatataacaaatttcataaaggagttcgtttctcttttcaatatttatggtgagcctttttctgtttatggtcgctttatattgacatctgttggagattgcgcttttcttggaccatatgaagatgttgccagtagattgtctgcaacacaaacagcaattaaacatggagcaccgccctcccttgcatggactgctattgctctgacacagtggataactcacagtacatataacatgctccctggccaaatcaatgatcccacctcagtcctgcctagccatgacaggtttgaattacctatagaattatgtggcttaataaattctgagttacccactatagctattgcaggcctagaatcagacaatctgagctacttagttagattgtctaagagaatgtctcctatacatctttgccgcgaaccgatacagcatcaatatgaaaatatacatacatgggacattaataaattgacacaatgtgatatattcaggctcaagcttcttagatatatgacgttagactcaacaatgtcatctgatgatgggatgggtgagaccagtgagatgcgatctagatctcttctaacaccaaggaaattcactactgctagttcgttgtccaggttgcattcatatgctgattaccaaaccacaatacaagaccagcaaaagattgaagagttgtttgaatattttatagccaatccacaattactagtcacaaaaggtgaaacttgtgaagaattttgcatgtctgtcttattcagatataatagtcgaaaattcaaggaatcactgtctatccaaaacccagcccagcttttcatagaacaagtattgtttgcgaataaacccatgatagattatactagtattcatgaccgattatttggaatacaagatgatccaaatataaatgatgcaacatgcattattggtaaaaagacctttattgagacatatcagcagataaaagcagacatagaaaaattcacacttgatacagaagacataaaaacaatatttagtttctgtataatgaatgatcctatattagttgcctgtgcaaacaatctattaatttcaatacaaggtgtagaaatgcaacgcttaggtatgacatgctgttatatgccagaaattaaaagtctcaaggtaatctatcatagcccagcactcgtattgcgtgcatatgtaacagacaactatgaacaaaaagggatggaaccagatgaaatgcggagggatatatatcatctagaagagtttattgagaagacaaaattaaggacaaatatgcaagcaagaattggagctaatgagatcaaattaatgaagcgagatctgaagtttgaagtgcaagagttgactaaattttatcagatctgttatgagtatgttaaatcaacagaacataagattaaaatatttattcttcctaagaaagcttatacacctattgatttttgctcattggtaacaggcaatctaatatcagataataagtggatggttgtccactacttgaagcagattactgtgccagcaaaaaaagcacaaatagcaacatcaatagatctagaaatacagattgcctatgagtgctttagattgatcactcattttgcagatatgttcttaagtgatgattcaaaaaaagcctatattaatgcaatcataagcacatacacatacaaagatgtccaagtgtcaagtctatataagaagattaaaagctcaaaattgagatcaaaaatcataccgctattatatcatttaggcgatctgcaacaagtagatattgatagatttgatgcagaaaaagcagaagagcaaataacatggaacaattggcaaacttcacgagagtttactaccggcccgattgacttgtcaataaaaggatatgggcggtcaatacgaattgtgggtgaagataacaagctaacagctgcagaaatgcaactgtctagagttcgaagcgacatagtatcacgacatgggcaagctctattgaataagcctcatggattgaagttagaaaaaatggaaccagtaaccgacctaaatcccaagttgtggtatatagcttatcaactgagagaaaagaagcggtatcattatggagtctttagcatgtcttacattgaagagcataattcaagaatagaagcatctcggatacgcaagagcaataaatggataccggtctgccctattgctatatcaaaacaaacatctgatgggagacccaatctcgctaaaatccctatgttgaatataggggaaacaaaatttacaaaattacaaattgcagtggatgaccatgcaatgatcagaaaggctccattcagcaaaatggtgttttttgatggcccacccatacaaagtggcggtattgatattgggaggcttatgaagaatcagaatatactcaatcttaggcttgataatatacaaaatataacattgctagatttatgccgtatattctcatgtcgaggcaccaagatagatcaagatgcatttgaattcctatctgatgagccactagatgaagatgttatagatgagttggatagttcacctgcattggtagtatcttatacaaaaaaatcaaccaaatccaatagctttaaaaatgtcataattagagcattgataagagagtgtgatatatttgaagatataatggatataacagatgatggattcacctctgatagcaatctagaagttctggagaacttgacttggatcttaaacaagctagctacaaatcaatggtctacagagttgttagcatgcatacatatgtgcttataccgtaatgaaatggatcacatctaccacaatttccaaatcccagaaatatttgttgacgatccaatatcattgaatgttaagtgggatgaagtagtcatgttcttaaatatattgcgagacagggactacaaaatcgaaccgtggatttctatactaaatcattctttaactaaagctgttgactatgcctataagaagctagaagaagagaggagacagaaatcaactggtattaataagttcttgaaggggaagaagatgggtggtagatcgaagtttgatttccaatga

SEQ ID NO: 13775 - DNA, 249 bp, unidentified
  source 1..249: mol_type = other DNA
  misc_feature 1..249: note = Synthetic
attgtgggaatagtcatggtctgctcctgcactttctttgccatcatgatctacccctgttttgatctcggctggaactctgttgaggcattcacatacacactagaaagcagttcactagcctccacgccaccgcccacaccgcctccccgcagaaatcagttcccactgattcagtacttagaagagccccctccccggcccccttccactgttagctactttcacataaccggcggcgatgactga

SEQ ID NO: 13776 - DNA, 663 bp, unidentified
  misc_feature 1..663: note = Synthetic
  source 1..663: mol_type = other DNA
aggatgccccgaggaaacaagaagctgaaagtggagctgccgcccgtggaggatttggaggaagactgggagaacagcagtcaggcagaggagatggaggaagactgggacagcactcaggcagaggaggacagcctgcaagacagtctggaggaagacgaggaggaggcagaggaggaggtggaagaagcagccgccgccagaccgtcgtcctcggcgggggagaaagcaagcagcacggataccatctccgctccgggtcggggtcccgctcggccccacagtagatgggacgagaccgggcgattcccgaaccccaccacccagaccgcccctactacttccaagaagaggcagcagcagcagaaaaagaccagaaaaccagctagaaaatccacagcggcggcagcggcaggtggactgaggatcgcggcgaacgagccggcgcagacccgggagctgaggaaccggatctttcccaccctctatgccatcttccagcagagtcgggggcaggagcaggaactgaaagtcaagaaccgttctctgcgctcgctcacccgcagttgtctgtatcacaagagcgaagaccaacttcagcgcactctcgaggacgccgaggctctcttcaacaagtactgcgcgctcactcttaaagagtag

SEQ ID NO: 13777 - DNA, 558 bp, unidentified
  misc_feature 1..558: note = Synthetic
  source 1..558: mol_type = other DNA
aggatgccccgaggaaacaagaagctgaaagtggagctgccgcccgtggaggatttggaggaagactgggagaacagcagtcaggcagaggagatggaggaagactgggacagcactcaggcagaggaggacagcctgcaagacagtctggaggaagacgaggaggaggcagaggaggaggtggaagaagcagccgccgccagaccgtcgtcctcggcgggggagaaagcaagcagcacggataccatctccgctccgggtcggggtcccgctcggccccacagtagatgggacgagaccgggcgattcccgaaccccaccacccagaccggtaagaaggagcggcagggatacaagtcctggcgggggcacaaaaacgccatcgtctcctgcttgcaggcctgcgggggcaacatctccttcacccggcgctacctgctcttccaccgcggggtgaacttcccccgcaacatcttgcattactaccgtcacctccacagcccctactacttccaagaagaggcagcagcagcagaaaaagaccagaaaaccagctag

SEQ ID NO: 13778 - DNA, 645 bp, unidentified
  misc_feature 1..645: note = Synthetic
  source 1..645: mol_type = other DNA
atgccccgaggaagcagcaagaagctgaaagtggagctgccgcccgtggaggatttggaggaagactgggagagcagtcaggcagaggaggaggagatggaagactgggacagcactcaggcagaggacagcctgcaagacagtctggaagacgaggaggaggcagaggaggtggaagaagtagccgccgccgccagaccgtcgtcctcggcggagaaagcaagcagcacggataccatctccgctccgggtcggggtcccgctcgaccccacagtagatgggacgagaccgggcgattcccgaaccccaccacccagaccgcccctactacttccaagaagaggcagaaaaagacaaaaccagcagctagaaaatccacagcggcggcggcggcaggtggactgaggatcgcggcgaacgagccggcgcagacccgggaactgaggaaccggatctttcccaccctctatgccatcttccagcagagtcgggggcaggagcaggaactgaaagtcaagaaccgttctctgcgctcgctcacccgcagttgtctgtatcacaagagcgaagaccaacttcagcgcacgcttgaggacgccgaggctctcttcaacaagtactgcgcactcactcttaaagagtag

SEQ ID NO: 13779 - DNA, 540 bp, unidentified
  source 1..540: mol_type = other DNA
  misc_feature 1..540: note = Synthetic
atgccccgaggaagcagcaagaagctgaaagtggagctgccgcccgtggaggatttggaggaagactgggagagcagtcaggcagaggaggaggagatggaagactgggacagcactcaggcagaggacagcctgcaagacagtctggaagacgaggaggaggcagaggaggtggaagaagtagccgccgccgccagaccgtcgtcctcggcggagaaagcaagcagcacggataccatctccgctccgggtcggggtcccgctcgaccccacagtagatgggacgagaccgggcgattcccgaaccccaccacccagaccggtaagaaggagcggcagggatacaagtcctggcgggggcacaaaaacgccatcgtctcctgcttgcaagcttgcgggggcaacatctcattcacccggcgctacctgctctttcaccgcggggtgaacttcccccgcaacatcttgcattactaccgtcacctccacagcccctactacttccaagaagaggcagaaaaagacaaaaccagcagctag

SEQ ID NO: 13780 - DNA, 378 bp, unidentified
  source 1..378: mol_type = other DNA
  misc_feature 1..378: note = Synthetic
ataaaaacgaaagtgtcgtcgtcgcgacccgccacagccgccatgaactcgttgctggcggaactcaaccgactgggggtcgcgcacgccactacggaggatgtttttatctttgtcgaccgcctctttcaacacttttccttccttttccaggccgaggagtcaggcccgcgccgcttggaactggtcgcgtccgtgttcgagcacctgacggtggagtgcgtcaacgacatcctggacgcctgcagccacccggacgtgaacgtcgtggagacaagcaacacctgtcgtccctgcccttctcctgttccctccgcccccaaaactgtcagcgacgctcagacgtcatgtgcgacgcctcgggcgcctgtgacatga

SEQ ID NO: 13781 - DNA, 111 bp, unidentified
  source 1..111: mol_type = other DNA
  misc_feature 1..111: note = Synthetic
atgtttttatctttgtcgaccgcctctttcaacacttttccttccttttccaggccgaggagtcaggcccgcgccgcttggaactggtcgcgtccgtgttcgagcacctga

SEQ ID NO: 13782 - DNA, 156 bp, unidentified
  source 1..156: mol_type = other DNA
  misc_feature 1..156: note = Synthetic
gtgggcggcagccccatgctcatgaagaacccgcacatcgtcaccattagcgtgaggcaagccgcgtgctgcacgcgcccgctcaaatacggaggcgcgtgcgcacacgctggcgcgcgcgagtatgcatgcgcgcgcgcggacgcgggcgcgtag

SEQ ID NO: 13783 - DNA, 1077 bp, unidentified
  source 1..1077: mol_type = other DNA
  misc_feature 1..1077: note = Synthetic
atggaggagacccgggcgggacgttatatagtgagggccggctccggcgggcaaaccgaagatacagcctcgggcgcggaaagtgtcctcgccacgctggccgcggtgaggacaagaagacggagcgtggtgtgcgacgggcccccgggctcgcccactgactcggcgcgtcacatgagcgatctggctagcctggcgctcacggccgagttcggcctgggctgtctggaagcttacgtgcgcatcaacgcaggccaggtgttgcccgtggtctggccgccgggctggaacctagtgctgcaggagatcgagacggacgaggacttcaaaccggaggacgtgaaggcttggagtcactacctgtgttgccagacgcgcctggccttcgtgggtcgcttcgtgaacgagggcgtgttgtcgccggatcagcagaagaagaccgctgtgtgcctcatctcggacgagggctatgttttttgctatgtacgcgaggacaccgccgtctactacctggcccgcaacctcatggagtttgcgcgcgtcgggctgcgcgccgtcgagaccctgcactgcatgcgctacctgacctcgtcgttggttaagcgctactttcgcccgctgttgcgcgcctggagcctcggtttggataccatggcgcgattcatcatccgccaccacgggcagttcatgccgttgacgtacccgccgggaacggaactgcgtctatgcaacctcaggtgtttcgaaaacagcgtggaaggcggtcacttgctgcgcaacatcaaaaccgctttcggaatgcgcgttctcggcctgggaaccgtcagcctcaagggcgagaacgcgccctttcctcacttgcgctggcccgtcgaccttatccccatcgtcgtcgcctataccggggccgtctacgcctgcgacgtgcgcgacgaccgctacatccgggtgggagataatctcaacacgttcatgtgtctgggacttaacctgctgtttgaaaaccgacgtttcagcggccacaacggcatctacgatcgcgtgcccgactgccccaaaggacgtcagcaccgttga

SEQ ID NO: 13784 - DNA, 261 bp, unidentified
  source 1..261: mol_type = other DNA
  misc_feature 1..261: note = Synthetic
acgtcggcggcgatagccatgagttccgatagcaattttgatccctggattcccgtgtgtgtcgtggtggtcatgacctccgtagtcctgttcgcaggtctgcacgtgtacctgtggtacgttcggcggcagctggtggcgttctgcctggagaaggtgtgcgtccgctgctgtggcaaagatgagacgacgccgctggtggaggacgccgaaccgccggccgagctggagatggtggaagtgtcggacgagtgttactag

SEQ ID NO: 13785 - DNA, 42 bp, unidentified; identical to SEQ ID NO: 5918
  source 1..42: mol_type = other DNA
  misc_feature 1..42: note = Synthetic

SEQ ID NO: 13786 - DNA, 3438 bp, unidentified
  source 1..3438: mol_type = other DNA
  misc_feature 1..3438: note = Synthetic
agggcgtcgtcgagcgtgatgggggcgggcaaaagcgcattgaccaccgccagggcctcctgcagccgcggctccgcctccgagggcggagccgcggcccgaatcatctcatattgttgttcctcggggcgcgttccccaaccgcacagcaccccgagcagggacgccatcccggaacacgcgcgcggctctgcgccggctttcccccaccccaccccctccgggttcgcaggggcgatggggacggaagactgcgatcacgaagggcggtcggttgcggctcccgtggaggttacggcgctgtatgcgaccgacgggtgcgttatcacctcctcgctcgccctcctcacaaactgcctgctgggggccgagccgttgtatatattcagctacgacgcgtaccggtccgatgcgcccaatggccccacgggcgcgcccaccgaacaggagaggttcgaggggagccgggcgctctaccgggatgcgggggggctaaatggcgattcatttcgggtgaccttttgtttattggggacggaagtgggcgtgacccaccacccgaaagggcgcacccggcccatgtttgtgtgccgcttcgagcgagcggacgacgtcgccgtgctccaagacgccctgggccgcgggaccccattgctcccggcccacgtcacagcaactctggacttggaggcgacgtttgcgctccacgctaacatcatcatggctctcaccgtggccatcgtccacaacgcccccgcccgcatcggcagcggcagcaccgcccccctgtatgagcccggcgaatcgatgcgctcggtcgtcgggcgcatgtccctggggcagcgcggcctcaccacgctgttcgtgcaccacgaggcgcgcgtgctggcggcgtaccgccgggcgtattatgggagcgcccaaagccccttttggtttctgagcaaattcggcccggacgaaaagagcctggtgctggccgctaggtactacctactccaggctccgcgcttggggggcgccggagccacgtacgatctgcaggccgtgaaagacatctgcgcgacctacgcaatcccccacgacccacgccccgacaccctcagtgccgcgtccttgacctcgttcgccgccatcactcggttctgttgcacgagccagtactcccgcggggccgcggccgctgggtttccgctgtatgtggagcgccgcatcgccgccgacgtacgcgagaccggcgcgctggagaagttcatcgcccacgatcgcagctgcctgcgcgtgtccgaccgggaattcattacgtacatctacctggcccactttgagtgcttcagccccccgcgcctggccacgcatctccgggccgtgaccacccacgaccccagccccgcggccagcacggagcagccctcgcccctgggtcgggaggcggtggaacagttcttccggcacgtgcgcgcccagctgaacatccgcgagtacgtaaagcaaaacgtcacccccagggaaaccgccctggcgggagacgcggccgccgcctacctgcgcgcgcgcacgtatgccccggcggccctcacgcccgcccccgcgtactgcggggtcgcagactcgtccaccaaaatgatgggacgtctggcggaagcagaaaggctcctagtcccccacggctggcccgcgttcgcaccaacaacccccggggacgacgcggggggcggcactgccgccccccagacctgcggaatcgtcaagcgcctcctcaagctggccgccacggagcagcagggcacgacgcccccggcgatcgcggctctcatgcaggacgcgtcggtccaaacccccctgcccgtgtacaggattaccatgtccccgaccggccaggcgtttgccgcggcggcgcgggacgactgggcccgcgtgacgcgggacgcgcgcccgccggaagcgaccgtggtcgcggacgcggcggcggcgcccgagcccggcgcgctcggccggcggctcacgcgccgcatttgcgcccggggccccgcgctccccccgggcggcctggccgtcgggggccagatgtacgtgaaccgcaacgagatcttcaacgccgcgctggccgttacgaacatcatcctggatctggacatcgccctgaaggagcccgtcccctttccccggctccacgaggccctgggtcactttaggcgcggggcgctggcggcggttcagctgttgtttcccgcggcccgcgtagaccccgacgcctatccctgttattttttcaaaagcgcctgtcggccccgcgcgccgcccgtctgtgcgggcgacgggccctcggccggtggcgacgacggcgacggggactggttccccgacgccggtggtcccggcgacgaggagtgggaggaggacacggaccccatggacacgacccacggccccctcccggacgacgaggccgcgtacctcgacctgctacacgaacagataccagcggcgacgcccagcgaaccggactccgtcgtgtgttcctgcgccgacaagatcgggctgcgcgtgtgcctaccggtccccgccccgtacgttgtgcacggctccctgacgatgcgtggggtggcgagggtgatccagcaggcggtgctgttggaccgcgacttcgtggaggccgtagggagccacgtaaagaactttttgctgatcgatacgggcgtgtacgcccacggccacagcctgcgcttgccgtatttcgccaagatcggccccgacggctccgcgtgcggccggttattgcccgtcttcgtgatcccccccgcgtgcgaggacgttccggcgttcgtcgccgcgcacgccgacccgcggcgcttccactttcacgccccgcccatgttttccgcggccccgcgggagatccgcgtcctccacagcctgggcggggactatgtcagctttttcgagaagaaggcgtcgcgcaacgccctggagcactttgggcgacgcgagaccctgacggaggttctgggccgctacgatgtgcggcccgacgccggggagaccgtggaggggttcgcgtcagaactgctggggcgaatagtcgcgtgcatcgaggctcactttcccgagcacgcgcgggaatatcaggccgtgtccgttcgccgggccgtcattaaggacgactgggtcctgctgcagctgatccccggccgcggcgccctgaaccaaagcctctcgtgtctgcgcttcaagcacggcagggcaagtcgcgcgacggcccggacctttctcgcgctgagcgtcgggaccaacaaccgcctatgcgcgtccctgtgtcagcagtgctttgccactaaatgcgataacaaccgcctgcacacgctgtttaccgtcgatgcgggcacgccatgctcgcggtccgctccctccagcacctcacgaccgtcatcttcataa

SEQ ID NO: 13787 - DNA, 789 bp, unidentified
  source 1..789: mol_type = other DNA
  misc_feature 1..789: note = Synthetic
aggagcggcgcggcccagagcgtgtcggccgatttcgaaatggaggccctgatgatccgcggcgtgctggaggtccatacggatttcactagacagaatgtgatgatcatggagccgcaagtgctcgactttacggtgcgcggcgacaagctgtggctgcacacggagcacgggctgctggtttccatggccgagtaccgcagcgagttgctgtgcacctcggcctttctgggctactccgccgtgtttttgctcgagaccgaagacgccgtcacgcaggtgaggctctcggatctgcggctcaaacaccgctgcggcatcgtcaaggccgacaacctgctgcacttcgcgctctgtaccgttatttcatgcgtggaaaattgcaacttaacgcgcaagtgcctgcacgacctgctccagtacctagacgcggtgaacgtgcgcgaaagcttcggccggctgctgcaccacagcgcccggcggctgatctgcagcgcgctctacctactctttgaggaaaaagaaccgcacattgtgcagtacgtgcccgctaccttcgtgcttttccagcagacgcggcatacctgcctgcagctggtagcacgcttctttttccgccttaccggtcaagacgaggcacactcgtttagcctcaagctgaccgagcgtaagaccgtggacggttggcccgtgggcctgggcctgctagacgtgctcaacgccaactaccccaatttgccctcaccccccaagctgccaccgcgctgggaacggggagaggaagagtga

SEQ ID NO: 13788 - DNA, 18 bp, unidentified
  misc_feature 1..18: note = Synthetic
  source 1..18: mol_type = other DNA
atgcctgcctatggatag

SEQ ID NO: 13789 - DNA, 132 bp, unidentified
  source 1..132: mol_type = other DNA
  misc_feature 1..132: note = Synthetic
ctggccaccacatcggacgggcaggcatttttggtgctgcctgggggctttgttattaaaggccaattggcactcacccccgaggagaggggatatattctggcacgtcatggcatccgccgcgaacagtag

SEQ ID NO: 13790 - DNA, 18 bp, unidentified
  misc_feature 1..18: note = Synthetic
  source 1..18: mol_type = other DNA
atgcctgcctatggatag

SEQ ID NO: 13791 - DNA, 132 bp, unidentified; identical to SEQ ID NO: 13789
  misc_feature 1..132: note = Synthetic
  source 1..132: mol_type = other DNA

SEQ ID NO: 13792 - DNA, 18 bp, unidentified
  source 1..18: mol_type = other DNA
  misc_feature 1..18: note = Synthetic
atgcctgcctatggatag

SEQ ID NO: 13793 - DNA, 36 bp, unidentified
  misc_feature 1..36: note = Synthetic
  source 1..36: mol_type = other DNA
atgcgcgtccctgtgtcagcagtgctttgccactaa

SEQ ID NO: 13794 - DNA, 69 bp, unidentified; identical to SEQ ID NO: 5927
  misc_feature 1..69: note = Synthetic
  source 1..69: mol_type = other DNA

SEQ ID NO: 13795 - DNA, 510 bp, unidentified
  misc_feature 1..510: note = Synthetic
  source 1..510: mol_type = other DNA
acgttatctaatattatatctaaagtggagacaatctatataaaatatctttttcaaatggattttaatacaacatatagatttattttttctggattaacattaaccacaactgtgacaaagtctgtagtgattgaagctttgtttattattaagagatggcaagaaatcaagcagattttcaatctagatgtccacaaaactgaggattgttatatcgtcgctcaattcacacacatacctgtaaaacggaaaatcacagcattattgtatatgatgacaacaaagcatgaaaagcaacttttcttaaacatgatttatgcgtttctagaagaaagtcatctgaggcttggagacgatgagcatgaaaacgcgataatgtttttttcatacatagaacgactccaactgaccagagatgttttaattgagattattcaaaagctaaaaaacgtggaaattaatcaaacaattgcccttgtgttgtcatacaatgaattagctaaataa

SEQ ID NO: 13796 - DNA, 1002 bp, unidentified
  misc_feature 1..1002: note = Synthetic
  source 1..1002: mol_type = other DNA
atggaggttattacagacggcgtgttgcgtctcaagagcttcagagacgactttaaaggtattaaggaggaactcaagttcatgcttaactcatgggaggattccgacatattaaggcacaggcaattcattccgtgcgaaattttggtactggaaaaaagcgaacgaaccaaacaggtatttggggccgtaaagagggttctggcgtcgtccctgaccgactataacgtttacgtgtgtgagcacttgactatagtcaagtgctttaaaggggtggggttcgataaccgctttagtataataaccgaagacagacaccgggggagagaatacacgctggttttgcatctgtctagtccaaaaaacggcggaaaaacggacgtctgtgttggtgataaaacggtaatatcaaccgcggatgatttccttttagaaaaacgttccgagcaactgtctaacgtggttcaagaaggagaaaaaatagttgtgctcgttaaggtgtttttgctacgtaaggaggcggacgtcatatttacattggcgcgattttcaaaagatgtaaagttttacgaaaaagagggagataggaacctgtgttacgctcttgtagaagttaacagtccgtttgctgaagttgagtcgtttggagtaataactgatagatccggaagatgcctgttggttaaccgttaccaaaaactggttaaaaaggtaatggtggaaaaaacttttgttgacatgtgcacagaaatatcctttgatggattttacaacttaagtaacgtagaaggaaaagatatggcgtggaaagagcttaaagcggttaaagaagatttatgggtaccgagttcagaagaggattataagtttctgagagagttggtagattacgtatcttccaatttaaaaacaaaggttgactactacgttctttcgacctgcgacgacgacgaaacacaatacgtaagcttaaacgttattcgttgctatttttctatataa

SEQ ID NO: 13797 - DNA, 1002 bp, unidentified; identical to SEQ ID NO: 13796
  source 1..1002: mol_type = other DNA
  misc_feature 1..1002: note = Synthetic

SEQ ID NO: 13798 - DNA, 3186 bp, unidentified
  misc_feature 1..3186: note = Synthetic
  source 1..3186: mol_type = other DNA
gtgtggggcatcatgagccagtctcgcgcttccagtacgagttcgagggcaatgccgatgctagcgctggagatgattccgtcccccgcggagctgtgccatctcgcacactgcagcacgtcttgcgcggatatggcgcgccgagtactgctgcggctctacccggaggtagtttgcggagcagattcggaggcggagctgcccgcgatttacttcgacgcggtgcgcgcgtgcgtctcggagtactatcctttggtctgcgacgagtacgtgtggcaacacgaaggcttgctgcctttgcgcgagttcgtcttgcgttgtcgcctcgtacgcgaagtgtctccacgctcgcagtcgccggaagcacgcgcgctggacttgcgggcagatgcccgcttgcgagagtttcccaagctcgagccgcgcacgcccgtacccgctttgcagccggagccctttgccacggcgagtcacgtctctgaaggcttggcttctcgactggagggggcaacgccgttcgtgccgtgtccgttgttccagctagaagaggccgtcccggcgacttcagagggaagctcgcaagaaggcttcgtacgtgcccatcgggaggaagagcatgctttacgcgcgttcgcggacagagcacgcacgggatcgaaacacgtgcgagtgcgcgagcctgcccgcacgcacgagtccgcgcacgcgccttgccaacagtacgcggccttcccaagagtgtgccaggagagcgtgccgcgcacactcgtaccaacggatgcgcgtcacgtgcctctcgtgccgccggcacgcagcgcaagtcgacgtgcgagtgaacacacgcctttcgagcagacagtgcacgagacgtatcccggcaccgcgttcgcggaccatagtggcgagctggaggccgtacgtgcgcgcgctcaaggaagcgctgctcttgcagacgcggctagacccgagtatgcggttcttgctggcacgtctagactcgagctctcggaagagactgtacttgttcgcacagaagaagttgccgggccgctctcgcgccgagatgaaatcatgtctttccgcacagaagaagccgccggtacgctcctgtgcgaaaacacgcctttcttccccgaggaagctgccggggggctctcctgccaggacgaggccgtgcccttccgcatcgaaagtgctgtgtctctcgcgcgcgcggagggaactttccgcattgaggaggtgtttgcacccccccgggaaaaggagggaagcgtgtcactttccgatggcgaggcattgacgcgcggcgtggaagccgtcgtgcctcttgcgcaacgcgggcacaaggcgaccctttcgcggctggaaaaggtcgtgcgcgagcgtatggagcatgccgtggtacgagcgtgcccgaacaacgtgcccctcgcgaacggaacctcggactcgtgtgcgcgtcctgatgaagttcctcgcgcgagcgaaggcgccgagcggcgtgcatgccctgaagaagatgcgacgggaaatcaccacgacgtgctcgatagcgcagagctgcgtgcgaaagacgcaactcgctcgcttagggagcccgtcccgcgagaagacgccgctcggccgctcggggagcccgtcccgcgagaagacgccgctcggccgctcggggagcccgtcccgcgagaagacgccgctcggccgctcggggagcccgtcccgcgagaagacgccgctcggccactcggggagcccgtcccgcgagaagacgtcacgcggcagaatgggcaacgctcgcctccagcggcgcgctctgttctagtaccggttcccgtgcggcctgcagcgggtgctcttgtcccgcggagccgcggcgcgccgtatacgccgtctgcttttgttcaggtcacgcccgcgtgggcaggccctgtcacgctggacatctacgagtgcgcgagcagcgtgtcctctcccggggagctggcggtgctcctactgcacaaggtcttccaggagctctttgacgcgcgccagctgcgccgctgctacagctgctacggcgacgggcgcacgcattgtctggaccctgcgcgcctgcaactgatccggcactgcgtggcgctttgcttcccttccatgtccgacgacggcgagtgggtacgcgagtgcgtgtcgcgcgtgaattccgagctgaccggagaggagctcatggacgtcgatagcggcagtgccgaggaggacgacgaggagacagaggaaaccgaggaagagagcaggcgcgtcacgcgcgcgtgctcgccgcgcgcacaaccgctgcgcaaaagcgtgcgcagcacgcgcggcctgcgccgttcgcagatccgcgcccgcgagctcgccccgattaattttgacacgctctgcattcctcctcccgacttttacgtgccctcgtgcgtgccgttacccacgcgtgcgcacctgcgcaagatgtacggcgcaagcaggtctatctacaacttcgctgtgcgtatgctcgtgtacatgtttccagagctctttactgcggagaacctgcacacgcacttcaactgctacggctccatgggcaagcgcaggctcgacccgctacgcctgcgcttgctccggcactatgtgcagttgctgcacccggcggcgcgcaacgagcgcgtgtggatcacaaagttcctggcgtgcctggacgagcgctgccggcgccgctgcgcacggacacaggcgcgcacgccgcgtgctacgcgctcttctttcgcgccgatccgcgccgtgagcgtgcccgcgcccgatttttacgtgcccgcgcagtacctgatctctgcaaagcgcgtgaaggaactggcgcgccggagtttgtgtccgggacacttcgctgcgcaactcacggtcatgctcttccccgagctcttcagcagctgcaccgaacgtcagaagttcagctgcgcgggctccgacgagcacctgcgcctggatcctgtacgcgtgcggctcatccggcactacgtgcgcgcggtgtgcttgccgggggcctttgagcgtacctgggaagcagagtgcgtgcctagcattgacgcgcgctgtcagcagccggggctgcgcaggcacgagcttctcaagaggagtatctgcgcagaggaagacgaagactcgtccgacatcatctacgaatga

SEQ ID NO: 13799 - DNA, 15 bp, unidentified
  source 1..15: mol_type = other DNA
  misc_feature 1..15: note = Synthetic
atgttaatcttttaa

SEQ ID NO: 13800 - DNA, 351 bp, unidentified
  source 1..351: mol_type = other DNA
  misc_feature 1..351: note = Synthetic
atgaaggtgtgcctgcgtatgacagtagagggtgctcttaacaaactttttgaattacatggcgccagtttacaagaaattttaatggatgtgttgcgcgggtggcaagcggaaaattatttgggaattattcaagattgcagcttaatgtttgaagattttgaggaaaatgcttttgctatgtttgtgtttcttgaagtgcgtgtgccagccttagtggaagccgtgattggtaatttggaaaatcgcatcttttttgacttggctgtaatttttcaccaacgcagcggtggggagaggtgtgatcttcgtgacttgcactttggctcgctttacaaccgtctggaataa

SEQ ID NO: 13801 - DNA, 66 bp, unidentified; identical to SEQ ID NO: 5943
  misc_feature 1..66: note = Synthetic
  source 1..66: mol_type = other DNA

SEQ ID NO: 13802 - DNA, 306 bp, unidentified
  misc_feature 1..306: note = Synthetic
  source 1..306: mol_type = other DNA
atggagccgcggcactgggggcgctccctgtggtgcgtcatcttcctggtgctggaacaggcggcgcgcgacggcgacctggaacgcgcgaagcggcgcctcttcttgatctgcaacacgctgccgtgcgtggcgtgccgcgcgcacgcgctggaggcgctgcaggaaaataacgtgctttcgagcagcgacctcaactacgtgtacttcttcttcatcgcgctcttcaacaacctggcgcgcgatccgcgctaccgcgtggacgtggccaaggtacgcccgctgccgcgctcggaagcgcactga

SEQ ID NO: 13803 - DNA, 12 bp, unidentified
  source 1..12: mol_type = other DNA
  misc_feature 1..12: note = Synthetic
acggccgggtga

SEQ ID NO: 13804 - DNA, 21 bp, unidentified
  misc_feature 1..21: note = Synthetic
  source 1..21: mol_type = other DNA
atgaaccgacttggaaagtaa

SEQ ID NO: 13805 - DNA, 45 bp, unidentified; identical to SEQ ID NO: 5950
  source 1..45: mol_type = other DNA
  misc_feature 1..45: note = Synthetic

SEQ ID NO: 13806 - DNA, 99 bp, unidentified
  source 1..99: mol_type = other DNA
  misc_feature 1..99: note = Synthetic
aaggtcgtaatgagcaattccgggacgggaccgactactttgggtgtccgtgtttcttatttttcttattattgtcttatggtcacagcatatatataa

SEQ ID NO: 13807 - DNA, 135 bp, unidentified; identical to SEQ ID NO: 5952
  misc_feature 1..135: note = Synthetic
  source 1..135: mol_type = other DNA

SEQ ID NO: 13808 - DNA, 183 bp, unidentified
  source 1..183: mol_type = other DNA
  misc_feature 1..183: note = Synthetic
atgacgtcattagtgagcacatactatcggctctgcgcgatccgaacgtggtcattgtctattaacccgccgtccccttacagttccaccgaacccggcccgggggactcactacccaccgcgagatgtccaatccacagacgaccatcgcgtatagcctatgccacgccagggcctcgctga

SEQ ID NO: 13809 - DNA, 171 bp, unidentified; identical to SEQ ID NO: 5954
  misc_feature 1..171: note = Synthetic
  source 1..171: mol_type = other DNA

SEQ ID NO: 13810 - DNA, 189 bp, unidentified
  misc_feature 1..189: note = Synthetic
  source 1..189: mol_type = other DNA
ctggaacgaggccgcagccttctcccggtgcctttcccccccgaccggcacccggcctctcacacagcatcccccgcctttttgggtccgggcccgtcgtgtctttcggtggaccttgggccgtcgggcacgtacacgggtggccgggcgttggggtggatcttagcctccccgggccaatatcgctag

SEQ ID NO: 13811 - DNA, 240 bp, unidentified
  source 1..240: mol_type = other DNA
  misc_feature 1..240: note = Synthetic
atggcatcactgttaaaaccttacaaaatattacctgatcttgaatcactccatgggaaactcctatgctatcagttgcttgctgcgttcatggcagaggaccacccctttaaggtgtatgtggagcactgcctctcgcggactgcaaagcagcttcgtgactctggccttccagccagactcacagaagagcaactccatcgcatttggaggggaggaccaaagaagtgtgatggctag

SEQ ID NO: 13812 - DNA, 21 bp, unidentified
  misc_feature 1..21: note = Synthetic
  source 1..21: mol_type = other DNA
ctgaccatccttatccactga

SEQ ID NO: 13813 - DNA, 363 bp, unidentified
  misc_feature 1..363: note = Synthetic
  source 1..363: mol_type = other DNA
atgcctcttccgtgtcttcctccacctccagtgtgtcgggatagatcaggctgtctgtcttggttggaactcgccctcactacgtgtttggaactgtaccgagacatctgtaggtttgaggtgtgcatcgccccggaggccgagagggatctgtgtggattacaagagtggttgcactttgcgttgaggagggagcgtgagcgacgcagggaccggcgttacttggagacgtgctggcagcggacgtggttctgctactacaagtacgaggaagtgcgtcggtccctggtctacgatgcaacgcgacagacggtatcgctgcagactggctccttacaatcgtcaccagctaccaccttgtga

SEQ ID NO: 13814 - DNA, 1110 bp, unidentified
  misc_feature 1..1110: note = Synthetic
  source 1..1110: mol_type = other DNA
atgagtcagtgggggcccagggcgatccttgtccagacggacagcaccaaccggaatgccgatggggactggcaagcggccgtagctattcgcgggggcggagtcgttcaactgaacatggtcaacaaacgcgccgtggattttaccccggcagaatgcggggactccgaatgggccgtgggccgcgtctctctgggcctgcgaatggcaatgccgcgggacttctgcgcgattattcacgcccccgcggtatccggccccgggccccacgtgatgctcggtctcgtcgactcgggctaccgcggaaccgtcctggccgtggtcgtagccccgaacgggacgcgcgggtttgcccccggggccctccgggtcgacgtgacgtttctggacatccgggccacccccccgaccctcaccgagccgagctccctgcaccggtttccgcagttggcgccgtccccgctggcagggttacgagaagatccttggttggacggggcgctcgcgaccgccgggggggcggtggccctgccggccagacggcgcgggggatcgctggtctacgcgggcgagctaacgcaggtgaccaccgagcacggcgactgcgtgcacgaggcgcccgcctttctgccaaagcgcgaggaggacgcaggctttgacattctcatccaccgagccgtgaccgtcccggccaacggcgccacggtcatacagccgtccctccgcgtattgcgcgcggccgacggaccagaggcctgctatgtgctggggcggtcgtcgctcaatgccaggggcctcctggtcatgcctacgcgctggccctccgggcacgcctgtgcgtttgttgtatgtaacctgaccggagtcccggtgaccctacaagccgggtccaaggtcgcccagctgctcgtcgcggggacccacgccctcccctggatcccccccgacaacatccacgaggacggcgcattccgggcctaccccagaggggttccggacgcgaccgccaccccccgagacccgccgattttggtgtttacgaacgagtttgacgcggacgcccccccaagcaagcggggggccggggggtttggctccactggcatctag

SEQ ID NO: 13815 - DNA, 2838 bp, unidentified
  misc_feature 1..2838: note = Synthetic
  source 1..2838: mol_type = other DNA
acgctcgttctgttcgcaacagagtatgattctgctcatatagtcgccaacgtactctcgcagacaccgacggaccactgcgtcttccccctgctggtcaaacaccaggtctcgcgacgtgtttatttctgcctacagacgcaaaagtgctcggactcgcggcgggtggcgcccgtcttcgccgtgaacaacgaaacgctgcaactctcgcgctacctggccgcgcgccagcccatccccctctcggcgctcatcgccagtctggacgaggccgagacgcggccgctctaccggcatctcttccgcacgcccgtgctctcgcccgaacacggcggcgaggtgcgcgaattcaagcacctggtgtactttcaccacgcggccgtgctacgtcatctcaaccaggtcttcctctgccccacctcgccctcgtggttcatcagcgtcttcgggcacaccgagggccaggtgctactgaccatggcctactacctattcgagggccagtacagcaccatctccaccgtggaggagtacgtgcgcagcttctgcacgcgcgacctgggcaccatcatccccacgcacgcctccatgggcgagttcgcgcgtctgctactgggctcgcccttccgtcagcgcgtgtccgctttcgtggcgtacgccgtggcgcgcaaccgccgcgactacaccgagctagagcaggtggacacgcagatcaacgcgttccgcgaacgtgcgcgtctgcccgacacggtctgcgtgcactacgtctacctggcctaccgcacggcgctggcacgcgcgcggttgctcgagtaccggcgcgtggtggcttacgacgctgacgcggcgcccgaagcgcagtgtacgcgcgaaccgggttttctgggccgccggctttccaccgagctgctggacgtcatgcaaaaatacttctcgctcgacaactttctacacgattacgtggagacgcatctactacgtctcgacgaatccccccactcggcgaccagcccgcacggcctggggctggccggctacggcggccgcatcgacggcacgcacctggcgggcttcttcggcacctccacgcagctggcgcgccagctcgaacgcatcaacacgctttccgagtctgtcttctcgccgctggaacgctccctgtccggcttgttacgtctatgcgcctcgctgcgcacagctcagacctacaccaccggcacgctaacgcgttactcgcaacgtcgctacctgctacccgagcccgcgctggcaccgctgctggagcgaccgctgcccgtctaccgcgtacacctgcccaatgaccagcacgtcttctgcgccgtggcctccgaaacctggcatcgcagcctctttccgcgcgacctgctccgtcacgtacccgacagccgtttctcggacgaggccctgaccgagaccgtgtggctacacgacgacgacgtggccagcaccagccccgagacacagttctactacacgcgacacgaagtcttcaacgaacgtctgcccgtcttcaattttgtggccgactttgatttacggctgcgcgacggcgtctccggtctggcgcgacacaccgtctttgagttatgtcgcggactacgacgcgtctggatgaccgtatgggcgagcctctttggctacacgcaccccgaccggcacccggtctatttcttcaaaagcgcgtgcccacccaacagcgtgcccgtggacgcggccggcgcgcctttcgatgacgacgactatctcgattaccgggacgagcgcgacacagaggaagacgaagacgggaaagaggataaaaataacgtcccgggtaacggcgttttccaaaaaacaacgtcctctgttgacacgtcacccccttactgccgctgcaagggcaaactggggctgcgcatcatcacgccgttccccgcctgtaccatagccgtacaccccagcgttttacgcgccgtggcgcaggtgctcaatcacgccgtctgtctcgacgccgaactgcacacgctgctggaccccatctcgcatcccgagagcagcctagacacaggcatctaccaccatggacgctctgtacgtctgccctacatgtataaaatggaccaagacgacggctatttcatgcatcgccgtctgttgccgctgttcatcgtgcccgacgcctaccgcgaacacccgctaggctttgtgcgcgcccaactggatctgcgtaacctgcttcaccaccacccgccgcacgacctgcccgcgttgcccctgtcaccgccgccacgcgtcattctcagcgtacgcgacaaaatctgcccctcgaccgaagccaactttatcgagacgcgctcgcttaacgtgacgcgttatcgacgccgcggtctcaccgaggtgctcgcctatcacctgtacggtggcgacggcgccactgccgctgcgatttccgacacggacttgcagcggctcgtcgtcacccgcgtgtggccgccgctgctcgagcacctcacgcaacactacgaaccgcacgtcagcgagcagtttaccgcgccccacgtcctcctctttcagccccacggcgcctgctgcgtggccgtcaagcgacgcgacggcgcgcgcacgcgggattttcgctgtctcaactacacgcaccgcaacccgcaagagaccgtgcaggtgttcatcgacctgcgcaccgagcacagctacgcgctctgggccagcctctggagccgctgtttcaccaaaaagtgtcactccaacgccaaaaacgtccacatttccatcaaaatcagaccgcccgacgcgcccatgccgccggcgaccgccgtctga

SEQ ID NO: 13816 - DNA, 27 bp, unidentified
  misc_feature 1..27: note = Synthetic
  source 1..27: mol_type = other DNA
atgacataccggcgatcatcaccatga

SEQ ID NO: 13817 - DNA, 27 bp, unidentified
  misc_feature 1..27: note = Synthetic
  source 1..27: mol_type = other DNA
atgacataccggcgatcatcaccatga

SEQ ID NO: 13818 - DNA, 45 bp, unidentified; identical to SEQ ID NO: 5999
  misc_feature 1..45: note = Synthetic
  source 1..45: mol_type = other DNA

SEQ ID NO: 13819 - DNA, 138 bp, unidentified; identical to SEQ ID NO: 6001
  source 1..138: mol_type = other DNA
  misc_feature 1..138: note = Synthetic

SEQ ID NO: 13820 - DNA, 735 bp, unidentified
  misc_feature 1..735: note = Synthetic
  source 1..735: mol_type = other DNA
atggcgtccctgctcggggtgctgtgcggttggggaacgcgccccgaggaacaacaatatgagatgattcgggccgcggctccgccctcggaggcggagccgcggctgcaggaggccctggcggtggtcaatgcgcttttgcccgcccccatcacgctcgacgacgccctagagtcgctggacgacacccggcgcctcgtgaaggcgcgcgccctggcccgcacataccacgcctgcatggtcaacctcgagaggctggcgcgccaccacccgggactcgagggctccaccatcgacggggccgttgcggcgcatcgggacaagatgcgccgcctggcggacacgtgcatggccaccatcctgcagatgtacatgtcggtgggggccgcggacaagtcggcggacgtgctcgtctcccaggccattcggagcatggccgagagcgacgtggtcatggaggacgtggcgatcgcggagcgggcccttggtctctccacctcggctctggccggagggacccgcaccgcggggcttggagcgaccgaggccccccccgggcctacgagggcacaagccccggaggttgcgtcggtcccagtcacccacgccggcgacagatcccccgttcgccccgggcccgtgccccccgcggaccctacaccggacccacgtcatcgcacgtccgcccccaaacgccaggcctcgtcgaccgaggcccccctccttctcgcttag

SEQ ID NO: 13821 - DNA, 57 bp, unidentified; identical to SEQ ID NO: 6007
  misc_feature 1..57: note = Synthetic
  source 1..57: mol_type = other DNA

SEQ ID NO: 13822 - DNA, 252 bp, unidentified
  source 1..252: mol_type = other DNA
  misc_feature 1..252: note = Synthetic
atctgcatcttaagcacgccctctcccgcctctacgaggtcaaccttaaaaccctgcccccggacctggatctccgcaacaccatggacagctcccaactgcgcgccctcgtcttcgctctccgcccccgccgcgccgagatttggacctggctcccgcgcgggcttgtcagcctctccgtcctcgaggagccccagggtaagtcctacgcaggcgaacatgaaaaccaccagccagggccgccactcctga

SEQ ID NO: 13823 - DNA, 303 bp, unidentified; identical to SEQ ID NO: 13009
  source 1..303: mol_type = other DNA
  misc_feature 1..303: note = Synthetic

SEQ ID NO: 13824 - DNA, 36 bp, unidentified; identical to SEQ ID NO: 4688
  source 1..36: mol_type = other DNA
  misc_feature 1..36: note = Synthetic

SEQ ID NO: 13825 - DNA, 1458 bp, unidentified
  source 1..1458: mol_type = other DNA
  misc_feature 1..1458: note = Synthetic
atggggcagttcattagcttcatgcaagaaataccaacctttttgcaggaggctctgaacattgctcttgttgcagtcagtctcattgccatcattaagggtatagtgaacttgtacaaaagtggtttattccaattctttgtattcctagcgcttgcaggaagatcctgcacagaagaagctttcaaaatcggactgcacactgagttccagactgtgtccttctcaatggtgggtctcttttccaacaatccacatgacctacctttgttgtgtaccttaaacaagagccatctttacattaaggggggcaatgcttcatttcagatcagctttgatgatattgcagtattgttgccacagtatgatgttataatacaacatccagcagatatgagctggtgttccaaaagtgatgatcaaatttggttgtctcagtggttcatgaatgctgtgggacatgattggcatctagacccaccatttctgtgtaggaaccgtacaaagacagaaggcttcatctttcaagtcaacacctccaagactggtgttaatgaaaattatgctaagaagtttaagactggcatgcatcatttatatagagaatatcctgactcttgcccgaatggcaaactgtgcttaatgaaggcacaacctaccagttggcctctccaatgtccactcgaccacgttaacacattacacttccttacaagaggtaaaaacattcaacttccaaggaggtccttgaaagcattcttctcctggtctttgacagactcatccggcaaggatacccctggaggctattgtctagaagagtggatgctcgtagcagccaaaatgaagtgttttggcaatactgctgtagcaaaatgcaatttgaatcatgactctgaattctgtgacatgttgaggctttttgattacaacaaaaatgctatcaaaaccctaaatgatgaaactaagaaacaagtaaatctgatggggcagacaatcaatgccctgatatctgacaatttattgatgaaaaacaaaattagggaactgatgagtgtcccttactgcaattacacaaaattttggtatgtcaaccacacactttcaggacaacactcattaccaaggtgctggttaataaaaaacaacagctatttgaacatctctgacttccgtaatgactggatattagaaagtgacttcttaatttctgaaatgctaagcaaagagtattcggacaggcagggtaaaactcctttgactttagttgacatctgtttttggagcacagtattcttcacagcgtcactcttccttcacttggtgggtatacccacccacagacacatcaggggcgaagcatgccctttgccacacaggttgaacagcttgggtggttgcagatgtggtaagtaccccaatctaaagaaaccaacagtttggcgtagaggacactaa

SEQ ID NO: 13826 - DNA, 2526 bp, unidentified
  source 1..2526: mol_type = other DNA
  misc_feature 1..2526: note = Synthetic
atggtctccgtcatgcggaagccgcgccccgcgagcgtcgcgatgaggatgtacggcgccacgagcacgttgttcttcttcatgacgttctcggtgcgcagcgcgtccagcgaccggaactgcaggttgacctcgcgcgacgtgaggaagtccagccgctgcaggaagaagcccagcgacagcttgcgctcctcgtccttgctgcggtgcgggtacatgcgcttgttgcgcgcgaagaagacggtcttctcgcgcgcgcccgcgcgcgtcgcgtccacgctgacgtcgccgaggtcgatgtcggcctcggcggccatgtcgggcaccggctggaacatggcgctgcctcgcgacccgcgtattttatttcagtttaacgccggctataaatacgcccgcgcgaccatgctctacaccgtcgcgccgcagctggtggtgctggtggggcgccaccaggagatcgagcgcgtgctgtacctatcgctgtacgactccgtggacgaggcctcgccgatctacttcttcgcaaagcagtacatccagaaggaccccgagcacgtgcgcagacacatcttgctgaccatgcgcgtgcggcagctcaaggggtacctggggagcctgctgggcctgcaggacgagatcatcgtgtactcgcacaagaacaacctggagtacagctacgtggacaacaccatcttcaacccgttctcgcccacgcaaaagaaaacgctcatccgcacggacggcatcctctacaacgcgtacgcggacgcgtgcaacttcctggtggtctgggtggcgcgcgcggcggacacctccgcgccggagttcggctccttcgaggagcccaacgactccatcctcaagttcgaggagcggctcatccgcgagttcgcgaacctcgacctaaacatgaacgtggagaccaagttcaacaacatcttccgcacgaacctgcgcgagtccgggctccgcgcgatcgcgcagcagtcgccggacaagcgcgcggaggtgggcgacttcgacatcctgctctcgaagacggacgacttcttcgtgtcgatgacggggacgcgcttcatgctggtggacgagccgctgaacctctcggtgtggggcccggaaggcgacctggtcatctcgagcgacgggaagacgctcacggtgaacgacgtgggtctgttcacgaagctcatcgagagcatggacgtaaagatggaccgcgtcaagggcgacatcacctacaaggtgtcgctgaacacgaccatcacgtctaagatgaagctggacatggaaacgagcttcatcttcgtggagacggcgaccaacaacatactgctctccacggacaagcgcatctcgatcatcctcgcgaagtcgcacgtgtccgtgaaggtcaagaactacatcccgaacatcgagaagtacttcacgttcttgatcgtggccatcagcgtgatgttcaacaacgtgaagcagtcctcggacttcaccaaggtggagaccgtgtactggtcgcgcatctgccagaacaccaagaccaagaaccgcaagcccgtgatcgtgcagtcgctggacgcagacatggccaaggtcagcaacaacttcttcaagtccgagacgcgcgaggtcttcgtgaacggaaacggcgtcatgttttcgtgcatggaccccgacgggcgctacaacagcgtgggcttcctctccatcttccaccgcctgcagcgcatctgcattccgtgctgcttcctgcgcagccaggcgcacaccgacaccttcaagtcctgcgtgtacgacgaagaggtcgaccgcagcgcgctgaacccgtacatcctcaacttcgggaaggtggtcaccgagtcaaaactatcattcctgcccatcatattcgacaagtacttcaacgaggggttggaggcggacttcgaggcggacaacaagcgcctgcgcgccaccgccgggtactacgtggtgcactgctgcgaaggcgcgatcgtgcgtctgcgcaccgtgtccgagatagtgagctacgtaaacgctagcgggaacgtgctcatctccggggacatggtctacttccccatgcggctggcggataccgcggccacgcgcatcctcatccaggagatcgtgcacgacgtggtgcgcatccgcaaggacgcggccacggacgccatccacctagaccaggacgcgagcgggcgcctcgcgagcatgtttccgcacaaggccgcgcgacgcgtggtgcgcgaggagaacgggctctcgctcaccacctcgggcttcttcgtggacggcaagcgcttcgcgccgaagctgacctcgcgcttcacggccttcgtgcgcaacgcgaccgtgcccaacgccgtgagccgccacttcgcaaagctcttccggcacgtggtcacggacgcgcccgaccgcttcatgaagacctggtccgtgaactgcgcgctgaagctgggcgtggagccggactccgcgcgcgcgccggcgctgctgcaggagttctacccgcagccataa

SEQ ID NO: 13827 - DNA, 90 bp, unidentified; identical to SEQ ID NO: 6020
  source 1..90: mol_type = other DNA
  misc_feature 1..90: note = Synthetic

SEQ ID NO: 13828 - DNA, 213 bp, unidentified
  source 1..213: mol_type = other DNA
  misc_feature 1..213: note = Synthetic
ttgtacaccgctatatttggtgtatttatgggttctccggaagatgatttgacagactttatagaaattgttaaatctgttctaagtgatgagaaaactgtcacatcaactaataataccggttgttggggttggtattggttaattattattttttttatagttcttattctactactattgatatatttgtatttaaaagttgtttggtga

SEQ ID NO: 13829 - DNA, 90 bp, unidentified; identical to SEQ ID NO: 6022
  source 1..90: mol_type = other DNA
  misc_feature 1..90: note = Synthetic

SEQ ID NO: 13830 - DNA, 90 bp, unidentified; identical to SEQ ID NO: 6023
  source 1..90: mol_type = other DNA
  misc_feature 1..90: note = Synthetic

SEQ ID NO: 13831 - DNA, 186 bp, unidentified
  source 1..186: mol_type = other DNA
  misc_feature 1..186: note = Synthetic
atgggttctcaggaagatgatttgacagactttatagaaattgttaaatctgttctaagtgatgagaaaactgtcacatcaactaataatacaggttgttggggttggtattggttaattattattttttttatagttcttattctactactattgatatatttgtatttaaaagttgtttggtga

SEQ ID NO: 13832 - DNA, 336 bp, unidentified
  source 1..336: mol_type = other DNA
  misc_feature 1..336: note = Synthetic
atggacctcaagacgctggtgatcacgcacgaagactacggcactaaggccgtcagcgtcgacggcgcctcgagcgcgctggacttgcgcgagcgagtgaaggtcgcgttccaggtgctgggcgagattgagctctttgtacacccgtgcccgctccgctcgcgcgtgctcgactcggatgcgctgccggtggaagagcccgcacacgccgcgttcttcgtggcgctgggcgcgccgcgcgcgccgggaatgctgcgcacgctagtcgttggcgcgcccggcgcccgcagcgcgcaaaaggcacgaggcagccgcggcgcccggtgccagctctag

SEQ ID NO: 13833 - DNA, 21 bp, unidentified
  source 1..21: mol_type = other DNA
  misc_feature 1..21: note = Synthetic
gtggatcctaggcgtaactag

SEQ ID NO: 13834 - DNA, 117 bp, unidentified; identical to SEQ ID NO: 1431
  misc_feature 1..117: note = Synthetic
  source 1..117: mol_type = other DNA

SEQ ID NO: 13835 - DNA, 285 bp, unidentified; identical to SEQ ID NO: 10775
  source 1..285: mol_type = other DNA
  misc_feature 1..285: note = Synthetic

SEQ ID NO: 13836 - DNA, 288 bp, unidentified; identical to SEQ ID NO: 13005
  misc_feature 1..288: note = Synthetic
  source 1..288: mol_type = other DNA

SEQ ID NO: 13837 - DNA, 633 bp, unidentified
  source 1..633: mol_type = other DNA
  misc_feature 1..633: note = Synthetic
ttgcaagaagccatggccgcgggctccggcgagcaggagctcagggccatcatccgcgacctggggtgcgggccctacttcctgggcaccttcgataagcgattcccgggattcatggccccgcacaaggtggcctgcgccatcgtcaacacggccggccgcgagaccgggggcgagcattggctggccttcgcctggaacccgcgctcgaacacctgctacctcttcgaccccttcgggttctcggaccagcgcctcaagcaaatctaccagttcgagtacgagggactgctgcgccgcagcgccctggccaccaaggaccgctgcgttaccctggaaaagtccacccagaccgtgcagggtccgcgttcggccgcctgcgggcttttctgctgcatgttcctacacgccttcgtgcactggcccaaccgccccatggacaaaaatcccaccatgaacttgctgacgggggtgcccaacggcatgctccagtcgccccaggtggaacctaccctgcgccgcaaccaggaggcactctaccgcttcctcaactcccactctgcatactttcgctctcaccgcgcgcgcattgagaaggccaccgccttcgaccgcatgaatcaagacatgtaa

SEQ ID NO: 13838 - DNA, 1581 bp, unidentified
  misc_feature 1..1581: note = Synthetic
  source 1..1581: mol_type = other DNA
atatccgacaccccagccccgacggcagccgacagcccggtcatggcgactgacattgatatgctaattgacctcggcctggacctctccgacagcgatctggacgaggacccccccgagccggcggagagccgccgcgacgacctggaatcggacagcagcggggagtgttcctcgtcggacgaggacatggaagacccccacggagaggacggaccggagccgatactcgacgccgctcgcccggcggtccgcccgtctcgtccagaagaccccggcgtacccagcacccagacgcctcgtccgacggagcggcagggccccaacgatcctcaaccagcgccccacagtgtgtggtcgcgcctcggggcccggcgaccgtcttgctcccccgagcagcacgggggcaaggtggcccgcctccaacccccaccgaccaaagcccagcctgcccgcggcggacgccgtgggcgtcgcaggggtcggggtcgcggtggtcccggggctgccgatggtttgtcggacccccgccggcgtgcccccagaaccaatcgcaaccctgggggaccccgccccggggcggggtggacggacggccccggcgccccccatggcgaggcgtggcgcggcagtgagcagcccgacccacccggaggccagcggacacggggcgtgcgccaagcaccccccccgctaatgacgctggcgattgcccccccgcccgcggacccccgcgccccggccccggagcgaaaggcgcccgccgccgacaccatcgacgccaccacgcggttggtcctgcgctccatctccgagcgcgcggcggtcgaccgcatcagcgagagctttggccgcagcgcacaggtcatgcacgacccctttggggggcagccgtttcccgccgcgaatagcccctgggccccggtgctggcgggccaaggagggccctttgacgccgagaccagacgggtctcctgggaaaccttggtcgcccacggcccgagcctctatcgcacttttgccggcaatcctcgggccgcatcgaccgccaaggccatgcgcgactgcgtgctgcgccaagaaaatttcatcgaggcgctggcctccgccgacgagacgctggcgtggtgcaagatgtgcatccaccacaacctgccgctgcgcccccaggaccccattatcgggacggccgcggctgtgctggataacctcgccacgcgcctgcggccctttctccagtgctacctgaaggcgcgaggcctgtgcggcctggacgaactgtgttcgcggcggcgtctggcggacattaaggacattgcatccttcgtgtttgtcattctggccaggctcgccaaccgcgtcgagcgtggcgtcgcggagatcgactacgcgacccttggtgtcggggtcggagagaagatgcatttctacctccccggggcctgcatggcgggcctgatcgaaatcctagacacgcaccgccaggagtgttcgagtcgtgtctgcgagttgacggccagtcacatcgtcgcccccccgtacgtgcacggcaaatatttttattgcaactccctgttttag

SEQ ID NO: 13839 - DNA, 108 bp, unidentified
  misc_feature 1..108: note = Synthetic
  source 1..108: mol_type = other DNA
ttggtgaggctctggggcgcgcgcgagcgcttcggggagttcttcttgacggccgagtctccgcggcgcacggcgcgctcgaactcggcgacgagctcccgaaagtag

SEQ ID NO: 13840 - DNA, 75 bp, unidentified; identical to SEQ ID NO: 6038
  misc_feature 1..75: note = Synthetic
  source 1..75: mol_type = other DNA

SEQ ID NO: 13841 - DNA, 795 bp, unidentified
  misc_feature 1..795: note = Synthetic
  source 1..795: mol_type = other DNA
atgactgtacacaaaaaccgttttcgacgatcgcgaagcctgtccgtgacacacagaatacaaaaacgacctgatcacagagaaaaaacaaagctttacttacaactgaaactccacgatctacacgccgtcttcaacctgtttccagaatacgaacagaaatttctagcgatcataaaactgccaattaccggtaaagaacccatcgacgtcccattcagtctcagcaatcaccatcaacacacctgcctagaattctctccctacgctaacgaacaaatctccaaaagcgcctgcctacactgcgaatccgtctccgttccaacctcctcagatgcaatggtcgcccacttgaaccaagtcaccaacgtcatgcaaaacagattttacttctacggctttcgaaaggacatggagctgatacgcatgtccgccaaacaacccactatctttcaaatcttttatattgtccacaacacgatcaacaacatattccctatcatgttcgaaaaaaaacaaaagctcggaatgcacatagttttccagtctcgcactctgcacattccttgtgaatgcattaaacaaataatagcggtatcttcgggctacaacgtttatctagatatactacaagacagtgtaatcctaactgtcctctgcgaaacactagatactaatactaatattcacattgacatagggatgcttcaaaaaaagctcgaagaaatggacatcccgaacgaaatcagcgatagactcgaaaaatacaaaggacatctaataggtttccattaa

SEQ ID NO: 13842 - DNA, 51 bp, unidentified
  source 1..51: mol_type = other DNA
  misc_feature 1..51: note = Synthetic
atctacacgccgtcttcaacctgtttccagaatacgaacagaaatttctag

SEQ ID NO: 13843 - DNA, 96 bp, unidentified; identical to SEQ ID NO: 6041
  source 1..96: mol_type = other DNA
  misc_feature 1..96: note = Synthetic

SEQ ID NO: 13844 - DNA, 63 bp, unidentified; identical to SEQ ID NO: 6042
  source 1..63: mol_type = other DNA
  misc_feature 1..63: note = Synthetic

SEQ ID NO: 13845 - DNA, 27 bp, unidentified
  misc_feature 1..27: note = Synthetic
  source 1..27: mol_type = other DNA
atgccgcggcgtggaaaagcgcgctag

SEQ ID NO: 13846 - DNA, 1476 bp, unidentified
  source 1..1476: mol_type = other DNA
  misc_feature 1..1476: note = Synthetic
atgggacaaatagtgacattcttccaggaagtgcctcatgtaatagaagaggtgatgaacattgttctcattgcactgtctgtactagcagtgctgaaaggtctgtacaattttgcaacgtgtggccttgttggtttggtcactttcctcctgttgtgtggtaggtcttgcacaaccagtctttataaaggggtttatgagcttcagactctggaactaaacatggagacactcaatatgaccatgcctctctcctgcacaaagaacaacagtcatcattatataatggtgggcaatgagacaggactagaactgaccttgaccaacacgagcattattaatcacaaattttgcaatctgtctgatgcccacaaaaagaacctctatgaccacgctcttatgagcataatctcaactttccacttgtccatccccaacttcaatcagtatgaggcaatgagctgcgattttaatgggggaaagattagtgtgcagtacaacctgagtcacagctatgctggggatgcagccaaccattgtggtactgttgcaaatggtgtgttacagacttttatgaggatggcttggggtgggagctacattgctcttgactcaggccgtggcaactgggactgtattatgactagttatcaatatctgataatccaaaatacaacctgggaagatcactgccaattctcgagaccatctcccatcggttatctcgggctcctctcacaaaggactagagatatttatattagtagaagattgctaggcacattcacatggacactgtcagattctgaaggtgaagacacaccagggggatattgtctgaccaggtggatgctaattgaggctgaactaaaatgcttcgggaacacagctgtggcaaaatgtaatgagaagcatgatgaggaattttgtgacatgctgaggctgtttgacttcaacaaacaagccattcaaaggttgaaagctgaagcacaaatgagcattcagttgatcaacaaagcagtaaatgctttgataaatgaccaacttataatgaagaaccatctacgggacatcatgggaattccatactgtaattacagcaagtattggtacctcaaccacacaactactgggagaacatcactgcccaaatgttggcttgtatcaaatggttcatacttgaacgagacccacttttctgatgatattgaacaacaagctgacaatatgatcactgagatgttacagaaggagtatatggagaggcaggggaagacaccattgggtctagttgacctctttgtgttcagcacaagtttctatcttattagcatcttccttcacctagtcaaaataccaactcataggcatattgtaggcaagtcgtgtcccaaacctcacagattgaatcatatgggcatttgttcctgtggactctacaaacagcctggtgtgcctgtgaaatggaagagatga

SEQ ID NO: 13847 - DNA, 1476 bp, unidentified
  misc_feature 1..1476: note = Synthetic
  source 1..1476: mol_type = other DNA
atgggacaaatagtgacattcttccaggaagtgcctcatgtaatagaagaggtgatgaacattgttctcattgcactgtctgtactagcagtgctgaaaggtctgtacaattttgcaacgtgtggccttgttggtttggtcactttcctcctgttgtgtggtaggtcttgcacaaccagtctttataaaggggtttatgagcttcagactctggaactaaacatggagacactcaatatgaccatgcctctctcctgcacaaagaacaacagtcatcattatataatggtgggcaatgagacaggactagaactgaccttgaccaacacgagcattattaatcacaaattttgcaatctgtctgatgcccacaaaaagaacctctatgaccacgctcttatgagcataatctcaactttccacttgtccatccccaacttcaatcagtatgaggcaatgagctgcgattttaatgggggaaagattagtgtgcagtacaacctgagtcacagctatgctggggatgcagccaaccattgtggtactgttgcaaatggtgtgttacagacttttatgaggatggcttggggtgggagctacattgctcttgactcaggccgtggcaactgggactgtattatgactagttatcaatatctgataatccaaaatacaacctgggaagatcactgccaattctcgagaccatctcccatcggttatctcgggctcctctcacaaaggactagagatatttatattagtagaagattgctaggcacattcacatggacactgtcagattctgaaggtaaagacacaccagggggatattgtctgaccaggtggatgctaattgaggctgaactaaaatgcttcgggaacacagctgtggcaaaatgtaatgagaagcatgatgaggaattttgtgacatgctgaggctgtttgacttcaacaaacaagccattcaaaggttgaaagctgaagcacaaatgagcattcagttgatcaacaaagcagtaaatgctttgataaatgaccaacttataatgaagaaccatctacgggacatcatgggaattccatactgtaattacagcaagtattggtacctcaaccacacaactactgggagaacatcactgcccaaatgttggcttgtatcaaatggttcatacttgaacgagacccacttttctgatgatattgaacaacaagctgacaatatgatcactgagatgttacagaaggagtatatggagaggcaggggaagacaccattgggtctagttgacctctttgtgttcagtacaagtttctatcttattagcatcttccttcacctagtcaaaataccaactcataggcatattgtaggcaagtcgtgtcccaaacctcacagattgaatcatatgggcatttgttcctgtggactctacaaacagcctggtgtgcctgtgaaatggaagagatga

SEQ ID NO: 13848 - DNA, 1476 bp, unidentified; identical to SEQ ID NO: 13847
  source 1..1476: mol_type = other DNA
  misc_feature 1..1476: note = Synthetic

SEQ ID NO: 13849 - DNA, 144 bp, unidentified; identical to SEQ ID NO: 6046
  source 1..144: mol_type = other DNA
  misc_feature 1..144: note = Synthetic

SEQ ID NO: 13850 - DNA, 564 bp, unidentified
  source 1..564: mol_type = other DNA
  misc_feature 1..564: note = Synthetic
gtgctgtacaaaagagagagactgggacgtagatccggacagaggacggtcaccatggacgatctgccgctgaacgtcgggttacccatcatcggcgtgatgctcgtgctgatcgtggccattctctgctatctagcttaccattggcacgacaccttcaaactggtgcgcatgtttttgagctaccgctggctgatccgctgttgcgagctgtacggggaatacgagcgccggttcgcggacctgtcgtcgctgggcctcggcgccgtacggcgggagtcggacagacgataccgtttctccgaacgacccgatgagatcttggtccgttgggaggaagtgtcttcccagtgcagctacgcgtcgtcgcggataacagaccgccgcgcgggttcatcgtcttcgtcgtcggtccacgtcgctaaccagagaaacagcgtgcctccgccggacatggcggtgacggcgccgctgaccgacgtcgatctgttgaaacccgtgacgggatccgcgacgcagttcaccaccgtagccatggtacattatcatcaagaatacacgtga

SEQ ID NO: 13851 - DNA, 381 bp, unidentified
  source 1..381: mol_type = other DNA
  misc_feature 1..381: note = Synthetic
atgaaagacgtgctgctgctgctgggcaagcctctgtgccctgtatgcgcgctggccaacacgatcctgtcccacttggaggacaagtaccctattttgagggtcaatattctttcacttttcaccaagaagaacgtggtcgacgtgcttggcatgcgcacttacgagctggtgagcgcgctcatggagttctttggcggcgaatacgtgatggtgctgaagatgcagcccgacacgggcgaagtcgcgtttgtgcccttcaaggagtacctggtggtcgggcagatcagcatggacgcgctggactacgatcagctcgaacgcagcgtggaggatgcgccgtacggggtgtggccgccgcgcaagaagtccgtcgtgtag

SEQ ID NO: 13852 - DNA, 69 bp, unidentified; identical to SEQ ID NO: 6051
  source 1..69: mol_type = other DNA
  misc_feature 1..69: note = Synthetic

SEQ ID NO: 13853 - DNA, 18 bp, unidentified
  source 1..18: mol_type = other DNA
  misc_feature 1..18: note = Synthetic
atggttccatgggcgtga

SEQ ID NO: 13854 - DNA, 69 bp, unidentified; identical to SEQ ID NO: 6051
  misc_feature 1..69: note = Synthetic
  source 1..69: mol_type = other DNA

SEQ ID NO: 13855 - DNA, 18 bp, unidentified
  misc_feature 1..18: note = Synthetic
  source 1..18: mol_type = other DNA
atggttccatgggcgtga

SEQ ID NO: 13856 - DNA, 126 bp, unidentified
  source 1..126: mol_type = other DNA
  misc_feature 1..126: note = Synthetic
acgttcccgcccttacagatcacgggaccctgccgctgcgtagcagtatcagtggagttcagcgagtcaccatcactgacgcccgccgccggacctgtccctacgtttacaaagcactgggcatag

SEQ ID NO: 13857 - DNA, 966 bp, unidentified
  source 1..966: mol_type = other DNA
  misc_feature 1..966: note = Synthetic
atggaggacgaacggctcatcttcaacaaggtaaacgccaacgtcctcaaggcgtacctctgctcccgcatatcggacatcgtggacgagatggtggaccggcggcacctgcagaagaagaagtcggtcgcgcgccgcgtggagatgcgcattcccgtggacttgctacacgcgccctttgtgcaggagttcgcgctcggcgcctaccgcgacggcgtgctcgccagcctcgtctcgagcatcgtggagaacaacttcttttcccccgacgacggcaagctcgtcgacggcgccgagcgcgtgctcatcctcacgccgctcgagacgcgcatcctcggctgcgtcccgcgcgagtcctcgctgtacatcgacgtctccgacgtgaaggcgctcgcgaaccggctcaagtcgccgcccgcgcacattgagtgcggcggcacgcgctacgacatagacgcgcggcacgtggacgacttcatcaacgtggtcgccaacgacggtctgctcgtgctcgacgagaagagctccatcaaggacagcatgtacgtcgtcgacgaggagctgctgtgtgcgatgcgccggcgcttcatgcgcagcccgcagatctcgcaggggctcatctcgcgctcgcggctgcacgactacctcatgcgctcgatgacgcgcgaggagcagaagatattcgtggcgctcaaggacgcggagagcgccgacgtgctcggactcgagaccgtgtgtcttggcgacttcgtgtacgcgaagcacaccgcgctagtctccgcgctctccgcgagcctggaccgctgcagcaagcgcatgcacgaggacatgtacgcgcgcctcgcgcacctggtgcccgacaacacgcgcatgaacgtgtccaagctcgtggagtcgctcaccgtgcagagcacgcgcatggagctcggctccgggctctccccgccgccgtgcggcggggagtga

SEQ ID NO: 13858 - DNA, 84 bp, unidentified
  source 1..84: mol_type = other DNA
  misc_feature 1..84: note = Synthetic
aggctctcccgcttgaagcgcacctcctgcacgacatccatcgtatatttactgtcactaaattaccggctccgagaaatatag

SEQ ID NO: 13859 - DNA, 378 bp, unidentified
  source 1..378: mol_type = other DNA
  misc_feature 1..378: note = Synthetic
atggagcccacgccgatgctccgcgaccgggatcacgacgacgcgccccccacctacgagcaggccatgggtctgtgcccgacgacggtttccacgccaccgccgccaccacccgactgcagcccaccgccctatcgacccccgtactgcctggttagttcgccgtcgccgcgacacacgttcgacatggatatgatggaaatgcccgccaccatgcatcccaccacgggggcgtactttgacaacggctggaaatggacttttgctctcttagtggtcgctatattagggatcattttcttggccgtggtgttcaccgtggtgattaaccgggacagtgccaatataacaacggggacgcaagcatcatcggggtaa

SEQ ID NO: 13860 - DNA, 456 bp, unidentified
  misc_feature 1..456: note = Synthetic
  source 1..456: mol_type = other DNA
atgatgcgacagcgagcgacctgtgttaaaattcgcgtggaagagcaagcggcgcgacgtgattttctaaccgcacaccgacggtacctcgatcccgcgcttagcgagcgcctggacgcggcggacgatcgtcttgcggaccaggaggagcagctcgaagaggccgcggcgaacgcgtctctgtggggggacggcgacctggcggacggatggatgagtccgggcgacagcgacctgctagtcatgtggcagctgacatcagcccccaaggtgcacaccgacgctccttcaaggcctggctcgcgtcctacatacactccctcagccgccgggcgtccggacgcccaagcggcccctccccccgagacggcgccgtctccggagcccgccccgggtcccgccgccgatccagcttccgggagcggcttcgcgcgggactgtcccgatggcgagtga

SEQ ID NO: 13861 - DNA, 198 bp, unidentified
  source 1..198: mol_type = other DNA
  misc_feature 1..198: note = Synthetic
atgctgctcatggtcgtctccgggggcgcgctggttaccaagggcatcccgccgctgcgcttgctcacgctgcgctcggcgcgcgccgcgcgcgtcgtcgccgtgttggaagtcgtggccgtagtgctcatcgtgcccggtacgctcgcgctgtattcggcgtacgtgcgccagctctgggcgcgctcgcaaaactga

SEQ ID NO: 13862 - DNA, 33 bp, unidentified; identical to SEQ ID NO: 6063
  source 1..33: mol_type = other DNA
  misc_feature 1..33: note = Synthetic

SEQ ID NO: 13863 - DNA, 45 bp, unidentified; identical to SEQ ID NO: 2765
  misc_feature 1..45: note = Synthetic
  source 1..45: mol_type = other DNA

SEQ ID NO: 13864 - DNA, 1119 bp, unidentified
  misc_feature 1..1119: note = Synthetic
  source 1..1119: mol_type = other DNA
atgcatcccgtcctgcgccaaatgcgtcccacccccccggcgaccaccgcaaccgcggccgtagcaggcgccggcgctgtacaacagcagacagagatggacttggaagagggcgaagggctggcaagactgggggcaccgtccccggagcgacacccccgcgtgcagctgcaaaaggacgtgcgcccggcgtacgtgcctgcgcagaacctgttcagggaccgcagtggggaggagcccgaggagatgcgcgactgccggtttcgggcgggcagggagctgcgcgagggcctggaccgccagcgcgtgctgcgcgacgatgatttcgagccgaacgagcagacggggatcagccccgcgcgcgcgcacgtggcggcggccaacctggtgacggcctacgagcagacggtgaaacaggagcgcaacttccaaaagagtttcaacaaccacgtgcgcaccctgattgcgcgcgaggaggtggccctgggcctgatgcacctatgggacctggcggaggccatcgtgcaaaacccggacagcaagcctctgacggcgcagctgttcctggtggtgcagcacagcagggacaacgaggcgtttagggaggcgctgctaaacattgccgagcccgagggtcgctggctgctggagctgattaacatcttgcagagcatcgtagtgcaggagcgcagcctgagcctggccgagaaggtggcggcgatcaactactcagtgctgagcctgggcaagttttacgcgcgcaagatttacaagacgccgtacgtgcccatagacaaagaggtgaagatagacagcttttacatgcgcatggcgctcaaggtgctgacgctgagcgacgacctgggcgtgtaccgcaacgaccgcatccacaaggccgtgagcacaagccggcggcgcgagctgagcgaccgcgagctgatgctgagcctgcgccgggcgctggtagggggcgccgccagcggcgaagagtcccactttgacatgggggcggacctgcattggcagccgagccggcgcgccttggaggccgcctacggtccagaggacttggatgaggatgaggaagaggaggaggatgcacccgctgcggggtactga

SEQ ID NO: 13865 - DNA, 39 bp, unidentified; identical to SEQ ID NO: 6066
  misc_feature 1..39: note = Synthetic
  source 1..39: mol_type = other DNA

SEQ ID NO: 13866 - DNA, 24 bp, unidentified
  misc_feature 1..24: note = Synthetic
  source 1..24: mol_type = other DNA
acggcgctcttgatgcgcgcgtag

SEQ ID NO: 13867 - DNA, 21 bp, unidentified
  misc_feature 1..21: note = Synthetic
  source 1..21: mol_type = other DNA
ttgttgtcggaggtctggtag

SEQ ID NO: 13868 - DNA, 228 bp, unidentified
  misc_feature 1..228: note = Synthetic
  source 1..228: mol_type = other DNA
atggccctcacttgccgccttcgcgtccccattactggctaccgaggaagaaactcgcgccgtagaaggatgttggggcgagggatgcgccgccacagacgaaggcgcgctatcagcagacgattagggggtggctttttgccagctcttatacccatcatcgccgcagcgatcggggcgataccaggcatagcttcagtggcggttcaggcctcgcagcgccactaa

SEQ ID NO: 13869 - DNA, 6834 bp, unidentified
  source 1..6834: mol_type = other DNA
  misc_feature 1..6834: note = Synthetic
atgggcgtgtctcaatttttatcgattattaagaaaaaacaggccagaatggcgggcctaaatgagatactcttacctgaggtacatttaaactcacccatcgttagatataagcttttctactatatattgcatggccagttaccaaatgatttggagccagatgacttgggcccactagcaaatcagaattggaaggcaattcgagctgaagaatcccaggttcatgcacgtttaaaacagatcagagtagaactcattgcaaggattcctagtctccggtggacccgctctcagagggagattgccatactcatttggccaagaatacttccaatcctgcaagcatatgatcttcggcaaagtatgcaattgcccacagtatgggagaaattgactcaatccacagttaatcttataagtgatggtctagaacgggttgtattacacatcagcaatcagctgacaggcaagcctaacttgtttaccagatctcgagcaggacaagacgtaaaggattactcaattccatccactagagagctatctcaaatatggtttaacaacgagtggagtggatctgtaaagacctggcttatgattaaatatagaatgaggcagctaatcacaaaccaaaagacaggtgagttaacagatttagtaaccattgtggatactaggtccactctatgcattattgccccagaattagttgctttatactccaatgagcacaaagcattaacgtacctcacctttgaaatggtattaatggtcactgatatgttagagggacgactcaatgtttcttctttgtgcacagctagtcattatctgtcccctctaaagaagagaatcgaaattctcctaacattagttgatgaccttgctctacttatgggggacaaagtatacggtgttgtctcttcacttgagagttttgtttacgcccaattacagtatggtgatcctgttgtagacattaagggtacattctatggatttatatgtaatgagattctcgacctactgactgaagacaacatctttactgaagaggaggcaaacaaggttcttctggacttgacatcacagtttgacaatctatcccctgatttaactgctgagctcctctgcattatgagactttggggccatcccacattaactgccagccaagcagcatccaaggtccgagagtccatgtgtgctcctaaggtgttagatttccaaacaataatgaagaccctggctttctttcatgcaatcctgattaacggttataggaggagccataatggaatctggcctcctactactcttcatggcaatgcccccaaaagcctcattgagatgcggcatgataattcagagcttaagtatgagtatgtcctcaagaattggaaaagtatatctatgttaagaatacacaaatgctttgatgcatcacctgatgaagatctcagcatattcatgaaagataaggcaataagctgtccaaagcaagactggatgggagtatttaggaggagcctgataaaacagcgatatcgtgatgcgaatcggcctctaccacaaccattcaaccgacggctactgttgaattttctagaggatgacagattcgatcccattaaggagcttgagtatgtcaccagtggagaatatcttagggaccctgaattttgtgcatcttactctctcaaggagaaggagataaaggctacaggtcgcatatttgccaaaatgacaaagagaatgaggtcgtgccaagtaattgcagaatcattgctggccaatcatgcaggtaaattaatgagagagaatggagttgtcttagaccagttaaaattgacaaaatctttgttaacaatgaaccagattggtattatatcagagcacagccgaagatccactgctgacaacatgactttggcacactccggttcaaataagcacagaattaataatagtcaattcaagaagaataaagacagtaagcatgagatgcctgatgatgggtttgagatagcagcctgctttctaacaactgacctcacaaaatactgcttaaattggaggtaccaagtcatcatcccctttgcgcgtacattgaattcaatgtatggtataccccacctgttcgaatggatacatttaaggctaatgcgaagcactctctatgttggtgatcccttcaatcctccatcagatcctacccaacttgaccttgatacagctctcaatgatgatatatttatagtttctcctcgtggaggaatcgagggtttatgtcaaaaattatggactatgatttccatctcaacaatcatattatccgcgactgaggcaaacactagagttatgagtatggttcagggtgacaaccaagcaattgcaatcaccactagagtagtacgctcgctcagtcattccgagaagaaggagcaagcttataaagcaagtaaattattctttgaaaggcttagagctaacaaccatggaattggacaccacttaaaagaacaagaaacaatccttagttctgatttcttcatatacagtaagagggtgttttacaaaggtcgaattttgactcaagcgttaaagaacgtgagcaagatgtgcttaacagctgacatactaggggactgttcacaagcatcatgctccaatttagctactactgtaatgcgcctgactgagaatggggtcgagaaagatttgtgttattttctaaatgcattcatgacaatcagacaattatgttatgatctggtattcccccaaaccaaatctcttagtcaggacatcactaatgcttatcttaatcatccaatacttatctcaagattgtgtctattaccatctcaattggggggcctaaactttctctcgtgtagtcgcctgttcaatagaaacataggagacccattagtgtctgcaattgctgatgtgaaacgattaattaaagctggctgtctagatatctgggtcctgtataacatccttgggaggaggcctggaaaaggtaagtggagcactctggcagctgatccttatactttaaacatagattatttggttccttcaaaaacttttttaaagaagcatgcccaatacacattgatggaacggagtgttaatcccatgctccgtggagtattcagcgaaaatgcagctgaggaagaagaggaactcgcacagtatctattagaccgtgaggtggtcatgcccagagttgcacatgtaatacttgcccagtctagttgcggtagaagaaaacaaattcaaggttacttagattccactagaactattatcaggtattcactggaggtgagaccattgtcagcaaagaagctgaatacagtaatagaatataacttattgtatctttcctacaatttggagattattgaaaaacccaatatagtccaaccttttttgaatgcaatcaatgttgatacttgtagcatcgatatagctaggtcccttagaaaactatcctgggcaactttacttaacggacgtcccatcgagggattagaaacacctgatcccattgaattggtacatgggtgtttgatcattgggtcagatgaatgtgagcattgcagtagtggtgatgacaagttcacctggtttttcctacccaaggggataaggctagataatgatccggcgtccaacccacccatcagagtaccttatattggatctaaaacagatgaacggagggttgcgtcaatggcttacatcaaaggagcatctgtatcacttaaatcagcactcagattagcgggagtatatatttgggctttcggagatacagaggaatcatggcaggatgcctatgagttagcttccactcgtgttaatctcacactagagcaattgcaatctctcactcctttaccaacatctgctaacctagtccacagattggatgatggcactactcaattaaaatttacccctgcaagctcctatgcattctctagctttgttcatatatctaatgactgtcaagttcttgagatcgatgatcaggtaacagattctaacctgatttaccagcaagttatgattactggccttgctttaattgagacatggaacaatcctccaatcaacttctccgtttatgaaactacactacacttgcacacaggctcatcttgctgtataagacctgtcgagtcttgtgtagtaaatcctcctttgcttcctgtccccttcattaatgtccctcaaatgaataaatttgtatatgaccctgaaccgctcagtttgctagagatggaaaaaattgaggacattgcttatcaaaccagaattggtggtttagatcaaatcccacttctggaaaaaatacccttactagctcacctcaccgccaagcagatggtaaatagcatcactgggcttgatgaagcaacatctatagtaaatgatgctgtggttcaagcagactatactagcaattggattagtgaatgctgctacacttacattgattctgtgtttgtttactctggctgggcattattattggaactttcgtaccaaatgtactacttaagaattcaaggcatccaaggaattctagactatgtgtatatgaccttgaggaggataccaggaatggctataacaggcatctcatccacaattagtcaccctcgtatactcagaagatgcatcaatctggatgtcatagcccctatcaattctccacacatagcttcactggattacacaaaattgagcatagatgcagtaatgtggggaactaagcaggttttgaccaacatttcgcaaggtatcgattatgagatagttgttccttctgaaagccaactcacactcagtgatagagttctaaatctagttgcacgaaaactatcactactggcaatcatctgggccaattataactaccctccaaaggttaaaggtatgtcacctgaggacaaatgtcaggctttaactacccatctactccaaactgtcgaatatgttgagcacattcagattgaaaagacaaacatcaggaggatgattattgaaccaaaattaactgcctaccctagtaatttgttttatctatctcgaaagctgcttaatgcaattcgagattctgaagaaggacaatttctgattgcatcctattataacagctttggatatctggaaccaatactaatggaatctaaaatattcaatctaagttcatccgaatcagcatcccttacagaatttgatttcatcctcaacttggaattgtctgaagccagccttgagaaatactctctcccaagtttgcttatgacggctgagaatatggataacccatttcctcaaccccccctccatcatgttctcagaccactaggtttatcatccacatcatggtataaaacaatcagtgttttgaattatattagccatatgaagatatctgacggtgcccatctatatttggcagagggaagtggagcctctatgtcacttatagagactttcttgcccggtgaaataatatggtacaacagcctattcaatagtggtgagaatcctccccaacgcaattttgcccctttacccacccagtttattgaaagtgtcccttacagattgattcaagcaggtatagcagcaggaagtggtgtagttcaaagtttctatccactctggaacggtaacagcgatatcactgacttaagcacgaaaactagtgtcgagtacattattcacaaggtaggggctgatacatgtgcgttggttcatgtggatctggagggtgtacccggctcaatgaacagtatgttggagagagcccaagttcatgcgctactgatcacggtaactgtactaaagccaggtggcttactaatcttgaaagcttcatgggaaccttttaatcgattttcctttttactcacaatactctggcaattctcttcaacaataaggatccttcgatcttcatactccgacccgaataatcacgaggtatacataatagctacattagctgttgatcccaccacatcctcctttacaaccgctctgaatagggcgcgtactctgaatgaacagggcttttcactcatcccacctgaattagtgagtgagtactggaggaggcgtgttgaacaagggcaaattatacaggattgtatagataaagtcatatcagagtgtgtcagagaccaatatctggcagacaacaatattatccttcaggcgggggggactccaagcacaagaaaatggttggatctgcctgactatctgtcgttcaatgaattacaatcggagatggccagactcataacaattcatctcaaagaggtaatagaaatcctaaagggccaatcatcagatcatgacaccctattatttacttcatacaatgtaggtcccctcgggaaaataaatacaatactcagattgattgttgagagaattcttatgtacactgtaaggaactggtgcatcttgcccactcaaactcgtctcaccttacgacagtctatcgagcttggagagtttagactaagagacgtgataacacccatggagatccttaaactatcccccaaccggaaatatctgaagtctgcattaaaccaatcaacattcaatcatctaatgggagaaacatctgacatattgttaaatcgatcctatcaaaaaagaatttggaaagccattgggtgtgtaatctattgctttggtttgcttacccctgatgttgaagattctgagcgcattgatattgacaatgatatacctgattatgatatccacggggacataatttaa

SEQ ID NO: 13870 - DNA, 24 bp, unidentified
  misc_feature 1..24: note = Synthetic
  source 1..24: mol_type = other DNA
atgttaaaaatgagaataaaatag

SEQ ID NO: 13871 - DNA, 144 bp, unidentified; identical to SEQ ID NO: 6077
  source 1..144: mol_type = other DNA
  misc_feature 1..144: note = Synthetic

SEQ ID NO: 13872 - DNA, 21 bp, unidentified
  misc_feature 1..21: note = Synthetic
  source 1..21: mol_type = other DNA
atggaaaagataaagttttag

SEQ ID NO: 13873 - DNA, 2358 bp, unidentified
  source 1..2358: mol_type = other DNA
  misc_feature 1..2358: note = Synthetic
atggccgccccggtgtccgagcccaccgtggcccgtcaaaagttgttagccctgctcgggcaggtgcagacctatgtgtttcagatagagctgctccggcggtgcgacccccacatcggacgggggaagctcccccaactgaagctgaacgcgcttcaggtgcgggcgctgcggcgtcgtctgaggccgggcctggaggcccaggccggggcctttctcaccccgctgtcggtcaccctggagttgctgctagagtacgcgtggcgcgagggcgagcggctcctgggcagcctggagacgttcgcgaccgcgggagacgtcgcggcgtttttcacggagaccatgggcctggcccgaccctgtccgtatcaccaacgggtcaggctggatacgtatggcgggaccgtccatatggagctgtgtttcctgcacgacgtcgagaactttctaaagcagctaaactactgccacctcatcaccccctcgcgcggcgccaccgccgcgctggagcgcgttcgggagtttatggtgggggcggtggggtcgggccttatcgtccccccggagcttagcgacccgtcccacccctgcgcggtctgtttcgaggaactgtgtgtgacggcgaaccagggggcgacgatcgcccgccgcctggcggaccgtatctgtaaccacgtcacccagcaggcgcaggtgcggctggacgccaacgagctgcggcggtacctgccccacgccgccgggctgtcggacgccgaccgcgcgcgggcgctctccgtgttggaccatgcgctggcccggaccgcggggggcgacgggcagccccacccgtcgcccgagaacgactcggtccgcaaggaggccgacgccctgctggaggcgcacgacgtgtttcaggccaccacgcccggcctgtacgccatcagcgaattgcgattctggctcgcgtccggcgaccgcgccggccagaccaccatggacgcgtttgccagcaacctgaccgcgctggcgcggcgcgagttgcagcaggagaccgccgcggtggccgtggaactggcgctgttcgggcggcgggcggagcatttcgatcgcgcgttcgggagccacctggcggcgctggatatggtggacgccctaataatcggcggtcaggccacgtcacccgacgatcagatcgaggcgctcatccgcgcgtgctacgaccaccacctgacgacgccgctcttgcggcgcctcgtcagccccgaacagtgcgacgaggaggcgctgcgtcgcgtgctggcgcgcatgggggcggggggcgcggcggacgcgcccaagggcggcgcgggccccgacgacgacggggaccgtgtcgccgtagaggaaggggcacgggggttgggagctcccgggggcgggggcgaggacgaagaccgtcgccgcgggcccggggggcaggggcccgagacgtggggggacatcgccacgcaagcggccgcggacgtgcgggagcgacggcggctgtacgcggaccgcctgacgaagcggtcgttggccagcctggggcgctgcgtccgcgagcagcgcggggagctcgagaagatgctgcgggtcagcgtccacggcgaggtgctgcccgcgacgttcgccgcggtcgccaacggctttgcggcgcgcgcgcgcttctgcgccctgacggcgggcgcgggcacggtcatcgacaaccgctcggcgccgggcgtgttcgacgcgcaccggttcatgcgagcgtctctcctgcgacaccaggtggacccggccctgctccccagcatcacccatcgcttcttcgagctcgtcaacgggcccctctttgatcactccacccacagcttcgcccagccccccaacaccgcgctgtattacagcgtcgagaacgtggggctcctgccgcacctgaaggaggagctcgcccggttcatcatgggggcggggggctcgggtgctgattgggccgtcagcgaatttcagaggttttactgttttgacggcatttccggaataacgcccactcagcgcgccgcctggcgatatattcgcgagctgattatcgccaccacactctttgcctcggtctaccggtgcggggagctcgagttgcgccgcccggactgcagccgcccgacctccgaaggtcgttaccgttacccgcccggcgtatatctcacgtacgactccgactgtccgctggtggccatcgtcgagagcgcccccgacggctgtatcggcccccggtcggtcgtggtctacgaccgagacgttttctcgatcctctactcggtcctccagcacctcgcccccaggctacctgacggggggcacgacgggcccccgtag

SEQ ID NO: 13874 - DNA, 2385 bp, unidentified
  source 1..2385: mol_type = other DNA
  misc_feature 1..2385: note = Synthetic
atgttgaacatgacctcagacgcctccgtgaggcgtatagtcaggaggatagggaccctggctaggcgccgcgtccaacaactcccggatatggagacgttctcccccgagtttgacccggagctctcggagccccccttcctgcccttttcagcctatgtaattacgggaacggcgggggctggcaagagcaccagcgttagctgcctccaccacacgatggactgcctggtcacgggagccacaaccgtggccgcacagaacctctcccagacactccgagcctactgcccaaccgtctatagcgcctttgggttcaagagccgccacataaatatgacgcagcgggtcagcagtcatggtcgctctacggacgccgccctagaggaactccagcggcgggacctggccaaatactggccggtactctccgacattgccgccgagttcaggcgaaccaagcccagggggctctactcgggagtctctggccccgcctttgaggtcctgagagacatgcaccaggggcagctatggaccaccaatgtgatcgtggtggacgaagctggaacgctttccgtgcacattctaacagccgtggtcttttgctactggttcttcaacgcctggctgcgtaccccactctaccgccggggccgcattccctgcatcgtctgcgtgggctctcccacccagacagacgcctttcagtcctcctttagccacgagacccaggtaaacaagattcgcgagtgcgacaacatcctcaccttcctggtgggcaaccccagggccgcgacctacgtggacgtggcccgcaactgggccctcttcatcaacaacaagcgctgcaccgacgtccagtttggacacctcatgaagaccctcgagtacggcctcgagctctcgccggacatcctggcctacgtcgaccgcttcgtcgtccccagggcggccataatggaccccgcgcagtacgtgggctggacccggctcttcctctcccacgccgaggtcaagaccttcctcaccaccctccatgccacgctcaagactgccgggcaggggcgtgccgcgcggggaaccgggggagatgggggcggggtgaccatgtttacctgcccggtggagtgcgaggtcttcctcgatcccctggcccagtacaagaccctggtcgggcttccgggcctcacggcccacacctggctccaaaagaattatgcacgcctcggtaactactcgcagttcgccgaccaagacatggtcccggtgggcaccgagcaggacgaagaacgggtcaaggtcacctacaatgtcacctacgtcaagcacagctcggtgtcggtcaactgcaagaccaaaaagtccatctgtggctataccggcaccttcggggactttatggacacgctcgaggcggacagcttcgtggaggcccacgggcatgagcagcccgagtatgtctacagcttcctggcccgactcatctacggaggcatctacgcttttagccacggaggacattctctctgtgaaaacggggaatacgtggcggagcttggtgctgtgcccctgcccgggcgtacgtgggatccggaggtgactgctgggatggagctgggcgaactgccgctggaggttgcctgggatggggagcggagccccgccgctgtcttctatgcccgagtactggctcccccggccgcaaattctgcccccctctgctccctgttaaacatatataatgacctcagggcctatttcaggcaatgcctggatgtggccgtccgctatggcggaagggagttcagggacctccccttctgcacatttaccaacaacatgctgattcgcgacaacatagagttcacctcagacgagcctctccttcacggcctcctggactacgcctccaccaccgagaactacacgcttctgggctacacgcatctcaacgtcttctttggcatccgaggaaagcagcagcctcaggacgctggcagttcacgcatgcccaggctaatggtcaaggatgaggcaggcttcgtgtgctgcctggaacacaatactaacaaactgtatgagacgatagaggacaagtccctgaacctctgcagcatccgtgactatggcattagctcaaagctggccatgaccatagccaaggcccagggtctgtccctaaacaaagtcgccatctgcttcggcagccacagaaacatcaaacccggccatgtgtatgtggcgctgtcccgggcccggcactctaattgcgtggtcatggacaggaatcccctatccgagatgatcactggggaggggaaccccgcgagcggctacatcgtggatgccctaaagaactcacgcgcactactggtttactga

SEQ ID NO: 13875 - DNA, 2430 bp, unidentified
  misc_feature 1..2430: note = Synthetic
  source 1..2430: mol_type = other DNA
atggccgaggagccgagagcgccagaggcgctctcgtccacgttcatgttgaacatgacctcagacgcctccgtgaggcgtatagtcaggaggatagggaccctggctaagcgccgcgtccaacaactcccggatatggagacgttctcccccgagtttgacccggagatctcggagccccccttcctgcccttttcagcctatgtaattacgggaacggcgggggctggcaagagcaccagcgttagctgcctccaccacacgatggactgcctggtcacgggagccacaaccgtggccgcacagaacctctcccagacactccgagcctactgcccaaccgtctatagcgcctttgggttcaagagccgccacataaatatgacgcagcgggtcagcagtcatggtcgctctacggacgccgccctagaggaactccagcggcgggacatggccaaatactggccggtactctccgacattgccgccgagttcaggcgaaccaagcccagggggctatactcgggagtctctggccccgcctttgaggtcctgagagacatgcaccaggggcagctatggaccaccaatgtgatcgtggtggacgaagctggaacgctttccgtgcacattctaacagccgtggtcttttgctactggttcttcaacgcctggctgcgcaccccactctaccgccggggccgcattccctgcatcgtctgcgtgggctctcccacccagacagacgcctttcagtcctcctttagccacgagacccaggtaaacaagattcgcgagtgcgacaacatcctcaccttcctggtgggcaaccccagggccgcgacctacgtggacgtggcccgcaactgggccctcttcatcaacaacaagcgctgcaccgacgtccagtttggacacctcatgaagaccctcgagtacggcctcgagctctcgccggacatcctggcctacgtcgaccgcttcgtcgtccccagggcggccataatggaccccacgcagtacgtgggctggacccggctcttcctctcccacgccgaggtcaagaccttcctcaccaccctccacgccacgctcaagactgccgggcaggggcgcgccgcgcggggaactgggggagatgggggcggggtgaccatgtttacctgcccggtggagtgcgaggtcttcctcgagcccctggcccagtacaagaccctggtcggtcttccgggcctcacggcccacacctggctccaaaagaattatgcacgcctcggtaactactcgcagttcgccgaccaagacatggtcccggtgggaaccgagcaggatgaagaacgggtcaaggtcacctacaatgtcacctacgtgaagcacagctcagtgtcggtcaactgcaagaccaaaaagtccatctgtggctataccggcaccttcggggactttatggacacgctcgaggcggacagcttcgtggaggcccacgggcatgagcagcccgagtatgtctacagcttcctggcccgactcatctacggcggcatctacgcttttagccacggaggacattctctctgtgaaaacggggaatacgtggcggagcttggtgctgtgcccctgcccgggcgtacgtgggatccggaggtgactgctgggatggagctgggtgaactgccgctggaggttgcctgggatggggagcggagccccgccgctgtcttctatgcccgagtactggctcccccggccgcaaattctgcccccctctgctccctgttaaacatatataatgacctcagggcctatttcaggcaatgcctggatgtggccgtccgctatggcagaagggagttcagggacctccccttctgcacatttaccaacaacatgctgattcgcgacaacatagagttcacctcagacgagcctctccttcacggcctcctggactacgcctccaccaccgagaactacacgcttctgggctacacgcatctcaacgtcttctttggcatccgaggaaagcagcagcctcaggacgctggcagttcacgcatgcccaggctaatggtcaaggatgaggcaggcttcgtgtgctgcctggaacacaatactaacaagctgtatgagacgatagaggacaagtccctgaacctctgcagcatccgtgactatggcattagctcaaagctggccatgaccatagccaaggcccagggtctgtccctaaacaaagtcgccatctgcttcggcagccacagaaacatcaaacccggccatgtgtatgtggcgctgtcccgggcccggcactctaattgcgtggtcatggacaggaatcccctatccgagatgatcactggggaggggaaccccgcgagcggctacatcgtggatgccctaaagaactcacgcgcactactggtttactga

SEQ ID NO: 13876 - DNA, 309 bp, unidentified
  source 1..309: mol_type = other DNA
  misc_feature 1..309: note = Synthetic
atgaagcggatgattcgcagtcacggcaggaaaacggagtgtcagatgacgggcgccggcgagcgacgcggctccgccgtcggtgcgctcatctgcggcagcggtacccgacgcggcagcggcgccaacgaacgccgcgactccgacgtcggtcccatcgcccacagtagcggtaccagacgcggttcggcgaatgaaacgtccgcctgtacgcggaccgatcaccagaaggcggacattgggctgtggttcatgtttctggtttttggactgtgttcgtggttggcgatgcggtatcgcgcacaataa

SEQ ID NO: 13877 - DNA, 504 bp, unidentified
  source 1..504: mol_type = other DNA
  misc_feature 1..504: note = Synthetic
atgggttgttgcaggacaccgaatagacagtgcttgctaacgctaaagcgggcctcgtgccccgtagcgtctctcgtgtctgtgctatccgtgtttactagcatctgcgccattatcaagtataccgacctttttctaaaagaagcgtgtgaaaacgattgggttcccattaaagacctttgtgtgtataacactcaagttataactaatgttacgttggcgagagatatatgtgcttctatggacagcgaccttcctgctacaccagacactatgtttctaaaagggataatgtttctcgtagaagctaccagcttttggatgacgcaccacgatgcatataaaaacgtatatttgccaaaaagaggaagttatttaaggtcttatgtagaggagtacaacaaagacacacatgtgtgtcttataaacctgcaagggcttatgcatcacgattgtaatcaaaacactactgtcgtctgcgtaaaaaagatgtacaataactga

SEQ ID NO: 13878 - DNA, 18 bp, unidentified
  source 1..18: mol_type = other DNA
  misc_feature 1..18: note = Synthetic
atgtgtttctttgcctag

SEQ ID NO: 13879 - DNA, 1455 bp, unidentified
  source 1..1455: mol_type = other DNA
  misc_feature 1..1455: note = Synthetic
atggccagcaatcagcactcacagagggagcgcaccccagaccgcagcgctcagccgccgccgccaaaaatgggcagatactttctggattccgaaagcgaagaagaactggaagctgtgcctttacctccaaagaaaaaagtcaagaaatctatggctgcgatacctctttccccagagagtgcagaagaagaagaggcagaaccaccaagagcagttttaggagtaatgggtttcagcatgccgcccgtccgcattatgcatcatgcagacggttctcagtcttttcaaaaaatggaaaccaggcaggtacacgttttgaaggcttccgctcaaaacagcgacgaaaatgaaaagaatgttgttgttgttcgcaatccggcaagccagcccctagtttcagcttgggaaaaaggcatggaagccatggctatgctaatggaaaagtaccatgtggatcacgacgagcgcgccacctttcgttttttgccggatcagggcagcgtgtacaagaaaatatgcacaacatggctcaacgaagaaaagcgcggtttgcagctgactttttcatcccaaaaaacctttcaggagctcatgggacgctttttgcaaggatatatgcaagcttatgccggtgtccaacagaattcctgggaacccaccggttgctgcgtgtgggagcataagtgtaccgagcgcgaaggggagcttagatgcctgcatggaatggagatggtgcgcaaagagcatttggtggaaatggatgtaaccagcgaaagtgggcaacgagcgttgaaagagaacccctcgaaagccaaggtggcgcaaaaccgctgggggcgtaatgtagttcaaattaaaaacgacgatgcccgctgctgttttcatgatgttggctgcgggaataattctttctccggaaagtcctgcggcttgttttattctgaaggaatgaaggctcaaatagcttttaggcaaattgaagcttttatgctggccgactaccctcacatgcgacatgggcaaaaacgtctccttatgccagtgcgctgcgaatgtttaaacaagcaagatggcctgccacggatggggcgtcaactgtgtaaaatcactccttttaacctcagcaatgtggataacattgatatcaacgaagtaaccgaccctggagcgttagccagtattaagtatccgtgtttgttggtttttcagtgcgcaaatccagtttatcgcaatgcgcgcggcaatgctggccctaattgcgacttcaagatttctgctcctgatgttatgggcgccctgcaacttgtgcgccagctgtggggagaaaattttgacggctccccccctaggcttgttattccagaattcaagtggcatcagcgtttgcagtacagaaacatatccctgcccaccaaccacggcgactgtcgcgaagagccatttgatttttaa

SEQ ID NO: 13880 - DNA, 9444 bp, unidentified
  source 1..9444: mol_type = other DNA
  misc_feature 1..9444: note = Synthetic
atgagtaacggcgactgggggcaaagccagcgcccccggggaaccggccccgtgcgcggaatcaggaccatggatgtgaatgcccccgggggcgggagtggaggctcggccctccgcatcctaggcacggcctcgtgcaaccaggcccactgcaagtttggccgctttgccggcatccagtgcgtcagcaactgcgtcctctacctggtcaaaagcttcctggccggccgccccctgacctcccgccctgagctggacgaggtcctggacgagggggcgcggctggatgccctcatgcgccagagcggcatcctcaaggggcacgagatggcccagttgacggacgtgcccagctccgtggtcctgaggggcggtgggcgcgtgcacatataccgctcggcggagatctttggcctcgtcctattccctgcccagatcgcaaactcggcagttgttcagtccctggccgaggtcctgcacggcagttacaacggggtggcccagttcatcctctacatctgcgacatctacgcgggggccatcatcatcgagacagatggctccttctacttgtttgacccccactgccagaaggatgcggccccgggcacccccgcccatgtcagagtcagcacctatgcgcacgacatcctgcagtacgtgggggcaccaggggcccagtacacttgcgtgcatctctattttctacccgaggcctttgagacagaggacccccgcatctttatgctggaacactatggcgtgtatgacttttatgaggccaacggcagcggctttgacctggtggggcccgagcttgtgtccagtgatggggaggcggcggggacgcccggtgctgatagcagccctcccgtcatgctaccgtttgaacggcgaataataccgtataacctcaggccactgccctctcgatctttcacatccgactcattccctgccgccaggtatagtcctgcaaagaccaactccccgccgtcgtctccggcctctgcggccccggcctctgcggccccagcctctgcggccccggcctctgcggccccggcctctgcggccccggcctccgcggccccggcctccgcggccccggcctccgcggccccggcctccgcggccccggcctccagccctcccctcttcatccccatccccggcctaggtcacacccccggggtccccgctccctccacgccaccaagggcgtcgggcggcgcagcgcctcagactcccaagaggaaaaagggattgggcaaagatagcccccacaagaagcccacctccggccgccgcctccctctgtcctccaccactgacacagaggatgatcagctgccacgcacccacgttccgccccatcgccccccttcagcagctcgccttccccctccagtaatccccatccctcaccaatcaccacccgcctccccgacaccccaccccgcaccagtctcaactatcgctccttcagtcactccatctcctcgcctccctttgcaaatacccatccctctgccacaggcagctccctcgaacccaaaaatccctctgaccaccccatccccttccccgactgcagcagcagcccccaccaccacgactctttctcctcctccaactcagcagcagcccccgcaatcagccgccccggctccttctccacttcttcctcagcagcagcccacgccatcagccgccccggctccttctccacttcttcctcagcagcagcccccgccatcagccgcccgggctccttctcctcttcctcctcagcagcagcccctgccatcagctaccccggctcctcctcctgctcagcagatcccaccatcagccacgacactcgaaccagaaaaaaaccatcccccggccgctgacagggctggaacggagatatccccatcacctcccttcgggcagcagccctcctttggggaagatgcatctgggggtgctggcctcgtccgctacctgtctgacctagaggaacctttcctatccatgtccgactctgaagaagcggagagcgacttagcctccgatatccccaccacagaggatgaagacatgttcgaagatgaagtgttctccaacagcctggaatcgggatccagtgcccccacgtcccccatcacactggacaccgccaggagccaatactatcagaccacctttgacatagagactcctgagatggactttgtgcccctcgagagcaacattgcgagaatagccggacatacctaccaggaacaggccatcgtctacgacccggcctctaaccgggaagtgccagaggcagatgccttgagcatgatagactatcttcttgtgacagtggtcctcgagcaggggctaataaggagtagggaccgatctgctgtgctaaatctgctggaattcttaaaggactggtcgggacatctgcaggtccccacgctggacctggagcaactgctcacttccgaacttaacatccaaaacctcgcaaacatgctatcagaaaacaagggaagagcgggagagttccatgagcacctggccgcaaagctggaggcctgcctgccgtccctggccacgaaggacgcggtccgtgtagatgccggtgctaagatgctggctgaaattccccagctggccgagagcgacgatggaaaatttgacctggaggcggcccgcagacgcctgaccgacctgctctcgggcggagatcaggaggggggagaaggaggaggagaacccgaggataattccatctacaggggcccgcacgtggacgtccccttggtcctggacgacgagagctggaagcgcctcctatccctggcggaggccgcccgaacggccgtggccagacaacaggctggggtagatgaggaggacgtccgctttttggcgctgttgacagcgatagagtatggggcccctcccgccgcctcagtgcccccctttgtccacaacgtggccgtccggtccaagaatgcggccctgcacgtgcgcaggtgtacggcggacatcagggacaaggtggcctcggcggcctccgattatctctcctaccttgaggacccaagcctcccaacggtgatggattttgacgacctcctgacacacctgcggcacacatgccagatcatcgcctccctgcctctcctaaacatccggtacacgtccattgaatgggactatcgcgagctcctctacctgggcaccgcccttagtgatatgagcggtatcccctggcccctggagcgagttgaggaggacgaccccagcattgccccccttccagagtttgagacagtcgcgaaaaaacagaaggagctcgagaccaccagagaaaacgaaaagcgcctccgcaccatcctggacgacatcgaggcaatgttgggcctggccggtgtggcctcggccccaggcgcccccatctctcccgcctctccctctgcgacacccgccaaccacgacaaccccgaagccacgccaccgctggccgacaccgcggccctcaccatccccgtcatagaaaagtacatcgcaaatgcagggtcgatagtcggggccgcaaagaaccccacgtacatccgcctacgtgacactatacagcagattgttcgctccaagaagtacctgatgaacatcctgaaatccatcaccttctacaccatcgataactacattgcctccttcgaggagagcatagaccacctctatcgtgacttgccggtccttgaccctgaggtgcaggatggcattgaccgcatcctggaccccatggtctcagaggccctgcacacattcgagatgggcaaccggctgacgctggagccagcgcgcctagtggccttgcagaattttgctactcacagcaccttaaaggagacggccgcggcggtgaatctgctcccaggtctactggcggtctatgatgcgacggtcacaggtcaggctccagaggatgccctgagactactctctgggctgcagaatcagctctcccaaacgctcatcccagggaagctcaagaaacgcttcctaagttacctgcagaaattgaagaataacaacaacgatcagctcagacagaaggaggtgcaggcctggcgcctggaggccgaaggctttaagcccgccaccgaggaacagctcgaggcctttctggacactgcccccaacaaagagctcaagcgacagtatgagaagaagctgcggcagcttatggagaccgggcgcaaggaaaaggagaagctccgagaacaggaagacaaggagaggcgggagcggcgagcgcgagaggcgaatgaggcctgggccagaattaggaaggcgctgggggcacgcccagagcccgctcccacttcgcccgatgactggaacaccctgctggcctccctgctgccagacaatacggactcagccgcggcagcagcggcggcagtagccagaaacacggacatcttggactccctcacacagatccttgccgctatgctattgggaataacgagggtgaggagggagagactgcaatccctgctcgtggacgatggtggtgcggcggagagaatggaggctgcggaacccggctggttcacggagatcgagaccggccctctggccagactggacgcttggcccgccacccccgcggctaccgccaaagaaggaggaggagggcgaggagcggaggaagcagccggggccctctttcgcgccaggacggcggccgatgccatccgttcggccctcgcgcagacgcgccaggccctgcagtccccggacatgaaatcagcggtggtcaacacggatctggaggccccctacgcggagtacgagcgggggctggccgggcttctggaaaaaagacgatcagccgaggctgccctgacggccatcgtgagcgagtacgtggatcggacgctacccgaagccactaatgacccaggccaggctaacctgcctcctcctccaactatcccccaggcaaccgccccgcccaggctggcctcggactcggcactctggcctaagaaaccccagctgctgacaaggcgagagcgggacgatctcctccaggccacgggggacttcttctcggagctgctgaccgaggccgaggcggccgaggtccgggcgctggaagagcaggtccgggagagccagaccctgatggcgaaggcccacgagatggcggcaagcactcggcggggctttcacacggctctggaggccgtcctctccaggtcacgcgacgaagcccccgacgatgaactccggagcctgctcccctccccgcccaaagcccctgtccaggctcccctcgaggccgccctggcccgggcagcggccgggaacggctcgtggccctaccggaaatccctggcagccgccaagtggatccggggcatctgcgaggccgtgcggggtctttccgaaggagccctggccttagctgggggtgtgggtgcctggctgaacctagccgctgcggctgacggtgaaattcatgagctaacacggctcctggaagtcgagggcatggcccagaattccatggatggcatggaggagctgaggttggctctggccacgttggaccccaagcgggtcgcggggggcaaggagaccttcgcagactggaaaaggcgcctctcccgactggaggccatcatccaggaggcccaggaagagtcccagctgcagggaacgctgcaggacctggtcacccaggccaggggccacaccgacccgcgccagctcaagatcgtggtggaggctgccaggggcctggcgcttggggcctcggctggctcccagtatgcactcctcaaggacaagctgctgcgctatgcctcggccaagcagagtttcctggctttttacgagaccgcccagcctaccgttttcgttaagcatcccttgaccaacaacctgcccctcctcatcacgatttcggcaccaccaactggatggggcaatggagccccgacccggcgggcacaatttctggcggcggcagggccggcgaaatacgccggcaccctctggctggaaacagagtctccctgcgacccccttaacccggcctacgtctccgcagacacccaggagccgctcaactacatccccgtctaccacaactttctggaatatgtcatgcccaccgtgctggagaacccagaggccttttccctgaccccagccggacgcccccaagctattggtcccccgcaggatgaccaagagaggaggagaagaaccctggccagtgtagcttccgcccgcctcagcgccgccgccgccgactcctactgggacacctggcccgacgtggagtccaacgccggggagctgcttcgggaatacgtctctgcgcccaaagccctgatggaagacctggcagacaaccccattgtggccatgacgcttttagcgcacgccagtctcatcgcctctaggaatcaccccccttatccagccccggccacagaccgggaagttattctattggaacaacgggagataatggcgctgctggtcggcacacatccggcctacgctgccgccttcctgggcgccccatcgttctacgcaggactcggcctggtctcggctctagcgagagatgggggtttgggagacctcctgtcggactcggtcctcacctacaggctggtcaggagtccagcctccgggagggggggcatgccctcaaccacccgcggcagcgacgacggggaagacgcgcgccgcctcacccgccaccgcatcgccggtccacccaccggcttcatcttcttccaggacgcctgggaggagatggatacccgggccgccctctggccgcaccccgagttcttgggcctggtccacaaccaaagcacggcccgcgcccgagcctgcatgctgctcctcgcacgccggtgcttcgcccccgaggcccttcagcagctctggcactcattgcgcccgctggagggcccggtcgcgtttcaggactacctgcgtgactttgtgaagcaggcctatacacgcggagaagagcttcccagggcggagggactcgaggtcccccgcgaaaccccgtcttcctacggcaccgttaccggccgggccctgagaaatcttatgccttatggcactcccattaccggtcctaagaggggctccggtgacaccatccccgtctccgtttttgaggcggccgtggcggcggccttcctcggtcggcccctaactctctttgtctcctctcaatatctgtttaacctgaagaccctgggacaggtcagggtcgttgctcccctcctctactgcgacgggcactccgagcccttccggtccctggtggagaccatctcgctgaattttctgcaggacctggacggctactccgagtctttcgagccggagatgtccatctttgcacgccaggccgtgtggctacgcgagcttctcaccgaggccagggccgccaaacctaaggaggccaggccccccaccgtggccatcctggccaacagaaaaaacatcatctggaagtgtttcacctatcggcacaatctgccaaacgtgcagttctactttaacgcggccggggcctcacgatggccgaccgatgtactcaacccctccttctacgagcacgaagatcctccactgccggttggataccagcttcccccgaatccacgcaacgtccaggagctgttctccggtttccccccaagggtggggcacggactggtcagcggggacgggtttcagtcagcagataacaccccggcctcctccgaccggctccagcagttgggaggaggggagacagaccagggggaaaaggggagcactacggctgaatctgaggcctctggccctcccagcccacagagccctctcttagagaaggtggccccaggcaggcccagggactggctgtctcctacctcctccccccgggacgtgacagttaccccgggattggccgcccccatcactctcccaggcccccgattgatggcaaggccctatttcggggccgaaacgagggcttccgagagcccagaccggtctccgggaaggtccccaaggccatggcccaaagattccctggagctccttccccaaccagcaccacaacagcccccctcaaagcccatcgtttacacattgtctccacactctacaccatcgactgcctcggggtcacagaagaaacataccatccagattccagggttggtgccttcacagaagcccagttattcaccctcagccccctacaagcccggccagtcgacgggaggcatagctcccacaccatcagcggcatctttaacgacttttgggctccagccccaggacacacaagcctcctctcaggacccaccctatggccattctatcatgcaacgggagaagaaacagcaggggggccgggaagaagccgcggagattcggccctccgccacccgcctccccacggccgtcgggctgcgaccccgtgcgcccgtggtggccgccggcgcagcagcctccgctactccagcgttcgacccgggagaagcgccgtccggccttcccatcccccaggcacccgccctggggtccggcttggccgcccccgcgcacaccccagttggtgcattggcaccaagcccccaaaaaacgcaagcacagaggccccaagatgcagctgccctgcccacccccacaattaaagcggtgggggccaggcccgtgccaaaggccacgggggcgctggcggccggcgcccgtcctcgggggcagcccaccgcggccccgccgtcggctgcatctccgccgcgcgtgtctctccctgtcaggagcagacagcaacaatcccccgcaatcccattgcccccaatgcattccggctcggagcctggcgcgcggcccgaggtgcgcctatcccagtaccggcatgcgggtccccaaacatacaccgtgcaaaaagaagcacccccatccgccgcctcccagctgcccaaaatgccaaaatgtaaggatagcatgtattacccgccatccggtagcgcacgctatcccgcgccttttgaagcactttcgttttcgcaaagcgtggcctcacccgcgccatctagcgaccagacaacattactgtggaacactccctcagtggtcacccaatttctgtctattgaagacattatcagggaggtggtgacaggagggtcgacctccggcgacctagtggtcccctccggatccccctcctctctatccaccgccgctccggaacaggacctgcgttatagcctcacccttagtcaggctagccgagtcctgtctcgcttcgtgagccagcttcgccgcaagctggagcgttccacccaccgcctcatcgcagacctcgagagactcaagtttttgtatctgtaa

SEQ ID NO: 13881 - DNA, 21 bp, unidentified
  source 1..21: mol_type = other DNA
  misc_feature 1..21: note = Synthetic
atggaaaagataaagttttag

SEQ ID NO: 13882 - DNA, 21 bp, unidentified
  source 1..21: mol_type = other DNA
  misc_feature 1..21: note = Synthetic
atggaaaagataaagttttag

SEQ ID NO: 13883 - DNA, 2391 bp, unidentified
  misc_feature 1..2391: note = Synthetic
  source 1..2391: mol_type = other DNA
acgttcatgttaaacatgacctcagacgcctccgtgaggcgtatagtcaggaggatagggaccctggctaagcgccgcgtcctacaactcccggatatggagacgttctcccccgagtttgacccggagctctcggagccccccttcctgcccttttcagcctatgtaattacgggaacggcgggggctggcaagagcaccagcgttagctgcctccaccacacgatggactgcctggtctcgggagccacaaccgtggccgcacagaacctctcccagacactccgagcctactgcccaaccgtctatagcgcctttgggttcaagagccgccacataaatatgacgcagcgggtcagcagtcatggtcgctctacggacgccgccctagaggaactccagcggcgggacctggccaaatactggccggtactctccgacattgccgccgagttcaggcgaaccaagcccagggggctctactcgggagtctctggccccgcctttgaggtcctgagagacatgcaccaggggcagctatggaccaccaatgtgatcgtggtggacgaagctggaacgctttccgtgcacattctaacagccgtggtcttttgctactggttcttcaacgcctggctgcgcaccccactctaccgccggggccgcattccctgcatcgtctgcgtgggctctcccacccagacagacgcctttcagtcctcctttagccacgagacccaggtaaacaagattcgcgagtgcgacaacatcctcaccttcctggtgggcaaccccagggccgcgacctacgtggacgtggcccgcaactgggccctcttcatcaacaacaagcgctgcaccgacgtccagtttggacacctcatgaagaccctcgagtacggcctcgagctctcgccggacatcctggcctacgtcgaccgcttcgtcgtccccagggcggccataatggaccccacgcagtacgtgggctggacccggctcttcctctcccacgccgaggtcaagaccttcctcaccaccctccacgccacgctcaagactgccgggcaggggcgcgccgcgcggggaactgggggagatgggggcggggtgaccatgtttacctgcccggtggagtgcgaggtcttcctcgatcccctggcccagtacaagaccctggtcggtcttccgggcctcacggcccacacctggctccaaaagaattatgcacgcctcggtaactactcgcagttcgccgaccaagacatggtcccggtgggaaccgagcaggatgaagaacgggtcaaggtcacctacaatgtcacctacgtgaagcacagctcagtgtcggtcaactgcaagaccaaaaagtccatctgtggctataccggcaccttcggggactttatggacacgctcgaggcggacagcttcgtggaggcccacgggcatgagcagcccgagtatgtctacagcttcctggcccgactcatttacggcggcatctacgcttttagccacggaggacattctctctgtgaaaacggggaatacgtggcggagcttggtgctgtgcccctgcccgggcgtacgtgggatccggaggtgactgctgggatggagctgggcgaactgccgctggaggttgcctgggatggggagcggagccccgccgctgtcttctatgcccgagtactggctcccccggccgcaaattctgcccccctctgctccctgttaaacatatataatgacctcagggcctatttcaggcaatgcctggatgtggccgtccgctatggcggaagggagttcagggacctccccttctgcacatttaccaacaacatgctgattcgcgacaacatagagttcacctcagacgagcctctccttcacggcctcctggactacgcctccaccaccgagaactacacgcttctgggctacacgcatctcaacgtcttctttggcatccgaggaaagcagcagcctcaggacgctggcagttcacgcatgcccaggctaatggtcaaggatgaggcaggcttcgtgtgctgcctggaacacaatactaacaagctgtatgagactatagaggacaagtccctgaacctctgcagcatccgtgactatggcattagctcaaagctggccatgaccatagccaaagcccagggtctgtccctaaacaaagtcgccatctgcttcggcagccacagaaacatcaaacccggccatgtgtatgtggcgctgtcccgggcccggcactctaattgcgtggtcatggacaggaatcccctatccgagatgatcactggggaggggaaccccgcgagcggctacatcgtggatgccctaaagaactcacgcgcactactggtttactga

SEQ ID NO: 13884 - DNA, 135 bp, unidentified; identical to SEQ ID NO: 6097
  source 1..135: mol_type = other DNA
  misc_feature 1..135: note = Synthetic

SEQ ID NO: 13885 - DNA, 69 bp, unidentified; identical to SEQ ID NO: 6098
  misc_feature 1..69: note = Synthetic
  source 1..69: mol_type = other DNA

SEQ ID NO: 13886 - DNA, 270 bp, unidentified
  source 1..270: mol_type = other DNA
  misc_feature 1..270: note = Synthetic
atgtttctagatagcgacaccgtcgtcgtggccgttccgggcacctcgtttcccgagggcctcttcgacagacaggggcggccgctgcgtcccgggtccacgccgaccatgtcctacgaggaccccgtcccgcgaaccgcgcgcgcactgctgctggtgaaccccacggccgggcagctcgccgcagtcgccgccggcgcgcccgcgggcgtccgcgtgctggtgctcgtggacgtcgcgcgccaagatatgccttttagcgtagtgtaa

SEQ ID NO: 13887 - DNA, 24 bp, unidentified
  misc_feature 1..24: note = Synthetic
  source 1..24: mol_type = other DNA
atgtggtactggtgcagtttgtga

SEQ ID NO: 13888 - DNA, 135 bp, unidentified; identical to SEQ ID NO: 6105
  misc_feature 1..135: note = Synthetic
  source 1..135: mol_type = other DNA

SEQ ID NO: 13889 - DNA, 135 bp, unidentified; identical to SEQ ID NO: 6106
  misc_feature 1..135: note = Synthetic
  source 1..135: mol_type = other DNA

SEQ ID NO: 13890 - DNA, 2559 bp, unidentified
  misc_feature 1..2559: note = Synthetic
  source 1..2559: mol_type = other DNA
aggtgtccggcggccatggcccagcgcaacggcatgtcgccgcgccccccgcccctcggtcgcggccgcggggccggagggccttcgggggttggttcctctcctccttcttcttgtgtgccgatgggagcgacgtcaacagcgggcactggtgcgagtgctgcgcctacggcgacgccgggccacggcgtccaccgggtagaaccccgcgggccgccgggcgcccctccgagtagcggcaacaacagcaacttttggcacggcccggagcgcctgttgctgtctcagattccggtggagcgccaggcgctgacggagctggaataccaggccatgggcgccgtgtggcgcgcggcgtttctggccaacagcacgggccgcgccatgcgcaagtggtcgcagcgcgacgcgggcacgctgctgccgctcggacggccgtacggattctacgcgcgggtgacgccgcgcagccagatgaacggcgtgggcgcgacggacctgcgtcagctgtcgccgcgggacgcgtggatcgtgctggtggcgaccgtggtgcacgaggtggaccccgcggccgacccgacggtgggcgacaaggccggccatcccgagggtctgtgcgcgcaggacggactgtacctggcgctgggcgccgggttccgcgtgttcgtctacgacctggcgaacaacacgctgatcctagcggcgcgcgacgcggacgagtggtttcggcacggcgcgggcgaggtggtgcggctgtaccgctgcaaccggctgggcgtgggcaccccgcgcgcgacgctgctgcctcagccggcgctccgacagacgttgctgcgcgccgaggaggcgacggcgctcggacgggagctgcgccggcggtgggccggcacgacggtggcactacagacgccgggaaggcgactgcagccgatggtgctgctgggcgcgtggcaggagctggcgcagtacgagccgttcgcgtcggcgccgcaccccgcgtcgctgctgacggccgtgcgtcggcacctgaaccagcgtctgtgctgcggctggctggcgctgggcgcggtgctgcccgcgcggtggctgggttgcgcggcggggccggcgacggggacgacgtcgccgccagcggcgagcggcacggagacggaggccgccggcggggacgcgccgtgcgcgatggcaggagccgtggggtctgctgtgactatacctccgcagccgtacggaggcgccggcgggagcgcgatttgcgtgccaaacgcggacgcgcacgcggtggtcggggcggacgcgacggcggcggcagcggcagcagcggcggcgccgacggtgatggtgggtccgacggcgatggcgggtccggcggcgtcggggaccgtgccgcgcgccatgctggtggtggtgctggacgagctgggcgccgtgttcgggtactgcccgctggacgggcacgtgtacccgctggcggcggagctgtcgcactttctgcgcgcgggcgtgctgggcgcgctggcgctggggcgcgagtcggcgcccgccgccgaggccgcgcggcggctgctgcccgagctggaccgcgagcagtgggagcggccgcgctgggacgcgctgcacctgcacccgcgcgccgcgctgtgggcgcgcgagccgcacgggcagtgggagttcatgtttcgcgaacaacgcggtgaccccatacatgatcccgtcgcatttcgtctttcggacgctcgaactctcggtctcgacctcaccaccgtcatgacagagcgtcaaagtcaattgcccgaaaagtatatcggtttctatcagattaggaaacctccttggctcatggaacaacctccacccccatctcgccaaaccaaaccggacgctgcaacgatgcccccaccgctcagtgctcaggcaagcgtcagctatgcgctccgatacgatgatgagtcttggcgcccgctcagcacagttgacgaccacaaagcctggttggatctcgacgaatcacattgggtcctcggggacagccgacccgacgatataaaacaacgcagactgctgaaggccactcaacgacgaggcgccgaaatcgacagacccatgcctgtcgtgcctgaagaatgttacgaccaacgcttcactaccgaaggccaccaggtcatcccgttgtgcgcgtccgaacccgaggatgacgacgaagatcctacctacgacgaattgccgtcgcgcccaccccagaaacataagccgccagacaaacctccgcgcttatgcaaaacgggccccggcccacctccgctgccgccaaagcaacggcacggttccaccgacggaaaagtttctgcgccccgacagtcggagcatcataaaagacagacccgaccgccaagaccgccaccgcccaaattcggggatagaaccgcggcccatctctcgcaaaatatgcgagacatgtacctcgatatgtgtacatcttcgggccacaggccacggccgccagcacctccgcggccgaaaaaatgtcaaacacacgcccctcaccacgttcatcattga

SEQ ID NO: 13891 - DNA, 2382 bp, unidentified
  misc_feature 1..2382: note = Synthetic
  source 1..2382: mol_type = other DNA
aggtgtccggcggccatggcccagcgcaacggcatgtcgccgcgccccccgcccctcggtcgcggccgcggggccggagggccttcgggggttggttcctctcctccttcttcttgtgtgccgatgggagcgacgtcaacagcgggcactggtgcgagtgctgcgcctacggcgacgccgggccacggcgtccaccgggtagaaccccgcgggccgccgggcgcccctccgagtagcggcaacaacagcaacttttggcacggcccggagcgcctgttgctgtctcagattccggtggagcgccaggcgctgacggagctggaataccaggccatgggcgccgtgtggcgcgcggcgtttctggccaacagcacgggccgcgccatgcgcaagtggtcgcagcgcgacgcgggcacgctgctgccgctcggacggccgtacggattctacgcgcgggtgacgccgcgcagccagatgaacggcgtgggcgcgacggacctgcgtcagctgtcgccgcgggacgcgtggatcgtgctggtggcgaccgtggtgcacgaggtggaccccgcggccgacccgacggtgggcgacaaggccggccatcccgagggtctgtgcgcgcaggacggactgtacctggcgctgggcgccgggttccgcgtgttcgtctacgacctggcgaacaacacgctgatcctagcggcgcgcgacgcggacgagtggtttcggcacggcgcgggcgaggtggtgcggctgtaccgctgcaaccggctgggcgtgggcaccccgcgcgcgacgctgctgcctcagccggcgctccgacagacgttgctgcgcgccgaggaggcgacggcgctcggacgggagctgcgccggcggtgggccggcacgacggtggcactacagacgccgggaaggcgactgcagccgatggtgctgctgggcgcgtggcaggagctggcgcagtacgagccgttcgcgtcggcgccgcaccccgcgtcgctgctgacggccgtgcgtcggcacctgaaccagcgtctgtgctgcggctggctggcgctgggcgcggtgctgcccgcgcggtggctgggttgcgcggcggggccggcgacggggacgacgtcgccgccagcggcgagcggcacggagacggaggccgccggcggggacgcgccgtgcgcgatggcaggagccgtggggtctgctgtgactatacctccgcagccgtacggaggcgccggcgggagcgcgatttgcgtgccaaacgcggacgcgcacgcggtggtcggggcggacgcgacggcggcggcagcggcagcagcggcggcgccgacggtgatggtgggtccgacggcgatggcgggtccggcggcgtcggggaccgtgccgcgcgccatgctggtggtggtgctggacgagctgggcgccgtgttcgggtactgcccgctggacgggcacgtgtacccgctggcggcggagctgtcgcactttctgcgcgcgggcgtgctgggcgcgctggcgctggggcgcgagtcggcgcccgccgccgaggccgcgcggcggctgctgcccgagctggaccgcgagcagtgggagcggccgcgctgggacgcgctgcacctgcacccgcgcgccgcgctgtgggcgcgcgagccgcacgggcagttagcttttttgctacgtccgggccgcggcgaggctgaggtgctcaccctagccaccaaacatccggtcatctgtgcaaatgtggaagactatctgcaagacgccagacgccgcgccgacgctcaagctctgggactggacttggccacggtggttatggaagccggtggccagatgatacacaaaaagaccaaaaagcctaaaggcaaggaagacgaatcggtcatgaagggaaagcactcgcgctacacccgacccacagaaccaccgttgactcctcaagccagtttgggacgtgctttgagacgagacgacgaggattggaaaccgtcgcgtgtccctggagaagattcctggtacgacttggacgagactttctgggttctggggagtaaccgtaaaaacgacgtgtatcaacgacgttggaagaaaacggtgttacgctgtggtttggagattgatcgtcccatgccaacggtccccaagggctgccgcccgcagacttttactcatgagggcattcagttgatgggtggtgctactcaggaaccgctggatactggactatatgctccgtctcacgttacttctgcttttgttccatctgtgtacatgcctcccaccgtaccctaccccgaccccgctgccagattgtgccgcgacatgcgacgcgtcacgttttctaatgtagccacgcattatcattacaatgcttaa

SEQ ID NO: 13892 - DNA, 15 bp, unidentified
  misc_feature 1..15: note = Synthetic
  source 1..15: mol_type = other DNA
atggacgaagactga

SEQ ID NO: 13893 - DNA, 894 bp, unidentified; identical to SEQ ID NO: 10848
  misc_feature 1..894: note = Synthetic
  source 1..894: mol_type = other DNA

SEQ ID NO: 13894 - DNA, 93 bp, unidentified; identical to SEQ ID NO: 6112
  source 1..93: mol_type = other DNA
  misc_feature 1..93: note = Synthetic

SEQ ID NO: 13895 - DNA, 96 bp, unidentified
  misc_feature 1..96: note = Synthetic
  source 1..96: mol_type = other DNA
ttgcaaccccaacaacctcgttttgctacattacagaacaataaaaccgtgtaccccaccgtttcgtttttttcagatgaaacgggcgagagttga

SEQ ID NO: 13896 - DNA, 492 bp, unidentified
  misc_feature 1..492: note = Synthetic
  source 1..492: mol_type = other DNA
atggagttggaaactgtgctgcaaagttttcagagcgttcgccagctcttgcagtatacctctaaaaacacttcaggtttttggaggtatctgtttggctctaccttaagcaaggtggtaaatagggtgaaagaagactatagagaggaatttgaaaacatattggccgactgtccagggcttttggcttcactagacctttgttaccacttggtgtttcaggaaaaagtggtcagatccttagatttttcatctgtgggacgaacggttgcttctattgcttttttggcaaccatattggataaatggagcgagaaatcccacctgagttgggattacatgctggattacatgtcaatgcagctgtggagggcatggctgaagaggagggtttgcatttactcgctggcgcggcctttgaccatgccgccgctgccgacgttgcaagaggagaaggaggaggagcggaaccctgcggtggtggagaagtaa

SEQ ID NO: 13897 - DNA, 336 bp, unidentified
  misc_feature 1..336: note = Synthetic
  source 1..336: mol_type = other DNA
acgctcagcgacgcggtcaactatgaaaagaggatgttctacctcaatagcgtggtgcgccagcgcgtaattctgaactttgactaccccaaccaggagtacgacttctttcacatgttctgtctgctctcgtcggtggtgtgctcgtgcgaatttaaatcgcccaaagagaaggtgctgagcctgcagaaccgcttcttccgcttcctgcgcatcccgccctccatcacgctcgggctgcgccagcacgatgaaccgccacaacacgcggtacctggccaagatcctctgcctaaaggccgcggtaagaagcgaccccttcgcggtggtaagtag

SEQ ID NO: 13898 - DNA, 60 bp, unidentified; identical to SEQ ID NO: 6118
  source 1..60: mol_type = other DNA
  misc_feature 1..60: note = Synthetic

SEQ ID NO: 13899 - DNA, 42 bp, unidentified; identical to SEQ ID NO: 6119
  source 1..42: mol_type = other DNA
  misc_feature 1..42: note = Synthetic

SEQ ID NO: 13900 - DNA, 42 bp, unidentified; identical to SEQ ID NO: 6119
  misc_feature 1..42: note = Synthetic
  source 1..42: mol_type = other DNA

SEQ ID NO: 13901 - DNA, 906 bp, unidentified
  source 1..906: mol_type = other DNA
  misc_feature 1..906: note = Synthetic
ctggaccttagcgagaacacacctggacaatttaagttgatagaaactcccctgaacagcttcctcttggtttccaacgtgatgcccgaggtccagccaatctgcagtggcctgccggccttgcggccagactttagtaatctccacttgcctagactggagaagctccagagagtcctcgggcagggtttcggggcggcgggtgaggaaatcgcactggacccgtctcacgtagaaacacacgaaaagggccaggtgttctacaaccactatgctaccgaggagtggacgtgggctttgactctgaataaggatgcgctccttcgggaggctgtagatggcctgtgtgaccccggaacttggaagggtcttcttcctgacgacccccttccgttgctatggctgctgttcaacggacccgcctctttttgtcgggccgactgttgcctgtacaagcagcactgcggttacccgggcccggtgctacttccaggtcacatgtacgctcccaaacgggatcttttgtcgttcgttaatcatgccctgaagtacaccaagtttctatacggagatttttccgggacatgggcggcggcttgccgcccgccattcgctacttctcggatacaaagggtagtgagtcagatgaaaatcatagatgcttccgacacttacatttcccacacctgcctcttgtgtcacatatatcagcaaaatagcataattgcgggtcaggggacccacgtgggtggaatcctactgttgagtggaaaagggacccagtatataacaggcaatgttcagacccaaaggtgtccaactacgggcgactatctaatcatcccatcgtatgacataccggcgatcatcaccatgatcaaggagaatggactcaaccaactctaa

SEQ ID NO: 13902 - DNA, 906 bp, unidentified
  source 1..906: mol_type = other DNA
  misc_feature 1..906: note = Synthetic
ctggaccttagcgagaacacacctggacaatttaagttgatagaaactcccctgaacagcttcctcttggtttccaacgtgatgcccgaggtccagccaatctgcagtggccggccggccttgcggccagactttagtaatctccacttgcctagactggagaagctccagagagtcctcgggcagggtttcggggcggcgggtgaggaaatcgcactggacccgtctcacgtagaaacacacgaaaagggccaggtgttctacaaccactatgctaccgaggagtggacgtgggctttgactctgaataaggatgcgctccttcgggaggctgtagatggcctgtgtgaccccggaacttggaagggtcttcttcctgacgacccccttccgttgctatggctgctgttcaacggacccgcctctttttgtcgggccgactgttgcctgtacaagcagcactgcggttacccgggcccggtgctacttccaggtcacatgtacgctcccaaacgggatcttttgtcgttcgttaatcatgccctgaagtacaccaagtttctatacggagatttttccgggacatgggcggcggcttgccgcccgccattcgctacttctcggatacaaagggtagtgagtcagatgaaaatcatagatgcttccgacacttacatttcccacacctgcctcttgtgtcacatatatcagcaaaatagcataattgcgggtcaggggacccacgtgggtggaatcctactgttgagtggaaaagggacccagtatataacaggcaatgttcagacccaaaggtgtccaactacgggcgactatctaatcatcccatcgtatgacataccggcgatcatcaccatgatcaaggagaatggactcaaccaactctaa

SEQ ID NO: 13903 - DNA, 144 bp, unidentified; identical to SEQ ID NO: 6123
  misc_feature 1..144: note = Synthetic
  source 1..144: mol_type = other DNA

SEQ ID NO: 13904 - DNA, 2166 bp, unidentified
  misc_feature 1..2166: note = Synthetic
  source 1..2166: mol_type = other DNA
atggcttcattcaagggattctccgccaacactgttccagtctccaaggctaaacgtgatatatcatctcttgctgccactcctgggcttcgttcgcaacccttcactccatctgtggatatgtctcaatcgcgcaaattcctcacgaaggcgattgagcaggggtctatgtctataccttatcagcatgtgaatgtcccaaaggtggaccgtaaggttgtcagtctggtggtgcgaccattctcttcaggcgctttctcaatctctggagtgatttcgccagctcatgcttacctattagactgtctcccccagcttgaacaagcgatggcttttgttgcctcgccggaatcctttcaggcctccgatgttgcaaagcgattcgccataaagccaggtatgagcctccaggatgccataactgcattcattaacttcgtgtctgcaatgttgaagatgacagtgacccgtcagaattttgatgtcattgtggctgaaatcgaaaggctagcttccactagtgtgtccatcaggactgaagaagcgaaggtcgctgatgaggaattaatgctatttgggctggatcacagaggacctcagcagttggatatttctgagactaaaggaattatgacggctgctgacattcagacaactcataacgtccacttagcgccaggtgtgggtaacattgatcctgagatctataacgaaggaaggtttatgtttatgcagcacaagccgttagcggcagatcagtcgtactttaccttggaaactgcagattacttcaagatttaccccacatatgatgaacacgatgacaggatggctgatcagaagcaatcggggttgattttatgcaccaaagatgaggtgttggctgagcaaactatttttaaattagacactcctgatggtaaaactgttcatttgttagatcgtgatgacgaccacgttgttgctagatttaccaaggtattcatagaggatgtagctcctgggcatcatgctgctcaaaggtcaggtcagcgctctgtactcgatgacctttacgccaatacgcaggttgtttcaatcacctctgctgctctaaagtgggtggtcaagcacggtgtgtctgatgggattgtgaatagaaagaatgttaagatatgtgttggttttgaccccttgtacaccttgtctacgcataatggagtgtccttatgcgccctactgatggacgagaaactctctgttctgaacagcgcgtgtcgtatgacgctacgctcgttgatgaagactggacgtgacgccgatgcacacagggctttccaacgggtcctttctcagggctacgcatcactgatgtgctattatcatccgtcacggaagctggcatatggtgaggtgctttttctagaacgatccactgatatggtggacgggattaagctacagttggacgcatccagacaatgtcatgagtgtcccgtgctacagcagaaagtcgttgagctagaaaaacagattatcgtgcagaaatcaatccagtcggatcccactccaatggcgctgcaacctctgctatctcagttgcgtgaactgtctggtgaagtcactaggctacaaatggagttgagtcgagctcagtccctaaatgctcaattggaagcggatgtcaaatcggctcaatcatgtagtctagacatgtatctgagacaccacacctgcattaatggtcatgctaaagaagatgagctgctcgacgctgtacgcgttgctcccgatgtgagaagagaaattatggaaaagaggagtgaagtaagaaagggctggtgtgaacgcatttctaaagaatcggccgctaaatgccagactgttattgatgacttgactcagatgaatggtaagcaagcacgagagataacagagctgcgtgaatcagctgagaattatgagaagcagattgcagagctagtgagtactattactcaaaatcagatcacgtatcagcaagagttgcaggctctggtggcgaaaaatgtggaattggacacgctgaaccaacgtcaggctaagtcgctacgtatcactccttcccttctatccgccactcccattgattcagttgatggcgctactgacctgatagacttctccgttccgactgatgaactgtaa

SEQ ID NO: 13905 - DNA, 72 bp, unidentified; identical to SEQ ID NO: 6130
  misc_feature 1..72: note = Synthetic
  source 1..72: mol_type = other DNA

SEQ ID NO: 13906 - DNA, 33 bp, unidentified; identical to SEQ ID NO: 6131
  misc_feature 1..33: note = Synthetic
  source 1..33: mol_type = other DNA

SEQ ID NO: 13907 - DNA, 279 bp, unidentified
  source 1..279: mol_type = other DNA
  misc_feature 1..279: note = Synthetic
atggggctcctcgacgcgctgctgaccgtgatcgtcatctcgatcgtgtgctacatcgtcatcatgatgtaccgccggtcgtgcgtctcggcgcccgccgttccgcgcaacaaggacctgctccccccgggcgcatcctcgttcgaggacaagatgacggacgaccaggtgcgcgccttccacgcgctggttacctcgtcgtccggcgacaaccccgcaccggcgccgaccgcggaatctcccgtcgcgagaaaccgattcagtgctgcgtcgtcgtag

SEQ ID NO: 13908 - DNA, 90 bp, unidentified; identical to SEQ ID NO: 6138
  source 1..90: mol_type = other DNA
  misc_feature 1..90: note = Synthetic

SEQ ID NO: 13909 - DNA, 99 bp, unidentified; identical to SEQ ID NO: 6139
  misc_feature 1..99: note = Synthetic
  source 1..99: mol_type = other DNA

SEQ ID NO: 13910 - DNA, 885 bp, unidentified
  misc_feature 1..885: note = Synthetic
  source 1..885: mol_type = other DNA
atgaaaaatatcgatttaacaaattggaaattactggcagaaatatatgaatatctgttttttttctcgtttttctttctttgtctgctggtaataatagtggtgaaatttaataacagcaccgttggtcgagaatacacatttagtactttttctggaatgttggtttatattttattgttaccggttaaaatgggaatgttaaccaaaatgtgggatgtatccaccgattactgtataatcttaatgtttctgagtgatttttcatttatcttttcgtcctgggcgttaacgctgttggcactggaacgtatcaacaatttttctttttctgagattaaggtaaacgaaactaaaattctaaaacaaatgtctttcccaattatctgggttacttccatctttcaagctgtacaaatttcaatgaaatataagaaatcgcaaatgaatttagaagatgattactgtttattggctattgaacgctctgcagaagaagcctggatcttattaatgtataccgttgtcatcccaactttcattgtttttttctacgtgttaaataagcgatttctctttttagaaagagacctgaactcaattgttacacatttaagcttgtttttattttttggtgctttatgctttttccctgcttcggtgcttaacgaattcaactgcaatcgattgttttacggtctgcatgaattgctcattgtttgtttagagctaaaaattttttatgttcccactatgacatatataataagctgtgagaattataggctagctgccaaagcttttttttgtaaatgttttaaaccttgtttcttgatgccttcgttaagaaaattgcaacaacctacaaaatctacacagttttaa

SEQ ID NO: 13911 - DNA, 42 bp, unidentified; identical to SEQ ID NO: 6142
  source 1..42: mol_type = other DNA
  misc_feature 1..42: note = Synthetic

SEQ ID NO: 13912 - DNA, 249 bp, unidentified; identical to SEQ ID NO: 13065
  source 1..249: mol_type = other DNA
  misc_feature 1..249: note = Synthetic

SEQ ID NO: 13913 - DNA, 1053 bp, unidentified
  source 1..1053: mol_type = other DNA
  misc_feature 1..1053: note = Synthetic
aaggaaatggctgaaacatacaggttccccagattctcacacgaagaaaatgggacagtagaacctctccctctcaaaacaggtcctgacaaaaaagcaatccctcacatcagaatagtcaaggtaggagatcctccaaaacatggagtcaggtatcttgatgtgctactattgggattctttgaaacacctaagcaaggacctctatctggcagcatatctgatctcacagaatcaaccagttattcaatctgtggatccggatccttaccaattggcatagccaagtattacggcacagatcaagaattattaaaagcctgcattgacctcaaaataactgtacgaagaacagttagatctggagaaatgatagtatacatggtagattcgatccatgctcctctactaccatggtccagccgactgagacaagggatgatatataatgccaataaagtagctctagcacctcaatgtctcccagtcgacaaagacatcagattcagggttgtatttgtcaatggaacatcactaggtacaattacaattgctaaggtcccaaaaactcttgcagatcttgcattaccgaactcaatatcagtgaatctgctggttacacttagggcaggagtatcaacggaacaaaaaggaatcctccccgttctagacgatgatggagaaaagaagctcaacttcatggtacacctaggaatcataagaagaaaagttgggaagatatattcagttgaatactgcaaaaataaaattgagaagatgaagctaatattctctctcgggcttgtaggtggaataagtttccatgtacatgcaacaggcacattatccaaaactctaatgagccaacttgcatggaaaaaagcagtttgctatcctttaatggatgtaaatccacatatgaatctagtcatctgggcagcttcagtagaaatcacaagtgtcgatgctgtgttccaacctgcaattccgaaagaatttcgctattacccaaatgttgttgcaaaaagcatcgggaaaatcaggaggatataa

SEQ ID NO: 13914 - DNA, 411 bp, unidentified
  source 1..411: mol_type = other DNA
  misc_feature 1..411: note = Synthetic
atcatgaacgggaccggcggggccttcgaaggggggctttttagcccttatttgacaacccgcctgccgggatgggccggagttcgtcagaatgtgatgggatcaacggtggacgggcgcccagtgcttccagcaaattcctcgaccatgacctacgcgaccgtggggacgagctcgtcgcttgacagcaccgccgcagccgcggcagccgcagccgccatgacagcgacgagactggcctcgagctacatgcccagcagcggtagcagcccctccatccccagttccatcatcgccgaggagaaactgctggccctgctggctgagctggaagccctgagccgccagctgaccgccctgacccaggaggtgtccgagctccgcgaacagcagcagcagcaaaataaatga

SEQ ID NO: 13915 - DNA, 87 bp, unidentified; identical to SEQ ID NO: 6154
  source 1..87: mol_type = other DNA
  misc_feature 1..87: note = Synthetic

SEQ ID NO: 13916 - DNA, 45 bp, unidentified; identical to SEQ ID NO: 6158
  source 1..45: mol_type = other DNA
  misc_feature 1..45: note = Synthetic

SEQ ID NO: 13917 - DNA, 102 bp, unidentified; identical to SEQ ID NO: 6159
  source 1..102: mol_type = other DNA
  misc_feature 1..102: note = Synthetic

SEQ ID NO: 13918 - DNA, 69 bp, unidentified; identical to SEQ ID NO: 6161
  source 1..69: mol_type = other DNA
  misc_feature 1..69: note = Synthetic

SEQ ID NO: 13919 - DNA, 66 bp, unidentified; identical to SEQ ID NO: 6162
  misc_feature 1..66: note = Synthetic
  source 1..66: mol_type = other DNA

SEQ ID NO: 13920 - DNA, 57 bp, unidentified
  source 1..57: mol_type = other DNA
  misc_feature 1..57: note = Synthetic
aaggccgtggagatgcaggaggtggggtggctcttgcgcttctgcagctccgcgtag

SEQ ID NO: 13921 - DNA, 96 bp, unidentified; identical to SEQ ID NO: 6164
  source 1..96: mol_type = other DNA
  misc_feature 1..96: note = Synthetic

SEQ ID NO: 13922 - DNA, 555 bp, unidentified
  misc_feature 1..555: note = Synthetic
  source 1..555: mol_type = other DNA
atgcgtctctttgcaaggctgctcttgcttgtcatggatgaacttgtgtttctcatgcgcaactttgccctggcacagagcgagcccctaggcttccacgccctggacgcgttcggtctggagctctgggcttggagcgacctgcgcgacagcatggtacgcacccccgccggctacgagccggccaccccgctggtgtcgccgccattgtgccgtgaggagtggacctgctacgcgagcgacctcctgggcgcgcgcatgcgcatagtggacgcgtgctggctgacgccggaatccccgttgctcccgagagtaagtcgcgagcacttgctcatgctggcgtgtgcggaaaccgtccccgagaatccttgcctgcgcgtggtcagtagtgactcaaaccgaagtatggaagcgtccggactccgacgcagagacttgctctttgtgagccacacgtctgactacgcactgtgcgtttgcccgatgagtccagacgcaatctttagcgtagcggcgctcgtgctcagcgagagcaacaagcgcacacggcgctag

SEQ ID NO: 13923 - DNA, 306 bp, unidentified
  misc_feature 1..306: note = Synthetic
  source 1..306: mol_type = other DNA
atacgaggatacgtaataatcttgattgtacacccatcatggaacgattgtgcaacaggtcatattctcataatgttactcaattggcacgaacaaaaggaagaaggacaacatctactttatctattcataaaacataatcaaggatacactctcaatatactacggtatctactagataggttcgacattcagaaagacgaatactataataccgcctttcaaaattgtaacaacaatgttgcctcatacatcggatacgacatcaaccttccgactaaagacggtattcgacttggtgtttga

SEQ ID NO: 13924 - DNA, 306 bp, unidentified; identical to SEQ ID NO: 13923
  misc_feature 1..306: note = Synthetic
  source 1..306: mol_type = other DNA

SEQ ID NO: 13925 - DNA, 138 bp, unidentified; identical to SEQ ID NO: 6169
  source 1..138: mol_type = other DNA
  misc_feature 1..138: note = Synthetic

SEQ ID NO: 13926 - DNA, 138 bp, unidentified; identical to SEQ ID NO: 6169
  source 1..138: mol_type = other DNA
  misc_feature 1..138: note = Synthetic

SEQ ID NO: 13927 - DNA, 33 bp, unidentified; identical to SEQ ID NO: 6170
  source 1..33: mol_type = other DNA
  misc_feature 1..33: note = Synthetic

SEQ ID NO: 13928 - DNA, 78 bp, unidentified; identical to SEQ ID NO: 6171
  source 1..78: mol_type = other DNA
  misc_feature 1..78: note = Synthetic

SEQ ID NO: 13929 - DNA, 9450 bp, unidentified
  source 1..9450: mol_type = other DNA
  misc_feature 1..9450: note = Synthetic
atgagtaacggcgactgggggcaaagccagcgcacccggggaaccggccccgtgcgcggaatcaggaccatggatgtgaatgcccccgggggcgggagtggaggctcggccctccgcatcctaggcacggcctcgtgcaaccaggcccactgcaagtttggccgctttgccggcatccagtgcgtcagcaactgcgtcctctacctggtcaagagcttcctggccggccgccccctgacctcccgccctgagctggacgaggtcctggacgagggggcgcggctggatgccctcatgcgccagagcggcatcctcaaggggcacgagatggcccagttgacggacgtgcccagctccgtggtcctgaggggcggtgggcgcgtgcacatataccgctcggcggagatctttggcctcgtcctattccctgcccagatcgcaaactcggcagttgttcagtccctggccgaggtcctgcacggcagttacaacggggtggcccagttcatcctctacatctgcgacatctacgcgggggccatcatcatcgagacagatggctccttctacttgtttgacccccactgccagaaggatgcggccccgggcacccccgcccatgtcagagtcagcacctatgcgcacgacatcctgcagtacgtgggggcaccaggggcccagtacacttgcgtgcatctctattttctacccgaggcctttgagacagaggacccccgcatctttatgctggaacactatggcgtgtatgacttttatgaggccaacggcagcggctttgacctggtggggcccgagcttgtgtccagtgatggggaggcggcggggacgcccggtgctgatagcagccctcccgtcatgctaccgtttgaacggcgaataataccgtataacctcaggccactgccctctcgatctttcacatccgactcattccctgccgccaggtatagtcctgcaaagaccaactccccgccgtcgtctccggcctctgcggccccggcctctgcggccccggcctctgcggccccggcctccgcggccccggcctccgcggccccggcctccgcggccccggcctccgcggccccggcctccgcggccccggcctccagccctcccctcttcatccccatccccggcctaggtcacacccccggggtccccgctccctccacgccaccaagggcgtcgagcggcgcagcgcctcagactcccaagaggaaaaagggattgggcaaagatagcccccacaagaagcccacctccggccgccgcctccctctgtcctccaccactgacacagaggatgatcagctgccacgcacccacgttccgccccatcgccccccttcagcagctcgccttccccctccagtaatccccatccctcaccaatcaccacccgcctccccgacaccccaccccgcgccagtctcaactatcgctccttcagtcactccatctcctcgcctccctttgcaaatacccatccctctgccacaggcagctccctcgaacccaaaaatccctctgaccaccccatccccttccccgactgcagcagcagcccccaccaccacgactctttctcctcctccaactcagcagcagcccccgcaatcagccgccccggctccttctccacttcttcctcagcagcagcccacgccatcagccgccccggctccttctccacttcttcctcagcagcagcccccgccatcagccgcccgggctccttctcctcttcctcctcagcagcagcccctgccatcagctaccccggctcctcctcctgctcagcagctcccaccatcagccacgacactcgaaccagaaaaaaaccatcccccggccgctgacagggctggaacggagatatccccatcacctcccttcgggcagcagccctcctttggggatgatgcatctgggggttctggcctcgtccgctacctgtctgacctagaggagcctttcctatccatgtccgactctgaagaagcggagagcgacttagcctccgatatccccaccacagaggatgaagacatgttcgaagatgaagtgttctccaacagcctggaatcgggatccagtgcccccacgtcccccatcacactggacaccgccaggagccaatactatcagaccacctttgacatagagactcctgagatggactttgtgcccctcgagagcaacattgcgagaatagccggacatacctaccaggaacaggccatcgtctacgacccggcctctaaccgggaagtgccagaggcagatgccttgagcatgatagactatcttcttgtgacagtggtcctcgagcaggggctaataaggagtagggaccgatcgtctgtgctaaatctgctggaattcttaaaggactggtcgggacatctgcaggtccccacgctggacctggagcaactgctcacttccgaacttaacatccaaaacctcgcaaacatgctatcagaaaacaagggaagagcgggagagttccataagcacctggccgcaaagctggaggcctgcctgccgtccctggccacgaaggacgcggtccgtgtagatgccggtgctaagatgctggctgaaattccccagctggccgagagcgacgatggaaaatttgacctggaggcggcccgcagacgcctgaccgacctgctctcgggcggagatcaggaggcgggggaaggaggaggagaacccgaggataattccatctacaggggcccgcacgtggacgtccccttggtcctggacgacgaaagctggaagcgcctcctatccctggcggaggccgcccgaacggccgtggccagacaacaggctggggtagatgaggaggacgtccgctttttggcgctgttgacagcgatagagtatggggcccctcccgccgcctcagtgcccccctttgtccacaacgtggccgtccggtccaagaatgcggccctgcacgtgcgcaggtgtacggcggacatcagggacaaggtggcctcggcggcctccgattatctctcctaccttgaggacccaagcctcccaacagtgatggattttgacgacctcctgacacacctgcggcacacatgccagatcatcgcctccctgcctctcctaaacatccggtacacgtccattgaatgggactatcgcgagctcctctacctgggcaccgcccttagtgatatgagcggtatcccctggcccctggagcgagttgaggaggacgaccccagcattgccccccttccagagtttgagacagtcgcgaaaaaacagaaggagctcgagaccaccagagaaaacgaaaagcgcctccgcaccatcctggacgacatcgaggcaatgttgggcctggccggtgtggcctcggccccaggcgcccccatctctcccgcctctccctctgcgacacccgccaaccacgacaaccccgaagccacgccaccgctggccgacaccgcggccctcaccatccccgtcatagaaaagtacatcgcaaatgcagggtcgatagtcggggccgcaaagaaccccacgtacatccgcctacgtgacactatacagcagattgttcgctccaaaaagtacctgatgaacatcctgaaatccatcaccttctacaccatcgataactacattgcctccttcgaggagagcatagaccacctctatcgtgacttgccggtccttgaccctgaggtgcaggatggcattgaccgcatcctggaccccatggtctcagaggccctgcacacattcgagatgggcaaccggctgacgctggagccagcgcgcctagtggccttgcagaattttgctactcacagcaccttaaaggagacggccgcggcggtgaatctgctcccaggtctactggcggtctatgatgcgacgatcacaggtcaggctccagaggatgccctgagactactctctgggctgcagaatcagctctcccaaacgctcatcccagggaagctcaagaaacgcttcctaagttacctgcagaaattgaagaataacaacaacgatcagctcagacagaaggaggtgcaggcctggcgcctggaggccgaaggctttaagcccgccaccgaggaacagctcgaggcctttctggacactgcccccaacaaagagctcaagcgacagtatgagaagaagctgcggcagcttatggagaccgggcgcaaggaaaaggagaagctccgagaacaggaagacaaggagaggcaggagcggcgagcgcgagaggcgaatgaggcctgggccagaattaggaaggcgctgggggcacgcccagagcccgctcccacttcgcccgatgactggaacaccctgctggcctccctgctgccagacaatacggactcagccgcggcagcagcggcggcagtagccagaaacacggacatcttggactccctcacacagatccttgccgctatgctattgggaataacgagggtgaggagggagagactgcgatccctgctcgtggacgatggtggtgcggcggagagaatggaggccgcggaacccggctggttcacggatatcgagaccggccctctggccagactggacgcttggcccgccacccccgcggctaccgccaaagaaggaggaggagggcgaggagcggaggaagcggccggggccctctttcgcgccaggacggcggccgatgccatccgttcggccctcgcgcagacgcgccaggccctgcagtccccggacatgaaatcagcggtggtcaacacggatctggaggccccctacgcggagtacgagcgggggctggccgggcttctggaaaaaagacgagcagccgaggctgccctgacggccatcgtgagcgagtacgtggatcggacgctacccgaagccactaatgacccaggccaggctaacctgcctcctcctccaactatcccccaggcaaccgccccgcccaggctggcctcggactcggcgctctggcctaagaagccccagctgctgacaaggcgagagcgggacgatctcctccaggccacgggggacttcttctcggagctgctgaccgaggccgaggcggccgaggtccgggcgctggaagagcaggtccgggagagccagaccctgatggcgaaggcccacgagatggcggcaagcactcggcggggctttcacacggctctggaggccgtcctctccaggtcacgcgacgaagcccccgacgatgaactccggagcctgcttccctccccgcccaaagcccctgtccaggctcccctcgaggccgccctggcccgggcagcggccgggaacggctcatggccctaccggaaatccctggcagccgccaagtggatccggggcatctgcgaggccgtgcggggtctttccgaaggagccctggccttagctgggggcgcgggtgcctggctgaacctagccgctgcggctgacggtgaaattcatgagctaacacggctcctggaagtcgagggcatggcccagaactccatggatggcatggaggagctgaggttggctctggccacgttggaccccaagcgggtcgcggggggcaaggagaccgtcgcagactggaaaaggcgcctctcccgactggaggccatcatccaggaggcccaggaagagtcccagctgcagggaacgctgcaggatctggtcacccaggccaggggccacaccgacccgcgccagctcaagatcgtggtggaggctgccaggggcctggcgcttggggcctcggctggctcccagtatgccctcctcaaggacaagctgctgcgctatgcctcggccaagcagagtttcctggctttttacgagaccgcccagcctaccgttttcgttaagcatcccttgaccaacaacctgcccctcctcatcacgatttcggcaccaccaactggatggggcaatggagccccgacccggcgggcacaatttctggcggcggcagggccggcgaaatacgccggcaccctctggctggaaacagagtctccctgcgacccccttaacccggcctacgtctccgcagacacccaggagccgctcaactacatccccgtctaccacaactttctggaatatgtcatgcccaccgtgctggagaacccagaggccttttccctgaccccagccggacgcccccaagctattggtcccccgcaggatgaccaagagaggaggagaagaaccctggccagtgtagcttccgcccgcctcagcgccgccgccgccgactcctactgggacacctggcccgacgtggagtccaacgccggggagctgcttcgggaatacgtctctgcgcccaaagccctgatggaagacctggcagacaaccccattgtggccatgacacttttagcgcacgccagtctcatcgcctctaggaatcaccccccttatccagccccggccacagaccgggaagttattctattggaacaacgggagatgatggcgctgctggtcggcacacatccggcctacgctgccgccttcctgggcgccccatcgttctacgcaggactcggcctggtctcggctctagcgagagatgggggtttgggagacctcctgtcggactcggtcctcacctacaggctggtcaggagtccagcctccgggagggggggcatgccctcaaccacccgcggcagcaacgacggggaagacgcgcgccgcctcacccgccaccgcatcgccggtccacccaccggcttcatcttcttccaggacgcctgggaggagatggatacccgagccgccctctggccgcaccccgagttcttgggcctggtccacaaccaaagtacggcccgcgcccgagcctgcatgctgctcctcgcacgccggtgcttcgcccccgaggcccttcagcagctctggcactcattgcgcccgctggagggcccggtcgcatttcaggactacctgcgcgactttgtgaagcaggcctatacacgcggagaagagctccccagggcggagggactcgaggtcccccgcgaaaccccgtcttcctacggcaccgttaccggccgggccctgagaaatcttatgccttatggcactcccattaccggtcctaagaggggctccggtgacaccatccccgtctccgtttttgaggcggccgtggcggcggccttcctcggtcggcccctaactctctttgtctcctctcaatatctgtttaacctgaagaccctgggacaggtcagggtcgttgctcccctcctctactgcgacgggcactctgagcccttccggtccctggtggagaccatctcgctgaattttctgcaggacctggacggctactccgagtctttcgagccagagatgtccatctttgcacgccaggccgtgtggctacgcgagcttctcaccgaggccagggccgccaaacctaaggaggccaggccccccaccgtggccatcctggccaacagaaaaaacatcatctggaagtgtttcacctatcggcacaatctgccggacgtgcagttctactttaacgcggccggggcctcacgatggccgaccgatgtactcaacccctccttctacgagcacgaagatcctccactgccggttggataccagcttcccccgaatccacgcaacgtccaggagctgttctccggtttccccccaagggtggggcacggactggtcagcggggacgggtttcagtcagcagataacaccccggcctcctccgaccggctccagcagttgggaggaggggagacggaccagggggaaaaggggagcactactgctgaatctgaggcctctggccctcccagcccacagagccccctcttagagaaggtggcccctggcaggcccagggactggctgtctcctacctcctccccccgggacgtgacagttaccccgggattggccgcccccatcactctcccaggcccccgattgatggcaaggccctatttcggggccgaaacgagggcttccgagagcccagaccggtctccgggaagctccccaaggccatggcccaaagattccctggagctccttccccaaccagcaccacaacagcccccctcaagtccctgggcttctgaacaagggcccatcgtctacacattgtctccacactctacaccatcgactgcctcggggtcacagaagaaacataccatccagattccagggttggtgccttcacagaagcccagttatccaccctcagccccctacaagcccggccagtcgacgggaggcatagctcccacaccatcagcggcatctttaacgacttttgggctccagccccaggacacacaagcctcctctcaggacccaccctatggccattctatcatgcaacgggagaagaaacagcaggggggccgggaagaagccgcggagattcggccctccgccacccgcctccccacggccgtcgggctgcgaccccgtgcgcccgtggtggccgccggcgcagcagcctccgctactccagcgttcgacccgggagaagcgccgtccggctttcccatcccccaggcacccgccctggggtccggcttggccgccccggcgcacaccccagttggtgcattggcaccgcgcccccaaaaaacgcaagcacaaaggccccaagatgcagctgccctgcccacccccacaattaaagcggtgggtgccaggcccgtgccaaaggccacgggggcgctggcggccggcgcccgtcctcgggggcagcccaccgcggccccgccgtcggctgcatctccgccgcgcgtgtctctccctgtcaggagcagacagcaacaatcccccgcaatcccattgcccccaatgcattccggctcggagcctggcgcgcggcccgaggtgcgcctatcccagtaccggcatgcgggtccccaaacatacaccgtgcgaaaagaagcacccccatccgccgcctcccagctgcccaaaatgccaaaatgtaaggatagcatgtattacccgccatccggtagcgcacgctatcccgcgccttttcaagcactttcgttttcgcaaagcgtggcctcacccgcgccatctagcgaccagacaacattactgtggaacactccctcagtggtcacccaatttctgtctattgaagacattatcagggaggtggtgacaggagggtcgacctccggcgacctagtggtcccctccggatccccctcctctctatccaccgccgccccggaacaggacctgcgttatagcctcacccttagtcaggctagccgagtactgtctcgcttcgtgagccagcttcgccgcaagctggagcgttccacccaccgcctcatcgcagacctcgagagactcaagtttttgtatctgtaa

SEQ ID NO: 13930 - DNA, 9465 bp, unidentified
  misc_feature 1..9465: note = Synthetic
  source 1..9465: mol_type = other DNA
atgagtaacggcgactgggggcaaagccagcgcacccggggaaccggccccgtgcgcggaatcaggaccatggatgtgaatgcccccgggggcgggagtggaggctcggccctccgcatcctaggcacggcctcgtgcaaccaggcccactgcaagtttggccgctttgccggcatccagtgcgtcagcaactgcgtcctctacctggtcaagagcttcctggccggccgccccctgacctcccgccctgagctggacgaggtcctggacgagggggcgcggctggatgccctcatgcgccagagcggcatcctcaaggggcacgagatggcccagttgacggacgtgcccagctccgtggtcctgaggggcggtgggcgcgtgcacatataccgctcggcggagatctttggcctcgtcctattccctgcccagatcgcaaactcggcagttgttcagtccctggccgaggtcctgcacggcagttacaacggggtggcccagttcatcctctacatctgcgacatctacgcgggggccatcatcatcgagacagatggctccttctacttgtttgacccccactgccagaaggatgcggccccgggcacccccgcccatgtcagagtcagcacctatgcgcacgacatcctgcagtacgtgggggcaccaggggcccagtacacttgcgtgcatctctattttctacccgaggcctttgagacagaggacccccgcatctttatgctggaacactatggcgtgtatgacttttatgaggccaacggcagcggctttgacctggtggggcccgagcttgtgtccagtgatggggaggcggcggggacgcccggtgctgatagcagccctcccgtcatgctaccgtttgaacggcgaataataccgtataacctcaggccactgccctctcgatctttcacatccgactcattccctgccgccaggtatagtcctgcaaagaccaactccccgccgtcgtctccggcctctgcggccccggcctctgcggccccggcctctgcggccccggcctccgcggccccggcctctgcggccccggcctctgcggccccggcctccgcggccccggcctccgcggccccggcctccgcggccccggcctccagccctcccctcttcatccccatccccggcctaggtcacacccccggggtccccgctccctccacgccaccaagggcgtcgggcggcgcagcgcctcagactcccaagaggaaaaagggattgggcaaagatagcccccacaagaagcccacctccggccgccgcctccctctgtcctccaccactgacacagaggatgatcagctgccacgcacccacgttccgccccatcgccccccttcagcagctcgccttccccctccagtaatccccatccctcaccaatcaccacccgcctccccgacaccccgccccgcgccagtctcaactatcgctccttcagtcactccatctcctcgcctccctttgcaaatacccatccctctgccacaggcagctccctcgaacccagaaatccctctgaccaccccatccccttccccgactgcagcagcagcccccaccgccacgactctttctcctcctccaactcagcagcagcccccgcaatcagccgccccggctccttctcctcctccaactcagcagcagcccccgcaatcagccgccccggctccctctccacttcttcctcagcagcagcccccgccgtcagccgcccgggctccttctcctcttcctcctcagcagcagcccctgccatcagctaccccggctcctcctcatgctcagcagctcccaccatcagccacgacactcgaaccagaaaaaaacaatccctcggccgctgacagggctggaacggagatatccccatcacctcccttcgggcagcagccctcctttggggatgatgcatctgggggttctggcctcgtccgctacctgtctgacctagaggagcctttcctatccatgtccgactctgaagaagcggagagcgacttagcctccgatatccccaccacagaggatgaagacatgtttgaagatgaagtgttctccaacagcctggaatcgggatccagtgcccccacgtcccccatcacactggacaccgccaggagccaatactatcagaccacctttgacatagagactcctgagatggactttgtgcccctcgagagcaacattgcgagaatagccggacatacctaccaggaacaggccatcgtctacgacccggcctctaacagggaagtgccagaggcagatgccttgagcatgatagactatcttcttgtgacagtggtcctcgagcaggggctaataaggagtagggaccgatcggctgtgctaaatctgctggaattcttaaaggactggtcgggacatctgcaggtccccacgctggacctggagcaactgctcacttccgaacttaacatccaaaacctcgcaaacatgctatcagaaaacaagggaagagcgggagagttccatgagcacctggccgcaaagctggaggcctgcctgccgtccctggccacgaaggacgcggtccgtgtagatgccggtgctaagatgctggctgaaattccccagctggccgagagcggcgacggaaaatttgacctggaggcggcccgtagacgcctgaccgacctgctctcgggcggagatcaggagggggaggaaggaggaggagaacccgaggatcattccatctacaggggcccgcacgtggatgtccccttggtcctggacgacgagagctggaagcgcctcctatccctggcggaggccgcccgaacggccgtggccagacaacaggctggggtagatgaggaggacgtccgctttttggcgctgttgacagcgatagagtatggggcccctcccgccgcctcagtgcccccctttgtccacaacgtgcccgtccggtccaagaatgcggccctgcacgtgcgcaggtgtacggcggacatcagggacaaggtggcctcggcggcctccgattatctctcctaccttgaggacccaagcctcccaacggtgatggattttgacgacctcctgacacacctgcggcacacatgccagatcatcgcctccctgcctctcctaaacatccggtacacgtccattgaatgggactatcgcgagctcctctacctgggcaccgcccttagtgatatgagcggtatcccctggcccctggagcgagttgaggaggacgaccccagcattgccccccttccagagtttgagacagtcgcgaaaaaacagaaggagctcgagaccaccagagaaaacgaaaagcgcctccgcaccatcctggacgacatcgaggcaatgttgggcctggccggtgtggcctcggccccaggcgcccccatctctcccgcctctccctctgcgacacccgccaaccacgacaaccccgaagccacgccaccactggccgacaccgcggccctcaccatccccgtcatagaaaagtacatcgcaaatgcagggtcgatagtcggggccgcaaagaaccccacgtacatccgcctacgtgacactatacagcagattgtccgctccaaaaagtacctgatgaacatcctgaaatccatcaccttctacaccatcgataactacattgcctccttcgaggagagcatagaccacctctatcgtgacttgccggtccttgaccctgaggtgcaggatggcattgaccgcatcctggaccccatggtctcagaggccctgcacacattcgagatgggcaaccggctgacgctggagccagcgcgcctagtggccttgcagaattttgctactcacagcaccttaaaggagacggccgcggcggtgaatctgctcccaggtctactggcggtctatgatgcgacggtcacaggtcaggctccagaggatgccctgagactactctctgggctgcagaatcagctctcccaaacgctcatcccagggaagctcaagaaacgcttcctaagttacctgcagaaattgaagaataacaacaacgatcagctcagacagaaggaggtgcaggcctggcgcctggaggccgaaggctttaagcccgccaccgaggaacagctcgaggcctttctggacactgcccccaacaaagagctcaagcgacagtatgagaagaagctgcggcagcttatggagaccgggcgcaaggaaaaggagaagctccgagaacaggaagacaaggagaggcgggagcggcgagcgcgagaggcgaatgaggcctgggccagaattaggaaggcgctgggggcacgcccagagcccgctcccacttcgcccgatgactggaacaccctgctggcctccctgctgccagacaatacggactcagccgcggcagcagcggcggcagtagccagaaacacggacatcttggactccctcacacagatccttgccgctatgctattgggaataacgagggtgaggagggagagactgcgatccctgctcgtggacgatggtggtgcggcggagagaatggaggccgtggaacccggctggttcacggagatcgagaccggccctctggccagactggacgcttggcccgccacccccgcggctaccgccaaagaaggaggaggagggcgaggagcggaggaagcggccggggccctctttcgtgccaggacggcggccgatgccatccgttcggccctcgcgcagacgcgccaggccctgcagtccccggacatgaaatcagcggtggtcaacacggatctggaggccccctacgcggagtacgagcgggggctggccgggcttctggaaaaaagacgatcagccgaggctgccctgacggccatcgtgagcgagtacgtggatcggacgctacccgaagccactaatgacccaggccaggctaacctgcctcctcctccaactatcccccaggcaaccgccccgcccaggctggcctcggactcggcgctctggcctaagaagccccagctgctgacaaggcgagagcgggacgatctcctccaggccacgggggacttcttctcagagctgctgaccgaggccgaggcggccgaggtccgggcgctggaagagcaggtccgggagagccagaccctgatggcgaaggcccacgagatggcggcaagcactcggcggggctttcacacggctctggaggccgtcctctccaggtcacgcgacgaagcccccgacgatgaactccggagcctgctcccctccccgcccaaagcccctgtccaggctcccctcgaggccgccctggcccgggcagcggccgggaacggctcgtggccctaccggaaatccctggcagccgccaagtggatccggggcatctgcgaggcagtgcggggtctttccgaaggagccctggccttagctgggggtgtgggtgcctggctgaacctagccgctgcggctgacggtgaaattcatgagctaacacggctcctggaagtcgagggcatggcccagaactccatggatggcatggaggagctgaggttggctctggccacgttggaccccaagcgggtcgcggggggcaaggagaccgtcgcagactggaaaaggcgcctctcccgactggaggccatcatccaggaggcccaggaagagtcccagctgcagggaacgctgcaggatctggtcacccaggccaggggccacaccgacccgcgccagctcaagatcgtggtggaggctgccaggggcctggcgcttggggcctcggctggctcccagtatgcactcctcaaggacaagctgctgcgctatgcctcggccaagcagagtttcctggctttttacgagaccgcccagcctaccgttttcgttaagcatcccttgaccaacaacctgcccctcctcatcacgatttcggcaccaccaactggatggggcaatggagccccgacccggcgggcacaatttctggcggcggcagggccggcgaaatacgccggcaccctctggctggaaacagagtctccctgcgacccccttaacccggcctacgtctccgcagacacccaggagccgctcaactacatccccgtctaccacaactttctggaatatgtcatgcccaccgtgctggagaacccagaggccttttccctgaccccagccggacgcccccaagctattggtcccccgcaggatgaccaagagaggaggagaagaaccctggccagtgtagcttccgcccgcctcagcgccgccgccgccgactcctactgggacacctggcccgacgtggagtccaacgccggggagctgcttcgggaatacgtctctgcgcccaaagccctgatggaagacctggcagacaaccccattgtggccatgacgcttttagcgcacgccagtctcatcgcctctaggaatcaccccccttatccagccccggccacagaccgggaagttattctattggaacaacgggagatgatggcgctgctggtcggcacacatccggcctacgctgccgccttcctgggcgccccatcgttctacgcaggactcggcctggtctcggctctagcgagagatgggggtttgggagacctcctgtcggactcggtcctcacctacaggctggtcaggagtccagcctccgggagggggggcatgccctcaaccacccgcggcagcaacgacggggaagacgcgcgccgcctcacccgccaccgcatcgccggtccacccaccggcttcatcttcttccaggacgcctgggaggagatggatacccgggccgccctctggccgcaccccgagttcttgggcctggtccacaaccaaagtacggcccgcgcccgagcctgcatgctgctcctcgcacgccggtgcttcgcccccgaggcccttcagcagctctggcactcattgcgcccgctggagggcccggtcgcatttcaggactacctgcgcgactttgtgaagcaggcctatacacgcggagaagagctccccagggcggagggactcgaggtcccccgcgaaaccccgtcttcctacggcaccgttaccggccgggccctgagaaatcttatgccttatggcactcccattaccggtcctaagaggggctccggtgacaccatccccgtctccgtttttgaggcggccgtggcggcggccttcctcggtcggcccctaactctctttgtctcctctcaatatctgtttaacctgaagaccctgggacaggtcagggtcgttgctcccctcctctactgcgacgggcactctgagcccttccggtccctggtggagaccatctcgctgaattttctgcaggacctggacggctactccgagtctttcgagccagagatgtccatctttgcacgccaggccgtgtggctacgcgagcttctcaccgaggccagggccgccaaacctaaggaggccaggccccccaccgtggccatcctggccaacagaaaaaacatcatctggaagtgtttcacctatcggcacaatctgccggacgtgcagttctactttaacgcggccggggcctcacgatggccgaccgatgtactcaacccctccttctacgagcacgaagatcctccactgccggttggataccagcttcccccgaatccacgcaacgtccaggagctgttctccggtttccccccaagggtggggcacggactggtcagcggggacgggtttcagtcagcagataacaccccggcctcctccgaccggctccagcagttgggaggaggggagacggaccagggggaagaggggagcactactgctgaatctgaggcctctggccctcccagcccacagagccccctcttagagaaggtggcccctggcaggcccagggactggctgtctcctacctcctccccccgggacgtgacagttaccccgggattggccgcccccatcactctcccaggcccccgattgatggcaaggccctatttcggggccgaaacgagggcttccgagagcccagaccggtctccgggaacctccccaaggccatggcccaaagattccctggagctccttccccaaccagcaccacaacagcccccctcaagtccctgggcttctgaacaagggcccatcgtctacacattgtctccaaactctacaccatcgactgcctcggggtcacagaagaaacataccatccagattccagggttggtgccttcacagaagcccagttatccaccctcagccccctacaagcccggccagtcgacgggaggcatagctcccacaccatcagcagcgtctttaacgacttttgggctccagccccaggacacacaagcctcctctcaggacccaccctatggccattctatcatgcaacgggagaagaaacagcaggggggccgggaagaagccgcggagattcggccctccgccacccgcctccccacggccgtcgggctgcgaccccgtgcgcccgtggtggccgccggcgcagcagcctccgctactccagcgttcgacccgggagaagcgccgtccggctttcccatcccccaggcacccgccctggggtccggcttggccgccccggcgcacaccccagttggtgcattggcaccgcgcccccaaaaaacgcaagcacaaaggccccaagatgcagctgccctgcccacccccacaattaaagcggtgggtgccaggcccgtgccaaaggccacgggggcgctggcggccggcgcccgtcctcgggggcagcccaccgcggccccgccgtcggctgcatctccgccgcgcgtgtctctccctgtcaggagcagacagcaacaatcccccgcaatcccattgcccccaatgcattccggctcggagcctggcgcgcggcccgaggtgcgcctatcccagtaccggcatgcgggtccccaaacatacaccgtgcgaaaagaagcacccccatccgccgcctcccagctgcccaaaatgccaaaatgtaaggatagcatgtattacccgccatccggtagcgcacgctatcccgcgccttttcaagcactttcgttttcgcaaagcgtggcctcacccgcgccatctagcgaccagacaacattactgtggaacactccctcagtggtcacccaatttctgtctattgaagacattatcagggaggtggtgacaggagggtcgacctccggcgacctagtggtcccctccggatccccctcctctctatccaccgccgccccggaacaggacctgcgttatagcctcacccttagtcaggctagccgagtactgtctcgcttcgtgagccagcttcgccgcaagctggagcgttccacccaccgcctcatcgcagacctcgagagactcaagtttttgtatctgtaa

SEQ ID NO: 13931 - DNA, 219 bp, unidentified
  source 1..219: mol_type = other DNA
  misc_feature 1..219: note = Synthetic
atgacagaggctaaagacaaaattgcagaaatgatgaaagaagaggacacccagagggcaaaaataggagatggtagcgtgaagcttaccgaaaaagccaaagagttgaacaaaatcctagaagaccagagctcaagtggagagtcagagagtgaagaagagagtggagagtctgaatctgatgaggaagagagcgacatatacaatcttgatctgtag

SEQ ID NO: 13932 - DNA, 51 bp, unidentified; identical to SEQ ID NO: 6182
  source 1..51: mol_type = other DNA
  misc_feature 1..51: note = Synthetic

SEQ ID NO: 13933 - DNA, 72 bp, unidentified; identical to SEQ ID NO: 6183
  source 1..72: mol_type = other DNA
  misc_feature 1..72: note = Synthetic

SEQ ID NO: 13934 - DNA, 60 bp, unidentified; identical to SEQ ID NO: 6185
  misc_feature 1..60: note = Synthetic
  source 1..60: mol_type = other DNA

SEQ ID NO: 13935 - DNA, 60 bp, unidentified; identical to SEQ ID NO: 6185
  misc_feature 1..60: note = Synthetic
  source 1..60: mol_type = other DNA

SEQ ID NO: 13936 - DNA, 2538 bp, unidentified
  source 1..2538: mol_type = other DNA
  misc_feature 1..2538: note = Synthetic
atgactcccaggtctagattggccaccctggggactgtcatcctgttggtctgcttttgcgcaggcgcggcgcactcgaggggtgacacctttcagacgtccagttcccccacacccccaggatcttcctctaaggcccccaccaaacctggtgaggaagcatctggtcctaagagtgtggacttttaccagttcagagtgtgtagtgcatcgatcaccggggagctttttcggttcaacctggagcagacgtgcccagacaccaaagacaagtaccaccaagaaggaattttactggtgtacaaaaaaaacatagtgcctcatatctttaaggtgcggcgctataggaaaattgccacctctgtcacggtctacaggggcttgacagagtccgccatcaccaacaagtatgaactcccgagacccgtgccactctatgagataagccacatggacagcacctatcagtgctttagttccatgaaggtaaatgtcaacggggtagaaaacacatttactgacagagacgatgttaacaccacagtattcctccaaccagtagaggggcttacggataacattcaaaggtactttagccagccggtcatctacgcggaacccggctggtttcccggcatatacagagttaggaccaccgtcaattgcgagatagtggacatgatagccaggtctgctgaaccatacaattactttgtcacgtcactgggtgacacggtggaagtctcccctttttgctataacgaatcctcatgcagcacaacccccagcaacaaaaatggccttagcgtccaagtagttctcaaccacactgtggtcacgtactctgacagaggaaccagtcccactccccaaaacaggatctttgtggaaacgggagcgtacacgctttcgtgggcctccgagagcaagaccacggccgtgtgtccgctggcactgtggaaaaccttcccgcgctccatccagactacccacgaggacagcttccactttgtggccaacgagatcacggccaccttcacggctcctctaacgccagtggccaactttaccgacacgtactcttgtctgacctcggatatcaacaccacgctaaacgccagcaaggccaaactggcgagcactcacgtccctaacgggacggtccagtacttccacacaacaggcggactctatttggtctggcagcccatgtccgcgattaacctgactcacgctcagggcgacagcgggaaccccacgtcatcgccgcccccctccgcatcccccatgaccacctctgccagccgcagaaagagacggtcagccagtaccgctgctgccggcggcggggggtccacggacaacctgtcttacacgcagctgcagtttgcctacgacaaactgcgggatggcattaatcaggtgttagaagaactctccagggcatggtgtcgcgagcaggtcagggacaacctaatgtggtacgagctcagtaaaatcaaccccaccagcgttatgacagccatctacggtcgacctgtatccgccaagttcgtaggagacgccatttccgtgaccgagtgcattaacgtggaccagagctccgtaaacatccacaagagcctcagaaccaatagtaaggacgtgtgttacgcgcgccccctggtgacgtttaagtttttgaacagttccaacctattcaccggccagctgggcgcgcgcaatgagataatactgaccaacaaccaggtggaaacctgcaaagacacctgcgaacactacttcatcacccgcaacgagactctggtgtataaggactacgcgtacctgcgtactataaacaccactgacatatccaccctgaacacttttatcgccctgaatctatcctttattcaaaacatagacttcaaggccatcgagctgtacagcagtgcagagaaacgactcgcgagtagcgtgtttgacctggagacgatgttcagggagtacaactactacacacatcgtctcgcgggtttgcgcgaggatctggacaacaccatagatatgaacaaggagcgcttcgtaagggacttgtcggagatagtggcggacctgggtggcatcggaaaaacggtggtgaacgtggccagcagcgtggtcactctatgtggctcattggttaccggattcataaattttattaaacaccccctaggtggcatgctgatgatcattatcgttatagcaatcatcctgatcatttttatgctcagtcgccgcaccaataccatagcccaggcgccggtgaagatgatctaccccgacgtagatcgcagggcacctcctagcggcggagccccaacacgggaggaaatcaaaaacatcctgctgggaatgcaccagctacaacaagaggagaggcagaaggcggatgatctgaaaaaaagtacaccctcggtgtttcagcgtaccgcaaacggccttcgtcagcgtctgagaggatataaacctctgactcaatcgctagacatcagtccggaaacgggggagtga

SEQ ID NO: 13937 - DNA, 2538 bp, unidentified
  source 1..2538: mol_type = other DNA
  misc_feature 1..2538: note = Synthetic
atgactcccaggtctagattggccaccctggggactgtcatcctgttggtctgcttttgcgcaggcgcggcgcactcgaggggtgacacctttcagacgtccagttcccccacacccccaggatcttcctctaaggcccccaccaaacctggtgaggaagcatctggtcctaagagtgtggacttttaccagttcagagtgtgtagtgcatcgatcaccggggagctttttcggttcaacctggagcagacgtgcccagacaccaaagacaagtaccaccaagaaggaattttactggtgtacaaaaaaaacatagtgcctcatatctttaaggtgcggcgctataggaaaattgccacctctgtcacggtctacaggggcttgacagagtccgccatcaccaacaagtatgaactcccgagacccgtgccactctatgagataagccacatggacagcacctatcagtgctttagttccatgaaggtaaatgtcaacggggtagaaaacacatttactgacagagacgatgttaacaccacagtattcctccaaccagtagaggggcttacggataacattcaaaggtactttagccagccggtcatctacgcggaacccggctggtttcccggcatatacagagttaggaccaccgtcaattgcgagatagtggacatgatagccaggtctgctgaaccatacaattactttgtcacgtcactgggtgacacggtggaagtctcccctttttgctataacgaatcctcatgcagcacaacccccagcaacaaaaatggccttagcgtccaagtagttctcaaccacactgtggtcacgtactctgacagaggaaccagtcccactccccaaaacaggatctttgtggaaacgggagcgtacacgctttcgtgggcctccgagagcaagaccacggccgtgtgtccgctggcactgtggaaaaccttcccgcgctccatccagactacccacgaggacagcttccactttgtggccaacgagatcacggccaccttcacggctcctctaacgccagtggccaactttaccgacacgtactcttgtctgacctcggatatcaacaccacgctaaacgccagcaaggccaaactggcgagcactcacgtccctaacgggacggtccagtacttccacacaacaggcggactctatttggtctggcagcccatgtccgcgattaacctgactcacgctcagggcgacagcgggaaccccacgtcatcgccgcccccctccgcatcccccatgaccacctctgccagccgcagaaagagacggtcagccagtaccgctgctgccggcggcggggggtccacggacaacctgtcttacacgcagctgcagtttgcctacgacaaactgcgggatggcattaatcaggtgttagaagaactctccagggcatggtgtcgcgagcaggtcagggacaacctaatgtggtacgagctcagtaaaatcaaccccaccagcgttatgacagccatctacggtcgacctgtatccgccaagttcgtaggagacgccatttccgtgaccgagtgcattaacgtggaccagagctccgtaaacatccacaagagcctcagaaccaatagtaaggacgtgtgttacgcgcgccccctggtgacgtttaagtttttgaacagttccaacctattcaccggccagctgggcgcgcgcaatgagataatactgaccaacaaccaggtggaaacctgcaaagacacctgcgaacactacttcatcacccgcaacgagactctggtgtataaggactacgcgtacctgcgcactataaacaccactgacatatccaccctgaacacttttatcgccctgaatctatcctttattcaaaacatagacttcaaggccatcgagctgtacagcagtgcagagaaacgactcgcgagtagcgtgtttgacctggagacgatgttcagggagtacaactactacacacatcgtctcgcgggtttgcgcgaggatctggacaacaccatagatatgaacaaggagcgcttcgtaagggacttgtcggagatagtggcggacctgggtggcatcggaaaaacggtggtgaacgtggccagcagcgtggtcactctatgtggctcattggttaccggattcataaattttattaaacaccccctaggtggcatgctgatgatcattatcgttatagcaatcatcctgatcatttttatgctcagtcgccgcaccaataccatagcccaggcgccggtgaagatgatctaccccgacgtagatcgcagggcacctcctagcggcggagccccaacacgggaggaaatcaaaaacatcctgctgggaatgcaccagctacaacaagaggagaggcagaaggcggatgatatgaaaaaaagtacaccctcggtgtttcagcgtaccgcaaacggccttcgtcagcgtctgagaggatataaacctctgactcaatcgctagacatcagtccggaaacgggggagtga

SEQ ID NO: 13938 - DNA, 942 bp, unidentified
  misc_feature 1..942: note = Synthetic
  source 1..942: mol_type = other DNA
ttgctgttcacgctcgtactgctggccctctacggaccgtctgtcgacgctagccgcgactatgtgcatgttcgactactgagctaccgaggcgaccccctggtcttcaagcacactttctcgggtgtgcgtcgacccttcaccgagctaggctgggctgcgtgtcgcgactgggacagtatgcattgcacgcccttctggtctaccgatctggagcagatgaccgactcggtgcggcgttacagcacggtgagccccggcaaggaagtgacgcttcagcttcacgggaaccaaaccgtacagccgtcgtttctaagctttacgtgccgcctgcagctagaacccgtggtggaaaatgttggcctctacgtggcctacgtggtcaacgacggtgaacgcccacaacagttttttacaccgcaggtagacgtggtacgctttgctctatatctagaaacgctctcccggatcgtggaaccgttagaatcaggtcgcctgacagtggaatttgatacgcctgacctagctctggcgcccgatttagtaagcagcctcttcgtggccggacacggcgagaccgacttttacatgaactggacgctgcgtcgcagtcagacccactacctggaggagatggccttacaggtggagattctaaagccccgcggcgtacgtcaccgcgctattatccaccatccgaagctacaaccgggcgttggcttgtggatagatttctgcgtgtaccgctacaacgcgcgcctgacccgtggctacgtacgatacaccctgtcaccgaaagcgcgcttgcccgcaaaagcagagggttggctggtgtcactagacagattcatcgtgcagtacctcaacacattgctgattacaatgatggcggcgatatgggctcgcgttttgataacctacctggtgtcgcggcgtcggtag

SEQ ID NO: 13939 - DNA, 21 bp, unidentified
  misc_feature 1..21: note = Synthetic
  source 1..21: mol_type = other DNA
atgtgcatgttcgactactga

SEQ ID NO: 13940 - DNA, 405 bp, unidentified
  misc_feature 1..405: note = Synthetic
  source 1..405: mol_type = other DNA
ctggtaaggctgactgttatggctgccgctgtggaagcgctgtatgttgttctggagcgggagggtgctattttgcctaggcaggagggtttttcaggtgtttatgtgtttttctctcctattaattttgttatacctcctatgggggctgtaatgttgtctctacgcctgcgggtatgtattcccccgggctatttcggtcgctttttagcactgaccgatgttaaccaacctgatgtgtttaccgagtcttacattatgactccggacatgaccgaggaactgtcggtggtgctttttaatcacggtgaccagtttttttacggtcacgccggcatggccgtagtccgtcttatgcttataagggttgtttttcctgttgtaagacaggcttctaatgtttaa

SEQ ID NO: 13941 - DNA, 111 bp, unidentified; identical to SEQ ID NO: 6192
  source 1..111: mol_type = other DNA
  misc_feature 1..111: note = Synthetic

SEQ ID NO: 13942 - DNA, 144 bp, unidentified
  source 1..144: mol_type = other DNA
  misc_feature 1..144: note = Synthetic
aaggagctcgcggactaccagtccacgccgctcaccgaccccatccggctcagcgacttctccaagctattcgacggcgtcaagaagagcatccagctcacgaacgtgcccgtgccctccgccggcgccgaggccgcgccgtag

SEQ ID NO: 13943 - DNA, 297 bp, unidentified; identical to SEQ ID NO: 12723
  misc_feature 1..297: note = Synthetic
  source 1..297: mol_type = other DNA

SEQ ID NO: 13944 - DNA, 1365 bp, unidentified
  source 1..1365: mol_type = other DNA
  misc_feature 1..1365: note = Synthetic
atggatgcgcatgctatcaacgaaagatacgtaggtcctcgctgccaccgtttggcccacgtggtgctgcctaggacctttctgctgcatcacgccatacccctggagcccgagatcatcttttccacctacacccggtttagccggtcgccagggtcatcccgccggttggtggtgtgtgggaaacgtgtcctgccaggggaggaaaaccaacttgcgtcttcaccttctggcttggcgcttagcctgcctctgttttcccacgatgggaactttcatccatttgacatctcggtactgcgcatttcctgccctggttctaatcttagtcttactgtcagatttctctatctatctctggtggtggctatgggggcgggacggaataatgcgcggagtccgaccgttgacggggtatcgccgccagagggcgccgtagcccaccctttggaggaactgcagaggctggcgcgtgctacgccggacccggcactcacccgtggaccgttgcaggtcctgaccggccttctccgcgcagggtcagacggagaccgcgccactcaccacatggcgctcgaggctccgggaaccgtgcgtggagaaagcctagacccgcctgtttcacagaaggggccagcgcgcacacgccacaggccaccccccgtgcgactgagcttcaaccccgtcaatgccgatgtacccgctacctggcgagacgccactaacgtgtactcgggtgctccctactatgtgtgtgtttacgaacgcggtggccgtcaggaagacgactggctgccgataccactgagcttcccagaagagcccgtgcccccgccaccgggcttagtgttcatggacgacttgttcattaacacgaagcagtgcgactttgtggacacgctagaggccgcctgtcgcacgcaaggctacacgttgagacagcgcgtgcctgtcgccattcctcgcgacgcggaaatcgcagacgcagttaaatcgcactttttagaggcgtgcctagtgttacgggggctggcttcggaggctagtgcctggataagagctgccacgtccccgccccttggccgccacgcctgctggatggacgtgttaggattatgggaaagccgcccccacactctaggtttggagttacgcggcgtaaactgtggcggcacggacggtgactggttagagattttaaaacagcccgatgtgcaaaagacagtcagcgggagtcttgtggcatgcgtgatcgtcacacccgcattggaagcctggcttgtgttacctgggggttttgctattaaaggccgctatagggcgtcgaaggaggatctggtgttcattcgaggccgctatggctag

SEQ ID NO: 13945 - DNA, 1365 bp, unidentified
  source 1..1365: mol_type = other DNA
  misc_feature 1..1365: note = Synthetic
atggatgcgcatgctatcaacgaaagatacgtaggtcctcgctgccaccgtttggcccacgtggtgctgcctaggacctttctgctgcatcacgccatacccctggagcccgagatcatcttttccacctacacccggttcagccggtcgccagggtcatcccgccggttggtggtgtgtgggaaacgtgtcctgccaggggaggaaaaccaacttgcgtcttcaccttctggcttggcgcttagcctgcctctgttttcccacgatgggaactttcatccatttgacatctcggtactgcgcatttcctgccctggttctaatcttagtcttactgtcagatttctctatctatctctggtggtggctatgggggcgggacggaataatgcgcggagtccgaccgttgacggggtatcgccgccagagggcgccgtagcccaccctttggaggaactgcagaggctggcgcgtgctacgccggacccggcacccacccgtggaccgttgcaggtcctgaccggccttctccgcgcagggtcagacggagaccgcgccactcaccacatggcgctcgaggctccgggaaccgtgcgtggagaaagcctagacccgcctgtttcacagaaggggccagcgcgcacacgccacaggccaccccccgtgcgactgagcttcaaccccgtcaatgccgatgtacccgctacctggcgagacgccactaacgtgtactcgggtgctccctactatgtgtgtgtatacgaacgcggtggccgtcaggaagacgactggctgccgataccactgagcttcccagaagagcccgtccccccgccaccgagcttagtgttcatggacgacttgttcattaacacgaagcagtgcgactttgtggacacgctagaggccgcctgtcgcacgcaaggctacacgttgagacagcgcgtgcctgtcgccattcctcgcgacgcggaaatcgcagacgcagttaaatcgcactttttagaggcgtgcctggtgttacgggggctggcttcggaggctagtgcctggataagagctgccacgtccccgccccttggccgccacgcctgctggatggacgtgttaggattatgggaaagccgcccccacactctaggtttggagttacgcggcgtaaactgtggcggcacggacggtgactggttagagattttaaaacagcccgatgtgcaaaagacagtcagcgggagtcttgtggcatgcgtgatcgtcacacccgcattggaagcctggcttgtgttacctgggggttttgctattaaaggccgctatagggcgtcgaaggaggatctggtgttcattcgaggccgctatggctag

SEQ ID NO: 13946 - DNA, 30 bp, unidentified; identical to SEQ ID NO: 6198
  source 1..30: mol_type = other DNA
  misc_feature 1..30: note = Synthetic

SEQ ID NO: 13947 - DNA, 30 bp, unidentified; identical to SEQ ID NO: 6198
  misc_feature 1..30: note = Synthetic
  source 1..30: mol_type = other DNA

SEQ ID NO: 13948 - DNA, 141 bp, unidentified; identical to SEQ ID NO: 6199
  misc_feature 1..141: note = Synthetic
  source 1..141: mol_type = other DNA

SEQ ID NO: 13949 - DNA, 1092 bp, unidentified
  source 1..1092: mol_type = other DNA
  misc_feature 1..1092: note = Synthetic
atgctaaccacaattaaagcaaagcaaaagccctatatatatgtgcgacgttgctacgttcatatctataataatattcgagatatgaacggaaccgcaacgaaaaagccaataagtggcaaaaacttcctgctaacgtataatgatccagaagatgtcattggaatgcacatagacctaactgagcacctaacaaacacatttgaagaagacctagactttattgcagttggacaagaaacagctccgaccactggaacaattcactatcatgttatattactattaaagaatagacttttcacaagaaataacgctgtgtttgactacaaatcaattcatccgaattatcaaactattagaaacaatattagaaagacatatttatacgtaattaaaggaggaaaatattcacaatcagacctaaaaagatttgaactagaggatgagaagaagggaagagaaagaagagagaagaacaaattgctgatgaatggagatatattaaaagcttatgaagaaggagaaattggaccaatagagttcataagagctcagaaaataagaagtataaagattcaaatcgaacccaccatgatcaaaagagatgctccactagtaatctggttctacggtaaaactggaacgggtaaaacaagaaaaacgatggaaatagctgaagaattgaacttgaaaacctggatgagcagcgacagcctgaaatggtttgacggctattgcaaccaagagcttgctataatagacgacctaagaaaggaaatcctccccaactgggcttttctactaagattattggacaggtatgctctaatagtgcaaatcaagggaggattcaccagatggaacccaaaaatcattattatcacgtcccccgtagaaccccacgagtgctttagctggtacaaccgccagggggagcaacaagcatgggatagtgaagagcagctcgaaagaaggctcacatgggaaggagctgtacaaatttatgaattccccctaagcttaggggaccaagaagctttagaagaaacaattgagatgtggaaagtcaaagaaggtagaagtaattaa

SEQ ID NO: 13950 - DNA, 57 bp, unidentified; identical to SEQ ID NO: 6203
  source 1..57: mol_type = other DNA
  misc_feature 1..57: note = Synthetic

SEQ ID NO: 13951 - DNA, 564 bp, unidentified
  source 1..564: mol_type = other DNA
  misc_feature 1..564: note = Synthetic
ctgttgcgggaagtgttcctcctgaggctatttcgcccgcctgtgtggaagatgtccaactttaaggtgagagaccccgtgatccaggagcgactggatcatgactacgctcaccatcccctggtggctcgcatgaataccctggatcagggaaatatgtcgcaggccgaatacctcgtgcaaaagagacactatctcgtgttcttaattgcccatcattattatgaggcctatctgaggaggatgggtggaattcaaaggcgggatcatctgcagacccttagggatcagaaaccgcgcgagcgcgctgaccgagtttccgcggcgtcggcttacgacgcggggacgttcaccgtgccttcgaggccaggccctgcatccggcaccacgcccgggggccaggactcactgggggtctcgggaagcagtataaccaccctgtcctctggtccccattcattgtcgccggcgtcagacattctcacaaccctctcatccacgacggaaacggccgcccccgcggtggccgacgcgaggaaacccccctctggcaaaaagaaatag

SEQ ID NO: 13952 - DNA, 564 bp, unidentified; identical to SEQ ID NO: 13951
  misc_feature 1..564: note = Synthetic
  source 1..564: mol_type = other DNA

SEQ ID NO: 13953 - DNA, 36 bp, unidentified; identical to SEQ ID NO: 6205
  misc_feature 1..36: note = Synthetic
  source 1..36: mol_type = other DNA

SEQ ID NO: 13954 - DNA, 36 bp, unidentified; identical to SEQ ID NO: 6205
  misc_feature 1..36: note = Synthetic
  source 1..36: mol_type = other DNA

SEQ ID NO: 13955 - DNA, 105 bp, unidentified; identical to SEQ ID NO: 6208
  source 1..105: mol_type = other DNA
  misc_feature 1..105: note = Synthetic

SEQ ID NO: 13956 - DNA, 30 bp, unidentified; identical to SEQ ID NO: 4481
  misc_feature 1..30: note = Synthetic
  source 1..30: mol_type = other DNA

SEQ ID NO: 13957 - DNA, 90 bp, unidentified; identical to SEQ ID NO: 6218
  source 1..90: mol_type = other DNA
  misc_feature 1..90: note = Synthetic

SEQ ID NO: 13958 - DNA, 156 bp, unidentified; identical to SEQ ID NO: 6219
  source 1..156: mol_type = other DNA
  misc_feature 1..156: note = Synthetic

SEQ ID NO: 13959 - DNA, 279 bp, unidentified
  source 1..279: mol_type = other DNA
  misc_feature 1..279: note = Synthetic
ctgttttctaaatcgaaatccgaggagtgcaatacagaagccggaacgatggaggtctcctgcttaaagtacggggtgcaaggtttgaatgcggattgcagctatgtcaaatcgcaatgcataaaactttcggaatgcgagtgtttatatacttttgcttctgatgtatgtaaggaagattttcataattccgaggaaatgaaggtgtttgttgtccaacattcgcaggaaatcgttggtggaacggatttttctgtacatgcggaggaaagcgtgtga

SEQ ID NO: 13960 - DNA, 2439 bp, unidentified
  misc_feature 1..2439: note = Synthetic
  source 1..2439: mol_type = other DNA
atggaaactcagccattgctgtcaacatcgccacgagtgccatcacatctcgtcctcagcgacgaggaaaaggagcagagcttaagcattccaccgcccagtcctgccaccacctctaccctagaagataaggaggtcgacgcatctcatgacatgcagaataaaaaagcgaaagagtctgagacagacatcgagcaagacccgggctatgtgacaccggtggaacacgaggaagagttgaaacgctttctagagagagaggatgaaaactgcccaaaacaacgagcagataactatcaccaagatgctggaaatagggatcagaacaccgactacctcatagggcttgacggggaagacgcgctccttaaacatctagcaagacagtcgctcatagtcaaggatgcattattggacagaactgaagtgcccatcagtgtggaagagctcagccgcgcctacgagcttaacctcttttcacctcgtactccccccaaacgtcagccaaacggcacctgcgagccaaatcctcgcttaaacttttatccagcttttgctgtgccagaagtactggctacctatcacatcttttttaaaaatcaaaaaattccagtctcctgccgcgctaatcgcacccgcgccgatgccctactcaatctgggacctggttcacgcttacctgatatagcttccttggaagaggttccaaagatcttcgagggtctgggcaataatgagactcgggccgcaaatgctctgcaaaagggagaaaatggcatggatgagcatcacagcgttctggtggaattggaaggcgataatgccagactcgcagtactcaagcgaagcatcgaggtcacacacttcgcatatcccgctgtcaacctgccccctaaagtcatgacggcggtcatggaccagttactcattaagcgcgcaagtcccctttcagaagacatgcatgacccagatgcctgtgatgagggtaaaccagtggtcagtgatgagcagctaacccgatggctgggcaccgactctcccagggatttggaagagcgtcgcaagcttatgatggccgtggtgctggttaccgtagaactagagtgtctccgacgtttctttaccgattcagaaaccttgcgcaaactcgaagagaatctgcactacacttttagacacggctttgtgcggcaggcatgcaagatatctaacgtggaactcaccaacctggtttcctacatgggtattctgcatgagaatcgcctaggacaaagcgtgctgcacagcaccctgaagggggaagcccgccgtgattacatccgcgattgtgtctatctgtacctgtgccacacgtggcaaaccggcatgggtgtatggcagcaatgtttagaagaacagaacttgaaagagcttgacaagctcttacagaaatctcttaaggttctgtggacagggttcgacgagcgcaccgtcgcttccgacctggcagacctcatcttcccagagcgtctcagggttactttgcgaaacggattgcctgactttatgagccagagcatgcttaacaattttcgctctttcatcctggaacgctccggtatcctgcccgccacctgctgcgcactgccctccgactttgtgcctctcacctaccgcgagtgccccccgccgctatggagtcactgctacctgttccgtctggccaactatctctcctaccactcggatgtgatcgaggatgtgagcggagacggcttgctggagtgtcactgccgctgcaatctgtgcacgccccaccggtccctagcttgcaacccccagttgatgagcgaaacccagataataggcacctttgaattgcaaggccccagcagccaaggcgatgggtcttctcctgggcaaagtttaaaactgaccccgggactgtggacctccgcctacttgcgcaagtttgctccggaagattaccacccctatgaaatcaagttctatgaggaccaatcacagcctccaaaggccgaactttcggcctgcgtcatcacccagggggcaattctggcccaattgcaagccatccaaaaatcccgccaagaatttctactgaaaaagggtaagggggtctaccttgacccccagaccggcgaggaactcaacacaaggttccctcaggatgtcccaacgacgagaaaacaagaagttgaaggtgcagccgccgcccccagaagatatggaggaagattgggacagtcaggcagaggaggcggaggaggacagtctggaggacagtctggaggaagacagtttggaggaggaaaacgaggaggcagaggaggtggaagaagtaaccgccgacaaacagttatcctcggctgcggagacaagcaacagcgctaccatctccgctccgagtcgaggaacccggcggcgtcccagcagtag

SEQ ID NO: 13961 - DNA, 3417 bp, unidentified
  misc_feature 1..3417: note = Synthetic
  source 1..3417: mol_type = other DNA
ttggccaatcgtgtctccatggcgctaaagggaccacaaaccctcgaggaaaatattgggtctgcggcccccactggtccctgcgggtacctctatgcctatctgacacacaacttccccataggggaagcctccctgctgggcaatggctacccggaggcaaaagtattttcactacctcttttgcacgggctcacagtggaatccgatttccccttaaacgtaaaggcggtgcacaagaaaatcgatgcaaccacagcttctgtgaaattaacttcataccacagggaggccatcgtctttcataatactcacttatttcagccaatctttcaaggaaagggactggaaaagttatgtcgagagagccgagagctgtttggattttcaacgtttgttgagcaacaacacaaagggacgctctggagcccagaggcatgccctcagctaccctgcgcgaatgagatttttatggcggtcatagttacagagggattcaaggagagactgtacggcggcaaactggtgcccgtgccctctcagacaacgcccgtacacattggggaacaccaggcgttcaagatacccttgtatgacgaggatctgtttggtccaagtcgcgcccaagaactatgtaggttttacaaccccgatatcagtagatacctacatgactccatattcactggaatagcacaggctctaagggtaaaggacgttagcacggtcatccaagcctcagaaaggcaatttgtgcacgaccaatacaagataccaaagctggtccaagccaaggacttcccccagtgtgcttccaggggaaccgacgggtctaccctaatggtgatagacagtctggtggctgaacttggtatgagttatggtctgtcctttattgagggaccccaggatagctgcgaggttctaaattatgacacgtggcccatctttgaaaactgcgagacgccagatgcccgccttcgtgcactagaagtttggcacgcagagcaggccttgcatattggcgcccagctgtttgcggccaactctgtgctctacctgaccagagtggcaaagctgcctcagaagaatcagagaggagacgccaacatgtacaactcattctacctacagcatggcctgggatacctctcagaggcaacagtaaaggaaaatggagcctctgccttcaagggcgtgccagtgtctgcactggatgggtcatcttacaccctccagcacctggcctacgcgtcctctttctccccacatctcctggcaaggatgtgttactatctgcagttcttgccccaccataaaaacaccaacagtcagtcatacaatgtggtggactacgtgggcaccgcggcacctagtcaaatgtgtgacctgtgtcaggggcaatgtccagctgtatgcatcaacacgctgttttacaggatgaaggacaggttcccacctgttctgtcaaacgttaagagagacccatatgtgatcacgggcacagcgggaacgtacaatgacctagagattctcggaaactttgccaccttcagggagagagaggaggaggggaatcctgtggaagatgctccaaagtatacatattggcaactatgccagaatataaccgagaagctagcgtccatgggcatctcggagggcggcgatgccctaagaaccctcattgtggacatccccagcttcgtcaaagtgttcaaggggatagacagcacggtagaggcagagctcctaaagtttattaactgcatgatcaaaaacaattacaacttcagagagaacatcaaatccgtccatcacatccttcagtttgcatgcaacgtatactggcaggcgccgtgcccggtttttctgaccctttactacaagtcactgctgacggtcatacaggacatatgtctgacgtcatgtatgatgtacgagcaggacaacccggccgtgggaattgtaccatccgagtggcttaaaatgcactttcagacaatgtggaccaacttcaagggtgcctgcttcgacaaaggagcaatcacgggcggggaactaaaaatagtccaccagtccatgttctgtgacctctttgacaccgacgctgccataggagggatgtttgcacccgctcggatgcaggtcaggatagccagagcaatgctcatggttccaaaaaccataaaaataaaaaacaggatcatcttttccaactccaccggagcagagtcgatccaggcaggttttatgaagccggccagccaaagggattcatacatcgtcggaggaccctacatgaaattcctaaacgccctgcacaaaacactttttccttccacaaaaacttctgccctgtacttgtggcataagattggccagaccacaaaaaatcccatactaccaggtgtctcgggggaacacctaacggagttatgtaattatgtaaaggcaagtagccaggctttcgaagagataaatgttttggaccttgtgccagacaccctgacctcatatgcgaaaataaaactaaacagttccattctccgggcttgcggacagacacagttttatgcaactactctctcttgcctttcgccagtcactcagctggttccggccgaggagtacccccacgtactggggccagtggggttgtcatctccagatgaatacagggcaaaagtcgccggcaggtctgtaaccattgtacagtcaacactgaagcaagctgtttccaccaacggacgactccggcctatcattaccgtgccactggtggtcaacaaatatacagggagcaacgggaacacaaacgtctttcactgtgcaaacctgggatacttctcggggagaggggtggacagaaatctcaggccagaaagcgtcccctttaaaaagaataatgtcagctctatgctaagaaaacgccacgtgattatgacccccctggtagacaggctggtaaagagaatagttggcatcaactctggggaattcgaggcagaagcggttaagagaagtgtgcagaatgtcctggaagacagagataacccaaacctgccgaagacagttgtattagagttggttaagcacctagggagctcctgtgcaagtctcacagaggaggacgtgatttactacctgggcccttatgccgtacttggggacgaggtcctgtcattactgagcacagtgggccaggcgggggtgccatggacggccgagggtgtggcctcggtcatccaggacataatagatgattgcgagttacagtttgtgggcccagaagagccttgccttatccaaggacagtcggtagtggaggagctttttccgtccccgggcgtcccaagcctgacagtgggtaaaaaacgaaaaatcgcatccctgctctctgacctggatttgtag

SEQ ID NO: 13962 - DNA, 3417 bp, unidentified
  misc_feature 1..3417: note = Synthetic
  source 1..3417: mol_type = other DNA
ttggccaatcgtgtctccatggcgctaaagggaccacaaaccctcgaggaaaatattgggtctgcggcccccactggtccctgcgggtacctctatgcctatgtgacacacaacttccccataggggaagcctccctgctgggcaatggctacccggaggcaaaagtattttcactacctcttttgcacgggctcacagtggaatccgatttccccttaaatgtaaaggcggtgcacaagaaaatcgatgcaaccacagcttctgtgaaattaacttcataccacagggaggccatcgtctttcataatactcacttatttcagccaatctttcaaggaaagggactggaaaagttatgtcgagagagccgagagctgtttggattttcaacgtttgttgagcaacaacacaaagggacgctctggagcccagaggcatgccctcagctaccctgcgcgaatgagatttttatggcggtcatagttacagagggattcaaggagagactgtacggcggcaaactggtgcccgtgccctctcagacaacgcccgtacacattggggaacaccaggcgttcaagatacccttgtatgacgaggatctgtttggtccaagtcgcgcccaagaactatgtaggttttacaaccccgatatcagtagatacctacatgactccatattcactggaatagcacaggctctaagggtaaaggacgttagcacggtcatccaagcctcagaaaggcaatttgtgcacgaccaatacaagataccaaagctggtccaagccaaggacttcccccagtgtgcttccaggggaaccgacgggtctaccctaatggtgatagacagtctggtggctgaacttggtatgagttatggtctgtcctttattgagggaccccaggatagctgcgaggttctaaattatgacacgtggcccatctttgaaaactgcgagacgccagatgcccgccttcgtgcactagaagtttggcacgcagagcaggccttgcatattggcgcccagctgtttgcggccaactctgtgctctacctgaccagagtggcaaagctgcctcagaagaatcagagaggagacgccaacatgtacaactcattctacctacagcatggcctgggatacctctcagaggcaactgtaaaggaaaatggagcctctgccttcaagggcgtgccagtgtctgcactggatgggtcatcttacaccctccagcacctggcctacgcgtcctctttctccccacatctcctggcaaggatgtgttactatctgcagttcttgccccaccataaaaacaccaacagtcagtcatacaatgtggtggactacgtgggcaccgcggcacctagtcaaatgtgtgacctgtgtcaggggcaatgtccagctgtatgcatcaacacgctgttttacaggatgaaggacaggttcccacctgttctgtcaaacgttaagagagacccatatgtgatcacgggcacagcgggaacgtacaatgacctagagattctcggaaactttgccaccttcagggagagagaggaggaggggaatcctgtggaagatgctccaaagtatacatattggcaactatgccagaatataaccgagaagctagcgtccatgggcatctcggagggcggcgatgccctaagaaccctcattgtggacatccccagcttcgtcaaagtgttcaaggggatagacagcacggtagaggcagagctcctaaagtttattaactgcatgatcaaaaacaattacaacttcagagagaacatcaaatccgtccatcacatccttcagtttgcatgcaacgtatactggcaggcgccgtgcccggtttttctgaccctttactacaagtcactgctgacggtcatacaggacatatgtctgacgtcatgtatgatgtacgagcaggacaacccggccgtgggaattgtaccatccgagtggcttaaaatgcactttcagacaatgtggaccaacttcaagggtgcctgcttcgacaaaggagcaatcacgggcggggaactaaaaatagtccaccagtccatgttctgtgacctctttgacaccgacgctgccataggagggatgtttgcacccgctcggatgcaggtcaggatagccagagcaatgctcatggttccaaaaaccataaaaataaaaaacaggatcatcttttccaactccaccggagcagagtcgatccaggcaggttttatgaagccggccagccaaagggattcatacatcgtcggaggaccctacatgaaattcctaaacgccctgcacaaaacactttttccttccacaaaaacttctgccctgtacttgtggcataagattggccagaccacaaaaaatcccatactaccaggtgtctcgggggaacacctaacggagttatgtaattatgtaaaggcaagtagccaggctttcgaagagataaatgttttggaccttgtgccagacaccctgacctcatatgcgaaaataaaactaaacagttccattctccgggcttgcggacagacacagttttatgcaactactctctcttgcctttcgccagtgactcagctggttccggccgaggagtacccccacgtactggggccagtggggttgtcatctccagatgaatacagggtaaaagtcgccggcaggtctgtaaccattgtacagtcaacactgaagcaagctgtttccaccaacggacgactccggcctatcattaccgtgccactggtggtcaacaaatatacagggagcaacgggaacacaaacgtctttcactgtgcaaacctgggatacttctcggggagaggggtggacagaaatctcaggccagaaagcgtcccctttaaaaagaataatgtcagctctatgctaagaaaacgccacgtgattatgacccccctggtagacaggctggtaaagagaatagttggcatcaactctggggaattcgaggcagaagcggttaagagaagtgtgcagaatgtcctggaagacagagataacccaaacctgccgaagacagttgtattagagttggttaagcacctagggagctcctgtgcaagtctcacagaggaggacgtgatttactacctgggcccttatgccgtacttggggacgaggtcctgtcattactgagcacagtgggccaggcgggggtgccatggacggccgagggtgtggcctcggtcatccaggacataatagatgattgcgagttacagtttgtgggcccagaagagccttgccttatccaaggacagtcggtagtggaggagctttttccgtccccgggcgtcccaagcctgacagtgggtaaaaaacgaaaaatcgcatccctgctctctgacctggatttgtag

SEQ ID NO: 13963 - DNA, 1377 bp, unidentified
  misc_feature 1..1377: note = Synthetic
  source 1..1377: mol_type = other DNA
acgcgtcggaggccatttatggggatcaaaaacttaaaggcgttgctgctcagccacggcgcgctgaccccgcacgagcctggcggcgacgagcgcttccccgccgtgtttgtggacggcttcagcgtcatgatgaccatggcgtactcgtgcgcggacgaagacgagttccgtgcggccgtcgaggagcgcgtgcagcactggatgagcgtgtccgagagcgggcggatcgcggtcttcatcgaccgcggcgagattccgatcaagcagccgctgcgcgaccagcgccgcaaagccacgcgcgaccgcgccgcgcgccaccgcgagttcatcgccgctgcggaggcagacgcggcggcagaggcggtcggcgcccgcgaggacaagcaggaggacgagcacgcggagttcgccgaggagatccgcgctgagaagcagctaaggctgcagcgcatccgcttccagctcagcatcgccaaccacgaggtcgttaagtcgctgatagagtccacgctcgcgcgcgctggcgacgccgtggagatcgtcttctgcgacggcgtcgacgcggagatggtcatgtgtgtgcgtggacgcgccgaggccgcgcgttgcgggcgctggccgctgcttgtgaccacggaccaggacgcgcttttgttcacgtccaccgatcgcgacgaaaagatagtgagcaccgtctccgcctgctacgcgttcaggcccaccgagaccaccgagtacctgtgcaaacttgcggcgctggccaacggatgcgacttcttccccgggctcggcggcatatgcgtgagtgtggagtcgctgcgccgcgccacgcttttcccagaattctccgtgcgcaacgccgccgtgagtctgtgcacgcggcccatgcggctgtccacgcaggacgcgctggagccagaggccgccgccgaggtcgtagaattcatcaggcggtacgcctccggcgacgagggcatctaccgcgcggcgccgcccagcgcgtgctgcggacgcgcgtttgtgcgcggagcgctcgcggccgagtgggccgacgcgctgccggcggccacgggtctgggcgtggtcgcggacatgatcgcgtgtctgcccgcgcggcgagaccccgcgcccgaggaggtagagcggctgctggcgctggaggcgcgcgcgcgcggcgcgcgcgtcacggacgcgatgctcgcgcagactgcgcagctgctgggctacggcgcgagtgcgggtgctgacggcacttccgccttcgcagtctcgggcaccaagggcctaatgtgccgcttgcgcggcacggccatgttcttcaacgcggagtacgtggaaattgaaagcgaacccagactgttaaagctgcggtag

SEQ ID NO: 13964 - DNA, 135 bp, unidentified
  misc_feature 1..135: note = Synthetic
  source 1..135: mol_type = other DNA
atacattatacacagatgcgtattgtgttgagtataaggaaagtgaggaagatagacaacagtgcagcagtagtagttttcctgcgagtttaccgcacatgctcagagaactcagggccgcgttcggaaaggtaa

SEQ ID NO: 13965 - DNA, 252 bp, unidentified
  misc_feature 1..252: note = Synthetic
  source 1..252: mol_type = other DNA
atgaatctacggctgttgtactggagacctgtcgtgcaatggcaggtgcgcaactgcgataacatctgctatatctgtcgccgcgggctgggaaagggctgcttgcgaccccagtgcgagatcgactgcgccttctgcctgcccgtgtgcgggcacggctaccacgagcactgcctgccgcctcggacggaggtctgctttgtctgcaggcagaagctcattttttactccttcaatatacgcaaaggatga

SEQ ID NO: 13966 - DNA, 2547 bp, unidentified
  misc_feature 1..2547: note = Synthetic
  source 1..2547: mol_type = other DNA
acgtccaggtgtaccatggagacgacataccgccgcgaggcgctgacagtaagggttattttttgtacgagtggcgacagcgccgagacgatcgccgacgtccttacgggggccccaacgtcagcgtccttcttttctgtactccacgaccttttttattcccagatactcgcccccagggtaaccctaaaattgtgcctccccgcacggcgtcctggcaacggcacaaggtgttcgcccgtgttggtcctacgtactgacgcatcagtggcctcggggttccttggcggccggccactggaggcgtccgacattaaatatatgctgctcagcgaccagaccgcggggttgttcaagccgctgttggagataatcggtggcgcgcgcgcaccaccaaatcaggacgcgtgcactttccagagccaggtggcctggctcagaacgaaatttgttaccgcattgagaaaactttacaagatgactccctcaccctactggatgctgtctgcatttggcgctcaggaagcccagttcgtcctgaccagctcattctatttttttgaacacactgtggtctgtaccacagagacagtttctcacctgtctagactgttttcgcctcaacagggacagacgctggtttccgttaccagccacgaggagctggggcagctatacggcacttcccctttcaggcggcgcgtccccgcgttcgtcgcttatgtaaaagagaaattagcgagagacagtctggagacggaggccatcgaccgcaccatagaccagatcaggggcaaactcatgctgtctaaccaggacctggtccatttcatatatatctccttttatcagtgcctcaacaaacgggcgttcctgcgctactctagacagacgtcctcttcaagtgctctaagggagctgggggaagaccctcaattgtgtggcgccctacacggggagtttcgtgaccacgtccagtcctactaccacaaaaaaacctacctatccacttacatagacattcggtacgtgggtggcgtattaccagacggctattttggcgggagtcttgtaggcgagcggtgcgtttattggtgcgggcagtcaaaggacacggccagcctgttggccaccattagccaacaggtgccgcacctgaggttgcaaaacgagttcgctggcatgctagacgtggccgcactgcgaggttccgatgacggtcagtttaaagagggccttttctcccacagtcaagccctacccctgtacaggtgcgagtttctgggcaagcagtttttcacaatgcttcaggaagacggcctagagcgatactgggagcaaagtgtgatatttccaggcgaccaggactgggatatgttatctgacaaagacctcacctaccgaattttttaccatgacctcagcctatcgctgccaacactgaaggaacagctccttgtttcaagacacgaatacttcaaccctcgcttgccagtgtatagatgggtattagactttgacctgcccgtctgccgcgacattgacaggacattcgaggaggtgcactctctctgttgttccctgcgtgaggccatactcgacatcattcaactccttggaccagtggatcctcgaacacacccagtatattttttcaaatcagcctgtccaccggacgagtggcgcggcgaagacgtcgccagcaccagcttctgtcggtgtcatgacaaactgggtatgcgtattatcgtcccgttcccagaaggagtatgcgtcgttgggtcggagcccatggtggcactcactggcattctaaacaggacgataaagcttgatccggagctggtccacagattcccgtcaatacaaaaaaaggggggccctttcgactgtggcatatacggccgaggacgaagcgtccggcttccccactgttacaaggtgggcttagtgggggaactctgccgcctactgaagatactagtctgtcaccccgcccccaacggcaaggcgcagtacgtgcggcgcgcctttacgcttcgcgaactgctccatcactccccgggccacagcgccggtcatgtcggccgaatcatctatagcatcatggatcgcaatgagaattttttagaaaacaagaccattagctatctgccggccaaaatacctcacatctttcagcggatagagaccctatccggtcgttcaatagaggactggctacactcggccgtttgggataaagcatacgacactatatgtaaatttttcccagatgaaaaagcacaacagttttctcacgttgcatttacgcaacaaggggaaaacatcatccagttaagaccccgtcagggaagacacttcctctgcatcaaccataatcataaaaacaagtcaaaaacagtccgtgtattccttacccttcattccattagggtgagcgaagtcacggtaacacttatgagtcagtgttttgccagcaagtgtaacaataatgttcccacggcccatttttcgtttgtggtaccagtgggactggccagttaa

SEQ ID NO: 13967 - DNA, 2547 bp, unidentified
  misc_feature 1..2547: note = Synthetic
  source 1..2547: mol_type = other DNA
acgtccaggtgtaccatggagacgacataccgccgcgaggcgctgacagtaagggttattttttgtacgagtggcgacagcgccgagacgatcgccgacgtccttacgggggccccaacgtcagcgtccttcttttctgtactccacgaccttttttattcccagatactcgcccccagggtaaccctaaaattgtgcctccccgcacggcgtcctggcaacggcacaaggtgttcgcccgtgttggtcctacgtactgacgcatcagtggcctcggggttccttggcggccggccactggaggcgtccgacattaaatatatgctgctcagcgaccagaccgcggggttattcaagccgctgttggagataatcggtggcgcgcgcgcaccagcaaatcaggacgcgtgcactttccagagccaggtggcctggctcagaacgaaatttgttaccgcattgagaaaactttacaagatgactccctcaccctactggatgctgtctgcatttggcgctcaggaagcccagttcgtcctgaccagctcattctatttttttgaacacactgtggtctgtaccacagagacagtttctcacctgtctagactgttttcgcctcaacagggacagacgctggtttccgttaccagccacgaggagctggggcagctatacggcacttcccctttcaggcggcgcgtccccgcgttcgtcgcttatgtaaaagagaaattagcgagagacagtctggagacggaggccatcgaccgcaccatagaccagatcaggggcaaactcatgctgtctaaccaggacctggtccatttcatatatatctccttttatcagtgcctcaacaaacgggcgttcctgcgctactctagacagacgtcctcttcaagtgctataagggagctgggggaaaaccctcaattgtgtggcgccctacacggggagtttcgtgaccacgtccagtcctactaccacaaaaaaacctacctatccacttacatagacattcggtacgtgggtggcgtattaccagacggctattttggcgggagtcttgtaggcgagcggtgcgtttattggtgcgggcagtcaaaggatacggccagcctgttggccaccattagccaacaggtgccgcacctgaggttgcaaaacgagttcgctggcatgctagacgtggccgcactgcgaggttccgatgacggtcagtttaaagagggccttttctcccacagtcaagccctacccctgtacaggtgcgagtttctgggcaagcagtttttcacaatgcttcaggaagacggcctagagcgatactgggagcaaagtgtgatatttccaggcgaccaggactgggatatgttatctgacaaagacctcacctaccgaattttttaccatgacctcagcctatcgctgccaacactgaaggaacagctccttgtttcaagacacgaatacttcaaccctcgcttgccagtgtatagatgggtattagactttgacctgcccgtctgccgcgacattgacaggacattcgaggaggtgcactctctctgttgttccctgcgtgaggccatactcgacatcattcaactccttggaccagtggatcctcgaacacacccagtatattttttcaaatcagcctgtccaccggacgagtggcgcggcgaagacgtcgccagcaccagcttctgtcggtgtcatgacaaactgggtatgcgtattatcgtcccgttcccagaaggagtatgcgtcgttgggtcggagcccatggtggcactcactggcattctaaacaggacgataaagcttgatccggagctggtccacagattcccgtcaatacaaaaaaaggggggccctttcgactgtggcatatacggccgaggacgaagcgtccggcttccccactgttacaaggtgggcttagtgggggaactctgccgcctactgaagatactagtctgtcaccccgcccccaacggcaaggcgcagtacgtgcggcgcgcctttacgcttcgcgaactgctccatcactccccgggccacagcgccggtcatgtcggccgaatcatctatagcatcatggatcgcaatgagaattttttagaaaacaagaccattagctatctgccggccaaaatacctcacatctttcagcggatagagaccctatccggtcgttcaatagaggactggctacactcggccgtttgggataaagcatacgacactatatgtaaatttttcccagatgaaaaagcacaacagttttctcacgttgcatttacgcaacaaggggaaaacatcatccagttaagaccccgtcagggaagacacttcctctgcatcaaccataatcataaaaacaagtcaaaaacagtccgtgtattccttacccttcattccattagggtgagcgaagtcacggtaacacttatgagtcagtgttttgccagcaagtgtaacaataatgttcccacggcccatttttcgtttgtggtaccagtgggactggccagttaa

SEQ ID NO: 13968 - DNA, 735 bp, unidentified
  misc_feature 1..735: note = Synthetic
  source 1..735: mol_type = other DNA
atggcttctcttctcggggctatatgtggctggggagcgcgccccgaggaacaatatgagatgatccgcgcggccgttccgccctcggaggcggagccgcggctgcaggaggccctggcggtcgttaacgcgctacttcccgcccccatcacgctcgatgacgccctggggtccctggacgacacccgacgcctcgtgaaggcccgcgccttggcccgcacgtaccacgcctgcatggtgaacctagaacgactggcgcgccaccaccccgggctcgaggcccccacgatcgacggggccgtggcggcccatcaggacaagatgcggcgcctggcggacacgtgtatggccaccatcctgcagatgtacatgtccgtgggggcggctgacaagtccgcggatgtgctcgtctcccaggctattcggagcatggccgagagtgacgtggtcatggaggatgtggccatcgccgaacgggcccttggcctctccgccttcggggttgccgggggaacccggtcgggggggattggggtgaccgaggcgccctccttggggcacccccacacgccgcccccggaggttacgctggcgcctgccgcccgaaacggcgacgccctcccggaccccaaaccggaatcgtgtccccgcgtgtccgttcccagacctacagcctccccaaccgcacctcgccctggcccatctcgagcagctccgtgtgttttgggtcaataa

SEQ ID NO: 13969 - DNA, 45 bp, unidentified; identical to SEQ ID NO: 6248
  source 1..45: mol_type = other DNA
  misc_feature 1..45: note = Synthetic

SEQ ID NO: 13970 - DNA, 21 bp, unidentified
  source 1..21: mol_type = other DNA
  misc_feature 1..21: note = Synthetic
ttgcatcccttgctactgtag

SEQ ID NO: 13971 - DNA, 225 bp, unidentified
  misc_feature 1..225: note = Synthetic
  source 1..225: mol_type = other DNA
acggattcccaagaggcagaccgagcaattatctcggatttaaaacgccagtggtccggcctctcactccattgcgcctgggtttcgggactgatgatctttgttggtgcactggtcatctgctttctgcggtcgcaacgaatcggggaacaggacgctgaacagctgcggacggacctggatacggaacctctgttgttgacggtggacggagatttggaataa

SEQ ID NO: 13972 - DNA, 39 bp, unidentified; identical to SEQ ID NO: 6253
  misc_feature 1..39: note = Synthetic
  source 1..39: mol_type = other DNA

SEQ ID NO: 13973 - DNA, 186 bp, unidentified
  source 1..186: mol_type = other DNA
  misc_feature 1..186: note = Synthetic
atgggatttctcctatctatctgcaaacgtccctcacagcccgtagacgtggacggggaaccgctcgacgtagtcgtggactatgaccccattcgcgtttcagaaaagggcatgttgcttgagcaatcgcaatccccatatcccgcattaaaaaagaagaaaaaaaataaagaagcaatttattaa

SEQ ID NO: 13974 - DNA, 186 bp, unidentified; identical to SEQ ID NO: 13973
  source 1..186: mol_type = other DNA
  misc_feature 1..186: note = Synthetic

SEQ ID NO: 13975 - DNA, 69 bp, unidentified
  misc_feature 1..69: note = Synthetic
  source 1..69: mol_type = other DNA
atgaccccattcgcgtttcagaaaagggcatgttgcttgagcaatcgcaatccccatatcccgcattaa

SEQ ID NO: 13976 - DNA, 69 bp, unidentified; identical to SEQ ID NO: 13975
  misc_feature 1..69: note = Synthetic
  source 1..69: mol_type = other DNA

SEQ ID NO: 13977 - DNA, 6999 bp, unidentified
  misc_feature 1..6999: note = Synthetic
  source 1..6999: mol_type = other DNA
atgaacacaactaactgttttatcgctttggtgtacgctatcagagagatcagaacgcttttcctttcacgagctacaggaaagatggaattcacgctgtacaacggtgaaaagaagaccttttactccaggcccaacaaccacgacaactgttggttgaacaccatccttcagttgttcaggtacgtcgatgagcctttcttcgactgggtctacaactcaccccagaacctcacgcttgaagccatcaaacagctggaagaactcacagggcttgagttacacgaaggcggaccgcctgccgctgttgtttggaacatcaaacacttgcttcaaaccggtattggtaccgcctcgcgacctagcgaggtgtgtgtggtggacggtacgaacatgtgtctggctgatttccatgcaggcatcttcctgaaaggacaggaacatgccgtgtttgcttgtgtcacctccaacgggtggtacgcgattgacgatgaggacttctacccatggacgccggacccgtccgacgttctggtgttcgttccatatgatcaagaaccactcaacggagaatggaaaatcaacgttcagcggaagctcaagggagctggacaatccagtccggcgaccggctcgcagaaccaatctggcaatactggcagcataatcaacaactactacatgcaacagtaccagaactccatggacacacaacttggtgacaacgccatcagcggaggctccaacgagggctccacagacacaacttccaatcacacaaccaacactcagaacaacgactggttttccaagctcgcaggttctgccttcagcggtctttttggcgcccttcttgctgacaaaaagacagaggaaaccactctcctcgaggaccgcatcctcactacccgcaacggacacacgacctcaacaacacagtcgagtgtcggagtcacgtacgggtatgcaacagctgaggactttgtgagtgggccaaacacttctggtcttgaaaccagagttgtccaggcagaacgcttcttcaaaacccacctcttcgattgggtcaccagtgacccattcggacgctgccacctgttggaactcccaactgaccacaaaggtgtctacggaagtctgaccgactcgtacgcatatatgagaaacggttgggacgttgaagtcaccgcggttggcaaccagttcaacggagggtgtctgttggtggcgatggtgccagagctttgttccatccagaagagggagctgtaccagctcacgctcttcccccatcagttcatcaacccacgcacaaacatgactgcgcacatcactgtgcctttcgttggcgtcaatcgctacgaccagtacaaggtgcacaaaccttggaccctcgtggttatggtcgtagcccccctgactgtcaacactgaaggcgctccacagatcaaggtgtacgccaacattgccccaaccaacgtgtacgtagcgggcgagtttccttccaaagagggaattttccccgtagcttgcagtgacggctatggtggcctggtgaccacggacccgaagacggctgaccccgtttacgggaaagtgtttaaccccccacgcaacctgctgcctgggcgttttaccaatctccttgatgtggctgaggcatgcccgacgtttctgcacttcgagggtgacgtgccatacgtgaccacgaaaacagattcagacagggtgcttgcccagtttgacgtgtccttagcagcaaagcacatgtcgaacacctttcttgcaggtctcgcgcagtactatgcacagtacagtggcaccatcaacctgcacttcatgtttacaggacccactgacgcgaaagcgcgttacatggttgcttacgccccaccgggcatggagccgccccggacgcctgaggcggctgcacactgcattcatgctgagtgggacactgggctaaactcaaagttcactttctccatcccctatctttcggctgctgactacgcatacaccgcgtcagacgtggctgaaaccacgaacgtgcaaggatgggtctgcttgtttcaaatcacgcacggcaaagccgacggcgacgctttggtcgtgttggctagcgctggcaaggactttgagctgaggctgccggtcgacgcccgcagagaaactacctctgcgggtgaatcagcagatcccgtgactaccactgttgagaactacggtggtgagacacaggtccagaggcgccaacacacagacgtctcgttcatcatggacagattcgtgaaagtgacaccgcaagatcaaatcaacgttttggaccttatgcagatccctgcccacacgctggtgggagcgctcctgcgcgcgtccacttactacttctctgacctggagatagcagtaaagcacgagggagacctcacttgggtcccgaacggggcgcctgaagcagcgctggagaacaccaccaacccaacagcttaccacaaggcaccactcactcggctcgccctgccttacacggcaccacaccgcgtgttggcaaccgtgtataatggagtgtgcaagtacagtaaaactgctgtgcccaacgtgagaggtgacacccaggtgttggatcagaaggcgtcgcgggcgctacccacctccttcaactacggtgccatcaaagcaacccgagttaacgagctactttatcggatgaagagggctgagacatactgtcccaggcccttgctggctatccatccagccgaagccagacacaaacagaaaattgtggcacctgtgaaacagactttgaactttgaccttctcaagttggctggagacgtggagtccaaccctgggcccttcttcttctccgacgtcaggtcaaatttctccaaattggtagaaaccatcaaccagatgcaggaggacatctcgacaaaacacgggcctgactttaaccggttggtgtctgcgtttgaggaattggctactggagtgaaagcaatcaggaccggtctcgacgaggccaaaccctggtacaagcttattaagctcctaagccgcctgtcgtgtatggccgctgtggcagcacggtccaaggacccagtccttgtggccatcatgctggccgacaccggtctcgagattctggacagcacctttgtcgtgaagaaaatttccgattcgctctccagtctctttcacgtgccggcccccgtcttcagtttcggagccccgatcctgttggccgggttggtcaaggtcgcctcgagtttcttccggtccacacccgaagaccttgagagagcagagaaacagctcaaagcacgtgacattaacgacattttcgccgttctcaagaacggcgagtggctggtcaagttgatccttgccatccgcgactggattaaggcatggatcgcctcagaggagaagttcgtcaccatgacagacctggtgcctggtatccttgaaaagcagcgggacctcaacgacccaagcaagtacaaggaagccaaggagtggctcgacaacgcgcgccaagcgtgtttgaagaacgggaacgtccacatcgctaacctgtgcaaagtggtcgccccagcacccagcgagtcgagacccgaacccgtggtcgtttgcctccgtggcaagtccggccagggcaagagtttccttgcgaacgtgctcgcgcaagcaatctccactcactttactggtagaaccaattccgtttggtactgcccacctgaccctgaccacttcgacggctacaaccagcagaccgttgtagtgatggatgacctgggtcagaaccccgatggcaaggacttcaagtacttcgcccaaatggtttcaaccacggggttcatcccgcccatggcgtcactcgaggacaaaggcaaacctttcaacagcaaggtcatcatcgcaaccaccaacctgtactcgggttttaccccgaagactatggtgtgccctgatgcgctgaaccggaggttccactttgacatcgacgtgagcgccaaggacgggtacaaaattaacaacaaactggacatcgtcaaagcacttgaagacactcacaccaacccggtagcaatgtttcagtacgactgtgcccttctcaacggcacggccgttgaaatgaagagaatgcagcaggacttgttcaagcctcaaccacccctccagaacgtgtaccagctcgttcaggaggtgattgaacgggtcgagctccacgagaaagtgtcgagccacccgattttcaagcagatctcaattccttcccaaaaatccgtgttgtacttcctcattgagaaaggtcaacacgaggcggcaattgaattctttgagggcatggtgcacgactccatcaaggaggagctccgacccctcatccaacgaacctcatttgtgaaacgcgcttttaagcgtctgaaggaaaactttgagactgttgccctgtgcttgaccctcttggccaacatagtgatcatgatccgtgaaacccacaagaggcagaagatggtggatggctcggtgaatgagcacatcgagaaggcaaacaacaccgcagacgatgaaactcttgacgaggcgggaaagaaccctctggaaaccagtggtgccagcaccgttggcttcagagagagaactctcacggaccgaaaggcgcgtgatgacgtgggcttcgagcccgcatatcctgctgaagagtacccacaagctgaaggaccctacgccgggccactcgagcgtcagagacctctgaaagtgagagccaagctcccacaacaggagggaccctacgctggtccgatggagagacagaaaccactgaaagtgaaagtgaaaaacccggtcattaaggaaggaccctacgaaggaccggtgaagaagcctgtcgctttgaaagtgaaagccaagaacttaattgtcactgagagtggtgccccaccgaccgacttgcaaaagatggtcatgggcaacacaaagcctgttgagcttatccttgacgggaagacagtagccatctgctgtgctactggagtgtttggtactgcttacctcgtgcctcgtcacctttttgcagagaagtatgacaaaatcatgttggacggcagagccatgacagacagtgactacagagtgtttgagtttgagattaaagtaaaaggacaggacatgctctcggacgccgcactcatggtactccaccgcgggaaccgtgtgagagacatcacgaaacactttcgtgatacagcaagaatgaagaaaggcactcccgttgttggtgtgatcaacaacgcagacgtcgggaggctgattttctctggtgaggccctcacctacaaggatatcgtagtgtgcatggatggagataccatgcctggcctttttgcctataaggccgccaccaaggccggttactgtggaggagccgttctcgctaaggacggggctgacacgttcatcgtcggcactcactctgcaggaggcaatggagtaggatactgttcgtgtgtttccaggtccatgcttcaaaagatgaaggcacacattgaccccgaaccacaccacgagggtttggttgtcaacaccagagatgtggaagagcgcgttcacgtgatgcgcaaaaccaagcttgcacccaccgttgcacacggtgtgttcaaccctgactttgggcctgccgccttgtctaacaaggacccgcgcctgaacgagggtgttgtcctcgatgaagccatcttctccaaacacaagggagacacaaagatgtccgaggaagacaaagcgctgttccgccgttgtgctgctgactacgcctcacgcttgcacagcgtactgggtacagcaaatgccccattgagcatctacgaggcaatcaagggcgttgatggactcgacgccatggagccagacactgcgcctggcctcccctgggcactccaggggaaacgtcgtggcgcgctcatcgattttgagaacggcacggtcgggcccgaagtcgaggctgccttgaagctcatggagagaagagaatacaaatttgtttgccagaccttcctgaaggacgaaattcgcccgatggagaaagtacgtgccggcaagactcgcattgtcgacgttttgcccgttgaacacattctttacaccaggatgatgattggcagattctgtgcacaaatgcactcaaacaacggaccgcaaattggctcagcagtcggttgtaaccctgatgttgattggcaaagatttggcacacacttcgcccaatacagaaacgtgtgggacgtggactactcggccttcgatgctaaccactgcagtgacgcaatgaacatcatgtttgaggaagtgttccgcacggactttggttttcacccaaatgctgagtggatcctgaagactctcgtgaacacggaacacgcctatgaaaataaacgtatcactgtcgagggcgggatgccatctggttgttccgcaacaagcatcatcaacacaatcttgaacaacatatatgtgctctacgccttgcgtagacactatgagggagttgagctggatacttacaccatgatctcatacggagacgacatcgtggtggcaagtgactacgatttggactttgaggctctcaagccccactttaaatctctcggtcaaaccattactccagctgacaaaagcgacaaaggttttgttctcggacattccatcaccgatgtcactttcctcaaaagacacttccacatggattatggaactgggttttacaaacctgtgatggcctcaaagactctcgaggccattctctcctttgcacgccgtgggaccatacaggagaagttgatctccgtggcaggactcgccgtccactccggaccagacgagtaccggcgtctctttgaacccttccagggcctctttgagattccaagctacagatcactttacctgcgttgggtgaacgccgtgtgcggtgacgcataa

SEQ ID NO: 13978 - DNA, 147 bp, unidentified
  source 1..147: mol_type = other DNA
  misc_feature 1..147: note = Synthetic
ttggaaagaaacaaaaagttgatatatttggagataaagatgatgaatctatgttacagatcgactgtgagacagattctcttatttcagaatcggttagttcaactcatagttacgaagattattctaaagcgtataaagagttaa

SEQ ID NO: 13979 - DNA, 81 bp, unidentified; identical to SEQ ID NO: 33
  misc_feature 1..81: note = Synthetic
  source 1..81: mol_type = other DNA

SEQ ID NO: 13980 - DNA, 1185 bp, unidentified
  source 1..1185: mol_type = other DNA
  misc_feature 1..1185: note = Synthetic
aggacgacaatggaaacactggcgaaccgtttagatgcgtgccaggagacgttgctagaactgtatgaaaaggatagcaacaaacttgaggatcagattaagcattgggcgcaggtccggctagaaaatgtcatgctgtttaaggcccgagaatgtggaatgacacgagtcggctgtacagctgtgcctgccctcaccgtgtcaaaagctaaggcatgtcaggccatagaggtacagctggcattacagacattgatgcagagtgcctatagcacggaggcatggaccctacgagacacgtgtctggagatgtgggacgcacctccaaagaaatgctggaaaaaaaaaggacaatcagtattagtgaaatttgatggcagcagtgacagagacatgatatatacaagctggggattcatttatgtgcaggacactatcactgattcctggcataaggtgccagggcaggtggacgaactgggattatattatgtgcacgatggtgtacgtgttaactatgtggactttggaacagagtccttgacctatggggtcaccgggacgtgggaggtgcacgtggctgggactgttattcaccatacatccgcatctgtgtctagcacccaggccagcgcctcggacgacgaaccactatcccctattagaactgctgtatccccagtcccagccccagtcgcagcctcagcagaatcaacaggagcaggaagagcagctccgcccacccaagcgttgtgctccgcccaggcgccaacgagtccgccggccaagcgccagcgtgtcatcgtcggacagcagcatccccggcccgactctacgcgaacggtcggagagggggaagtggagtgttacaacaagcggagcatcagtgactctaaccgcacagaccccaggtggggccacggtgacactgactctgtgcctgtaatccacctgagaggtgatgcaaattgtttaaagtgcttcagatacagggtgcaaaaacataaagacgtactgtatgccagggtgtcctccacgtggcactgggcgggtgggaacggtgataagacagcctttgtaacactgtggtacaccagcgttgaacagcgtacagagttcctgacaagagtcagtatacctaagggattgatagcattgccagggtatatgtctgcatttgtataa

SEQ ID NO: 13981 - DNA, 60 bp, unidentified; identical to SEQ ID NO: 6267
  misc_feature 1..60: note = Synthetic
  source 1..60: mol_type = other DNA

SEQ ID NO: 13982 - DNA, 36 bp, unidentified
  misc_feature 1..36: note = Synthetic
  source 1..36: mol_type = other DNA
atgtcatgctgtttaaggcccgagaatgtggaatga

SEQ ID NO: 13983 - DNA, 1497 bp, unidentified
  misc_feature 1..1497: note = Synthetic
  source 1..1497: mol_type = other DNA
atgggtcagattgtgacaatgtttgaggctctgcctcacatcatcgatgaggtgatcaacattgtcattattgtgcttatcgtgatcacgggtatcaaggctgtctacaattttgccacctgtgggatattcgcattgatcagtttcctacttctggctggcaggtcctgtggcatgtacggtcttaagggacccgacatttacaaaggagtttaccaatttaagtcagtggagtttgatatgtcacatctgaacctgaccatgcccaacgcatgttcagccaacaactcccaccattacatcagtatggggacttctggactagaattgaccttcaccaatgattccatcatcagtcacaacttttgcaatctgacctctgccttcaacaaaaagacctttgaccacacactcatgagtatagtttcgagcctacacctcagtatcagagggaactccaactataaggcagtatcctgcgacttcaacaatggcataaccatccaatacaacttgacattctcagatcgacaaagtgctcagagccagtgtagaaccttcagaggtagagtcctagatatgtttagaactgccttcggggggaaatacatgaggagtggctggggctggacaggctcagatggcaagaccacctggtgtagccagacgagttaccaatacctgattatacaaaatagaacctgggaaaaccactgcacatatgcaggtccttttgggatgtccaggattctcctttcccaagagaagactaagttcttcactaggagactagcgggcacattcacctggactttgtcagactcttcaggggtggagaatccaggtggttattgcctgaccaaatggatgattcttgctgcagagcttaagtgtttcgggaacacagcagttgcgaaatgcaatgtaaatcatgatgccgaattctgtgacatgctgcgactaattgactacaacaaggctgctttgagtaagttcaaagaggacgtagaatctgccttgcacttattcaaaacaacagtgaattctttgatttcagatcaactactgatgaggaaccacttgagagatctgatgggggtgccatattgcaattactcaaagttttggtacctagaacatgcaaagaccggcgaaactagtgtccccaagtgctggcttgtcaccaatggttcttacttaaatgagacccacttcagtgatcaaatcgaacaggaagccgataacatgattacagagatgttgaggaaggattacataaagaggcaggggagtacccccctagcattgatggaccttctgatgttttccacatctgcatatctagtcagcatcttcctgcaccttgtcaaaataccaacacacaggcacataaaaggtggctcatgtccaaagccacaccgattaaccaacaaaggaatttgtagttgtggtgcatttaaggtgcctggtgtaaaaaccgtctggaaaagacgctga

SEQ ID NO: 13984 - DNA, 1197 bp, unidentified
  misc_feature 1..1197: note = Synthetic
  source 1..1197: mol_type = other DNA
atggagtcgtccaaacaggcgccccgcgcgggcgcgcgcgtgttcgagtcgttgttgaagttcgtcgtccgcggcgccgcctgcggctgtctctcgagcaccgtcgacatagaggccaaggcgcggctgctgcccggcagctcgccgcagcgccgcgcgcagatcgccaacgcgatccacgacctgtgcatcgcgaacgtgcgcgtgaccacgcgcgaggacctcgtggaggcgctggcgcggctgcgtcggcgcttcgtgcacgcgggcaacagcgcggacctcgcgcgtctgcacggtgcgctcatgcgcttcacccactccacctcctttttcgcggtctgcacacccaccgtgcgcgtcacgctggccacgctcgtggccagcgtgctcgtcggcgagctcatgcaggccgtagacatggcggaggccgtggagcgcgtcatctacaccaaaaaccgacccatggcctccgagctcgcggacctgctcgagctcaagtacgggctggtgaacatggcgcagtacaagctcatgcccgcgctcatggaggaggcggggtgctgcgacgagctggtgcgggcgggcgcgccggacgcgtgcaccgactcggtcgccgagatggaggccgagcgcctgctcgacatgccggtgcgctcctccgcactatcgcgtctgtgcgacttcatggtgcggcgcggtgcctcgcccgtgcacgcggcctcggagttcgcggccggtctcaagatcgaggagatgccggcggacgcggacagcgcagctgctgcgcctgttcccgcccccgcggccgccgacttcggcagcgtggtggctcggacagaggacctgctcgagcgcgcgcgcaaggagtcccgcggcgaggtgctcgacggcgcggtgtccagcccgctgggcgtggcggggtcgtcgcccttcgacggcatcaccctcgaaaagttcgtgttgctggagtacctgcacgtgatgaagatgctggccaactgcatcgagcagcgctcctgcaaggagcgcatccgcgtctcggtgaacacgcagccgttcaggaccacctccgcgactccgacgcccgtcgaccccgccgagacggccgacgccgaggcgcagtgccgcgcgctgcagcagcggctgcaagtggcgcggcccgtgctcgggacccgcgcgccgccgctgttttag

SEQ ID NO: 13985 - DNA, 132 bp, unidentified
  misc_feature 1..132: note = Synthetic
  source 1..132: mol_type = other DNA
ctgaccctcctgaggcacatccgccgacgtctgggcctgggccgtgcttccgtaaaacgagagattacccttctcctggcccacctgcgcaaaaagacagcccccatccactgccgtgatgctcaagtgtaa

SEQ ID NO: 13986 - DNA, 132 bp, unidentified; identical to SEQ ID NO: 13985
  source 1..132: mol_type = other DNA
  misc_feature 1..132: note = Synthetic

SEQ ID NO: 13987 - DNA, 132 bp, unidentified
  source 1..132: mol_type = other DNA
  misc_feature 1..132: note = Synthetic
ctgaccctcctgaggcacatccgccgacgtctgggcctgggccgtgcttccgtaaaacgagagattacccttctcctggcccacctgcgcaaaaagacagcccccatccaccgccgtgatgctcaagtgtaa

SEQ ID NO: 13988 - DNA, 2541 bp, unidentified
  misc_feature 1..2541: note = Synthetic
  source 1..2541: mol_type = other DNA
ctgatttcctccgcggctggccattgtgttctcctaggcagagaaacaacagacatggaaactcagccatcactgccaacatcgctgcaagcaccatcacacctcgcccccagcagcgacgaggaggagagcttaaccaccccaccacccagtcccgctaccaccacctctaccctcgatgatgaggaggaggtcgacgcagcccaggagatgcaggcgcaggataatgtgaaaacggaagagattgaggcagatgtcgagcaggacccgggctatgtgacgccggcggagcaccaggaggagctgaaacgctttctagacagagaggatgacgaccgcccagagcatcaagcagatggcgtttaccaggaggctgggatcagggatcatgtcgccgactacctcaccggccttggtggggaggacgtgctcctcaaacatctagcaaggcagtcgatcatagttaaagacgcattgctcgatctcactgaagtgcccatcagtgtggaagagcttagccgcgcctacgagctgaacctcttttcgcctcaggtaccccccaagcggcagccaaacggcacctgcgaggccaaccctcgactcaacttctatccagcttttactatccccgaagtgttggccacctaccacatctttttcaagaaccaaaagattccagtctcctgccgcgccaaccgcacccgcgccgatgccctgctcaacttgggtccgggagctcgcttacctgatatagcttccttggaagaggttccaaagatctttgagggtctgggaagtgatgagacacgggccgcaaatgctctgcaacagggagagaatgacatggatgaacaccacagcgctctggtggaactggagggtgacaatgcccggattgcagtgctcaagcgcagtatcgtggtcacccattttgcctaccccgctgttaacctgccccccaaagttatgagcgctgtcatggaccatctgctcatcaaacgagcaagacctctttcagaaaaccagaacatgcaggatccagacgcctcggacgagggcaagccggtagtcagtgacgagcagctatctcgctggctgggtaccaactccccccgagatttggaagagaggcgcaagcttatgatggctgtagtgctagtaactgtggagctggagtgtctgcgccgctttttcaccgaccctgagaccctgcgcaagctagaggagaacctgcactacacctttagacatggcttcgtgcggcaggcatgcaagatctccaacgtggagcttaccaacctggtttcttacatgggcattttgcatgagaaccgactagggcagagcgtcctgcacaccacccttaaaggggaggcccgccgtgactacatccgagactgtgtctacctctacctctgccatacctggcaaactggtatgggtgtgtggcaacagtgtttggaagagcagaacctaaaagagctggacaagctcttgcagagatccctcaaagccctgtggacaggttttgatgagcgcaccgtcgcctcggacctggcagacatcatcttccccgagcgtctcagggttactctgcgaaacggcctgccagactttatgagccagagcatgcttaacaactttcgctctttcatcctggaacgctccggtatcctgcctgccacctgctgtgcgctgccctccgactttgtgcctctcacctaccgcgagtgcccaccgccgctatggagccactgctacctgttccgcctggccaactacctctcctaccactcggatgttatagaggatgtgagcggagacggcctgctggaatgccactgccgctgcaatctttgcacaccccaccgctcccttgcctgcaacccccagttgctgagcgagacccagattatcggcaccttcgagctgcagggtcccagaagtaaaggcgaggggtcttctccggggcagagtttgaaactgacaccggggctgtggacctccgcctacctgcgcaagtttcaccccgaggactaccatccctatgagatcaggttctatgaggaccaatcacatcctcccaaagtcgagctctcagcctgcgtcatcacccagggagcaattctggcccaattgcaagccatccaaaaatctcgccaagaatttctgctaaaaaagggaaacggggtctaccttgaccctcagaccggtgaggagctcaacacaaggttcccccaggatgtcccatcgccgaggaagcaagaagttgaaggtgcagctgtcgcccccagaggatatgaaggaagactgggacagtcaggcagaggaggagatggaagattgggacagccaggcagaggaggtggacagcctggaggaagacagtttggaggaggaagacgaggaggcagaggaggtggaagaagcaaccgccgccaaacagttgtcatcggcggcggagacaagcaagtccccagacagcagcacggctaccatctccgctccgggtcggggggcccagcggcggcccaacagtag

SEQ ID NO: 13989 - DNA, 1350 bp, unidentified
  source 1..1350: mol_type = other DNA
  misc_feature 1..1350: note = Synthetic
atggcaagacgagctcgcagaccgagaggccgattttactccttcagaagaggacggtggcaccacctcaagcgacttcgacgaagatataaatttcgacatcggaggagacagcggtatcgtagacgagcttttaggaaggcctttcacaacccccgccccggtacgtatagtgtgaggctgccgaacccccaatctactatgactatccgcttccaaggggtcatctttctcacggaaggactcattctgcctaaaaacagcacagcggggggctatgcagaccacatgtacggggcgagagtcgccaagatctctgtgaacctgaaagagttcctgctagcctcaatgaacctgacatacgtgagcaaaatcggaggccccatcgccggtgagttgattgcggacgggtctaaatcacaagccgcggacaattggcctaattgctggctgccgctagataataacgtgccctccgctacaccatcggcatggtggagatgggccttaatgatgatgcagcccacggactcttgccggttctttaatcacccaaagcagatgaccctgcaagacatgggtcgcatgtttgggggctggcacctgttccgacacattgaaacccgctttcagctccttgccactaagaatgagggatccttcagccccgtggcgagtcttctctcccagggagagtacctcacgcgtcgggacgatgttaagtacagcagcgatcaccagaaccggtggcaaaaaggcggacaaccgatgacggggggcattgcttatgcgaccgggaaaatgagacccgacgagcaacagtaccctgctatgcccccagaccccccgatcatcaccgctactacagcgcaaggcacgcaagtccgctgcatgaatagcacgcaagcttggtggtcatgggacacatatatgagctttgcaacactcacagcactcggtgcacaatggtcttttcctccagggcaacgttcagtttctagacggtccttcaaccaccacaaggcgagaggagccggggaccccaagggccagagatggcacacgctggtgccgctcggcacggagaccatcaccgacagctacatgtcagcacccgcatcagagctggacactaatttctttacgctttacgtagcgcaaggcacaaataagtcgcaacagtacaagttcggcacagctacatacgcgctaaaggagccggtaatgaagagcgatgcatgggcagtggtacgcgtccagtcggtctggcagctgggtaacaggcagaggccatacccatgggacgtcaactgggcgaacagcaccatgtactgggggacgcagccctga

SEQ ID NO: 13990 - DNA, 45 bp, unidentified; identical to SEQ ID NO: 6278
  source 1..45: mol_type = other DNA
  misc_feature 1..45: note = Synthetic

SEQ ID NO: 13991 - DNA, 45 bp, unidentified; identical to SEQ ID NO: 6280
  source 1..45: mol_type = other DNA
  misc_feature 1..45: note = Synthetic

SEQ ID NO: 13992 - DNA, 363 bp, unidentified
  source 1..363: mol_type = other DNA
  misc_feature 1..363: note = Synthetic
atggttcttccaatcctgccaccgccccctctgaatgatagacaaggcagcattaactggatggggatggcctacagagtcctggctgatgtgatgaggggaattcgcatggacgggttttttatttcatcagatgcagaggaacttctccagaatcttcgagaatggatgtacttcagttggatgactgagcggcagcagcgaaaggacggccgcaggaggggtatctgctgttcaagggcccatttctgctggcagaagtacgacaaggtacgcaagagaatccactacaatgcaaaccgagattcaatccagctcgctccgccatcatccatatcgcagggcccgtttaccacgatctga

SEQ ID NO: 13993 - DNA, 60 bp, unidentified; identical to SEQ ID NO: 6264
  misc_feature 1..60: note = Synthetic
  source 1..60: mol_type = other DNA

SEQ ID NO: 13994 - DNA, 36 bp, unidentified; identical to SEQ ID NO: 6284
  misc_feature 1..36: note = Synthetic
  source 1..36: mol_type = other DNA

SEQ ID NO: 13995 - DNA, 84 bp, unidentified; identical to SEQ ID NO: 6285
  misc_feature 1..84: note = Synthetic
  source 1..84: mol_type = other DNA

SEQ ID NO: 13996 - DNA, 87 bp, unidentified
  misc_feature 1..87: note = Synthetic
  source 1..87: mol_type = other DNA
gtggacaacattaatacagacgataacttgatttcgaaattacccatggagatacaacgcgaaatactttattactccattaaataa

SEQ ID NO: 13997 - DNA, 87 bp, unidentified; identical to SEQ ID NO: 13996
  source 1..87: mol_type = other DNA
  misc_feature 1..87: note = Synthetic

SEQ ID NO: 13998 - DNA, 30 bp, unidentified; identical to SEQ ID NO: 6287
  misc_feature 1..30: note = Synthetic
  source 1..30: mol_type = other DNA

SEQ ID NO: 13999 - DNA, 1929 bp, unidentified
  misc_feature 1..1929: note = Synthetic
  source 1..1929: mol_type = other DNA
ctggcaggaccacctatggctcctactcgccgatggagacgccgctttggccgccgccgtagacgctatagaaagagacgctatggctggagacgacgctactaccgctacaggccgcgtgactatcggcgacgatggctggtaaggagaaggcggcgttccgtctaccgtagaggtggacgtagagcgcgcccctaccgactgtttaatccaaaagtaatgcggagagtagtaattagggggtggtggcctattttacaatgcttaaaaggacaggaggcactaagatatagacctctacagtgggacacagagagacagtggagagtgagatcagacttcgaagaccagtacggatacctcgtacaatacgggggaggttggggaagtggtgatgtgacacttgaaggtctctaccaagagcacttattgtggagaaactcttggtctaaaggaaacgatggaatggacctagtaagatactttggatgtgtagtatacctatatccactaaaggaccaggactattggttctggtgggacacggacttcaaagaattatatgcagaaaacataaaggaatacagccaaccatcagtaatgatgatggcaaaaagaacaagaatagtaatagccagagaaagggcaccacatagaagaaaagtaagaaaaatatttattccgccaccttcgagagacacaacacagtggcagtttcagacagatttctgcaatagaaagttatttacgtgggcagctggtctaatagacatgcaaaaaccgttcgatgctaatggagcctttagaaatgcttggtggctggaacagagaaatgatcagggagaaatgaaatacatagaactgtggggaagagtacccccacaaggagattcagagctgcccaaaaaaaaagaattctccacaggaacagataacccaaactacaatgttcaggacaatgaggagaaaaacatataccccattataatatacgtagaccaaaaagatcaaaaaccaagaaaaaagtactgcgtatgttataataagaccctcaacagatggagactaggacaggcaagtactctaaagataggaaacctgaaaggactagtactaagacagctgatgaatcaagaaatgacgtatatatggaaagaaggagaatacagtgccccctttgtacaaaggtggaaaggcagcagattcgctgtgatagacgcaagaaaggcagaccaagaaaacccgaaagtatcaacatggccaattgagggaacgtggaacacacaggacacagtactgaaggatgtattcggtattaacttgcaaaatcaacaatttagggcggcggactttggtaaactcacactaccaaaatcaccgcatgacttagacttcggtcaccacagcagatttgggccattttgtgtgaaaaatgaaccactggagtttcaggtataccctccagaaccaactaacttgtggtttcagtacagatttttctttcagtttggaggtgaataccaaccccccacaggaatccgggatccatgcgttgatacaccagcctatcctgtgccgcagtcaggaagtattacacaccccaaattcgccggaaaaggaggaatgctcacggaaacagaccgttggggtatcactgctgcctcttccagagccctcagtgcagatacacccacagaggcagcgcaaagtgcacttctccgaggggactcggaagcgaaaggagaggaaaccgaggaaaccgcgtcatcgtccagtatcacgagtgccgaaagctctactgagggagatggatcgtctgatgatgaagagacaatcagacgcagaaggaggacctggaagcgactcagacgaatggtcagagagcagcttgaccgacgaatggaccacaagcgacagcgacttcattga

SEQ ID NO: 14000 - DNA, 10191 bp, unidentified
  source 1..10191: mol_type = other DNA
  misc_feature 1..10191: note = Synthetic
ttgaatagagagcagatctctggaaaaatgaaccaacgaaaaaaggtggttagaccacctttcaatatgctgaaacgcgagagaaaccgcgtatcaacccctcaagggttggtgaagagattctcaaccggacttttttctgggaaaggacccttacggatggtgctagcattcatcacgtttttgcgagtcctttccatcccaccaacagcagggattctgaagagatggggacagttgaagaaaaataaggccatcaagatactgattggattcaggaaggagataggccgcatgctgaacatcttgaacgggagaaaaaggtcaacgataacattgctgtgcttgattcccaccgtaatggcgttttccctcagcacaagagatggcgaacccctcatgatagtggcaaaacatgaaagggggagacctctcttgtttaagacaacagaggggatcaacaaatgcactctcattgccatggacttgggtgaaatgtgtgaggacactgtcacgtataaatgccccctactggtcaataccgaacctgaagacattgattgctggtgcaacctcacgtctacctgggtcatgtatgggacatgcacccagagcggagaacggagacgagagaagcgctcagtagctttaacaccacattcaggaatgggattggaaacaagagctgagacatggatgtcatcggaaggggcttggaagcatgctcagagagtagagagctggatactcagaaacccaggattcgcgctcttggcaggatttatggcttatatgattgggcaaacaggaatccagcgaactgtcttctttgtcctaatgatgctggtcgccccatcctacggaatgcgatgcgtaggagtaggaaacagagactttgtggaaggagtctcaggtggagcatgggtcgacctggtgctagaacatggaggatgcgtcacaaccatggcccagggaaaaccaaccttggattttgaactgactaagacaacagccaaggaagtggctctgttaagaacctattgcattgaagcctcaatatcaaacataactacggcaacaagatgtccaacgcaaggagagccttatctgaaagaggaacaggaccaacagtacatttgccggagagatgtggtagacagagggtggggcaatggctgtggcttgtttggaaaaggaggagttgtgacatgtgcgaagttttcatgttcggggaagataacaggcaatttggtccaaattgagaaccttgaatacacagtggttgtaacagtccacaatggagacacccatgcagtaggaaatgacacatccaatcatggagttacagccatgataactcccaggtcaccatcggtggaagtcaaattgccggactatggagaactaacactcgattgtgaacccaggtctggaattgactttaatgagatgattctgatgaaaatgaaaaagaaaacatggctcgtgcataagcaatggtttttggatctgcctcttccatggacagcaggagcagacacatcagaggttcactggaattacaaagagagaatggtgacatttaaggttcctcatgccaagagacaggatgtgacagtgctgggatctcaggaaggagccatgcattctgccctcgctggagccacagaagtggactccggtgatggaaatcacatgtttgcaggacatcttaagtgcaaagtccgtatggagaaattgagaatcaagggaatgtcatacacgatgtgttcaggaaagttttcaattgacaaagagatggcagaaacacagcatgggacaacagtggtgaaagtcaagtatgaaggtgctggagctccgtgtaaagtccccatagagataagagatgtaaacaaggaaaaagtggttgggcgtatcatctcatccacccctttggctgagaataccaacagtgtaaccaacatagaattagaacccccctttggggacagctacatagtgataggtgttggaaacagcgcattaacactccattggttcaggaaagggagttccattggcaagatgtttgagtccacatacagaggtgcaaaacgaatggccattctaggtgaaacagcttgggattttggttccgttggtggactgttcacatcattgggaaaggctgtgcaccaggtttttggaagtgtgtatacaaccatgtttggaggagtctcatggatgattagaatcctaattgggttcttagtgttgtggattggcacgaactcgaggaacacttcaatggctatgacgtgcatagctgttggaggaatcactctgtttctgggcttcacagttcaagcagacatgggttgtgtggcgtcatggagtgggaaagaattgaagtgtggaagcggaatttttgtggttgacaacgtgcacacttggacagaacagtacaaatttcaaccagagtccccagcgagactagcgtctgcaatattaaatgcccacaaagatggggtctgtggaattagatcaaccacgaggctggaaaatgtcatgtggaagcaaataaccaacgagctaaactatgttctctgggaaggaggacatgacctcactgtagtggctggggatgtgaagggggtgttgaccaaaggcaagagagcactcacacccccagtgagtgatctgaaatattcatggaagacatggggaaaagcaaaaatcttcaccccagaagcaagaaatagcacatttttaatagacggaccagacacctctgaatgccccaatgaacgaagagcatggaactctcttgaggtggaagactatggatttggcatgttcacgaccaacatatggatgaaattccgagaaggaagttcagaagtgtgtgaccacaggttaatgtcagctgcaattaaagatcagaaagctgtgcatgctgacatgggttattggatagagagctcaaaaaaccagacctggcagatagagaaagcatctcttattgaagtgaaaacatgtctgtggcccaagacccacacactgtggagcaatggagtgctggaaagccagatgctcattccaaaatcatatgcgggccctttttcacagcacaattaccgccagggctatgccacgcaaaccgtgggcccatggcacttaggcaaattagagatagactttggagaatgccccggaacaacagtcacaattcaggaggattgtgaccatagaggcccatctttgaggaccaccactgcatctggaaaactagtcacgcaatggtgctgccgctcctgcacgatgcctcccttaaggttcttgggagaagatgggtgctggtatgggatggagattaggcccttgagtgaaaaagaagagaacatggtcaaatcacaggtgacggccggacagggcacatcagaaactttttctatgggtctgttgtgcctgaccttgtttgtggaagaatgcttgaggagaagagtcactaggaaacacatgatattagttgtggtgatcactctttgtgctatcatcctgggaggcctcacatggatggacttactacgagccctcatcatgttgggggacactatgtctggtagaataggaggacagatccacctagccatcatggcagtgttcaagatgtcaccaggatacgtgctgggtgtgtttttaaggaaactcacttcaagagagacagcactaatggtaataggaatggccatgacaacggtgctttcaattccacatgaccttatggaactcattgatggaatatcactgggactaattttgctaaaaatagtaacacagtttgacaacacccaagtgggaaccttagctctttccttgactttcataagatcaacaatgccattggtcatggcttggaggaccattatggctgtgttgtttgtggtcacactcattcctttgtgcaggacaagctgtcttcaaaaacagtctcattgggtagaaataacagcactcatcctaggagcccaagctctgccagtgtacctaatgactcttatgaaaggagcctcaagaagatcttggcctcttaacgagggcataatggctgtgggtttggttagtctcttaggaagcgctcttttaaagaatgatgtccctttagctggcccaatggtggcaggaggcttacttctggcggcttacgtgatgagtggtagctcagcagatctgtcactagagaaggccgccaacgtgcagtgggatgaaatggcagacataacaggctcaagcccaatcgtagaagtgaagcaggatgaagatggctctttctccatacgggacgtcgaggaaaccaatatgataacccttttggtgaaactggcactgataacagtgtcaggtctctaccccttggcaattccagtcacaatgaccttatggtacatgtggcaagtgaaaacacaaagatcaggagccctgtgggacgtcccctcacccgctgccactaaaaaagccgcactgtctgaaggagtgtacaggatcatgcaaagagggttattcgggaaaactcaggttggagtagggatacacatggaaggtgtatttcacacaatgtggcatgtaacaagaggatcagtgatctgccacgagactgggagattggagccatcttgggctgacgtcaggaatgacatgatatcatacggtgggggatggaggcttggagacaaatgggacaaagaagaagacgttcaggtcctcgccatagaaccaggaaaaaatcctaaacatgtccaaacgaaacctggccttttcaagaccctaactggagaaattggagcagtaacattagatttcaaacccggaacgtctggttctcccatcatcaacaggaaaggaaaagtcatcggactctatggaaatggagtagttaccaaatcaggtgattacgtcagtgccataacgcaagccgaaagaattggagagccagattatgaagtggatgaggacatttttcgaaagaaaagattaactataatggacttacaccccggagctggaaagacaaaaagaattcttccatcaatagtgagagaagccttaaaaaggaggctacgaactttgattttagctcccacgagagtggtggcggccgagatggaagaggccctacgtggactgccaatccgttatcagaccccagctgtgaaatcagaacacacaggaagagagattgtagacctcatgtgtcatgcaaccttcacaacaagacttttgtcatcaaccagggttccaaattacaaccttatagtgatggatgaagcacatttcaccgatccttctagtgtcgcggctagaggatacatctcgaccagggtggaaatgggagaggcagcagccatcttcatgaccgcaacccctcccggagcgacagatccctttccccagagcaacagcccaatagaagacatcgagagggaaattccggaaaggtcatggaacacagggttcgactggataacagactaccaagggaaaactgtgtggtttgttcccagcataaaagctggaaatgacattgcaaattgtttgagaaagtcgggaaagaaagttatccagttgagtaggaaaacctttgatacagagtatccaaaaacgaaactcacggactgggactttgtggtcactacagacatatctgaaatgggggccaattttagagccgggagagtgatagaccctagaagatgcctcaagccagttatcctaccagatgggccagagagagtcattttagcaggtcctattccagtgactccagcaagcgctgctcagagaagagggcgaataggaaggaacccagcacaagaagacgaccaatacgttttctccggagacccactaaaaaatgatgaagatcatgcccactggacagaagcaaagatgctgcttgacaatatctacaccccagaagggatcattccaacattgtttggtccggaaagggaaaaaacccaagccattgatggagagtttcgcctcagaggggaacaaaggaagacttttgtggaattaatgaggagaggagaccttccggtgtggctgagctataaggtagcttctgctggcatttcttacgaagatcgggaatggtgcttcacaggggaaagaaataaccaaattttagaagaaaacatggaggttgaaatttggactagagagggagaaaagaaaaagctaaggccaagatggttagatgcacgtgtatacgctgaccccatggctttgaaggatttcaaggagtttgccagtggaaggaagagtataactctcgacatcctaacagagattgccagtttgccaacttacctttcctctagggccaagctcgcccttgataacatagtcatgctccacacaacagaaagaggagggagggcctatcaacacgccctgaacgaacttccggagtcactggaaacactcatgcttgtagctttactaggtgctatgacagcaggcatcttcctgtttttcatgcaagggaaaggaatagggaaattgtcaatgggtttgataaccattgcggtggctagtggcttgctctgggtagcagaaattcaaccccagtggatagcggcctcaatcatactagagttttttctcatggtactgttgataccggaaccagaaaaacaaaggaccccacaagacaatcaattgatctacgtcatattgaccattctcaccatcattggtctaatagcagccaacgagatggggctgattgaaaaaacaaaaacggattttgggttttaccaggtaaaaacagaaaccaccatcctcgatgtggacttgagaccagcttcagcatggacgctctatgcagtagccaccacaattctgactcccatgctgagacacaccatagaaaacacgtcggccaacctatctctagcagccattgccaaccaggcagccgtcctaatggggcttggaaaaggatggccgctccacagaatggacctcggtgtgccgctgttagcaatgggatgctattctcaagtgaacccaacaaccttgacagcatccttagtcatgcttttagtccattatgcaataataggcccaggattgcaggcaaaagccacaagagaggcccagaaaaggacagctgctgggatcatgaaaaatcccacagtggacgggataacagtaatagatctagaaccaatatcctatgacccaaaatttgaaaagcaattagggcaggtcatgctactagtcttgtgtgctggacaactactcttgatgagaacaacatgggctttctgtgaagtcttgactttggccacaggaccaatcttgaccttgtgggagggcaacccgggaaggttttggaacacgaccatagccgtatccaccgccaacattttcaggggaagttacttggcgggagctggactggctttttcactcataaagaatgcacaaacccctaggaggggaactgggaccacaggagagacactgggagagaagtggaagagacagctaaactcattagacagaaaagagtttgaagagtataaaagaagtggaatactagaagtggacaggactgaagccaagtctgccctgaaagatgggtctaaaatcaagcatgcagtatcaagagggtccagtaagatcagatggattgttgagagagggatggtaaagccaaaagggaaagttgtagatcttggctgtgggagaggaggatggtcttattacatggcgacactcaagaacgtgactgaagtgaaagggtatacaaaaggaggtccaggacatgaagaaccgattcccatggctacttatggttggaatttggtcaaactccattcaggggttgacgtgttctacaaacccacagagcaagtggacaccctgctctgtgatattggggagtcatcttctaatccaacaatagaggaaggaagaacattaagagttttgaagatggtggagccatggctctcttcaaaacctgaattctgcatcaaagtccttaacccctacatgccaacagtcatagaagagctggagaaactgcagagaaaacatggtgggaaccttgtcagatgcccgctgtccaggaactccacccatgagatgtattgggtgtcaggagcgtcgggaaacattgtgagctctgtgaacacaacatcaaagatgttgttgaacaggttcacaacaaggcataggaaacccacttatgagaaggacgtagatcttggggcaggaacgagaagtgtctccactgaaacagaaaaaccagacatgacaatcattgggagaaggcttcagcgattgcaagaagagcacaaagaaacctggcattatgatcaggaaaacccatacagaacctgggcgtatcatggaagctatgaagctccttcgacaggctctgcatcctccatggtgaacggggtggtaaaactgctaacaaaaccctgggatgtgattccaatggtgactcagttagccatgacagatacaaccccttttgggcaacaaagagtgttcaaagagaaggtggataccagaacaccacaaccaaaacccggtacacgaatggttatgaccacgacagccaattggctgtgggccctccttggaaagaagaaaaatcccagactgtgcacaagggaagagttcatctcaaaagttagatcaaacgcagccataggcgcagtctttcaggaagaacagggatggacatcagccagtgaagctgtgaatgacagccggttttgggaactggttgacaaagaaagggccctacaccaggaagggaaatgtgaatcgtgtgtctataacatgatgggaaaacgtgagaaaaagttaggagagtttggcagagccaagggaagccgagcaatctggtacatgtggctgggagcgcggtttctggaatttgaagccctgggttttttgaatgaagatcactggtttggcagagaaaattcatggagtggagtggaaggggaaggtctgcacagattgggatatatcctggaggagatagacaagaaggatggagacctaatgtatgctgatgacacagcaggctgggacacaagaatcactgaggatgaccttcaaaatgaggaactgatcacggaacagatggctccccaccacaagatcctagccaaagccattttcaaactaacctatcaaaacaaagtggtgaaagtcctcagacccacaccgcggggagcggtgatggatatcatatccaggaaagaccaaagaggtagtggacaagttggaacatatggtttgaacacattcaccaacatggaagttcaactcatccgccaaatggaagctgaaggagtcatcacacaagatgacatgcagaacccaaaagggttgaaagaaagagttgagaaatggctgaaagagtgtggtgtcgacaggttaaagaggatggcaatcagtggagacgattgcgtggtgaagcccctagatgagaggtttggcacttccctcctcttcttgaacgacatgggaaaggtgaggaaagacattccgcagtgggaaccatctaagggatggaaaaactggcaagaggttcctttttgctcccaccactttcacaagatctttatgaaggatggccgctcactagttgttccatgtagaaaccaggatgaactgatagggagagccagaatctcgcagggagctggatggagcttaagagaaacagcctgcctgggcaaagcttacgcccagatgtggtcgcttatgtacttccacagaagggatctgcgtttagcctccatggccatatgctcagcagttccaacggaatggtttccaacaagcagaacaacatggtcaatccacgctcatcaccagtggatgaccactgaagatatgctcaaagtgtggaacagagtgtggatagaagacaaccctaatatgactgacaagactccagtccattcgtgggaagatataccttacctagggaaaagagaggatttgtggtgtggatccctgattggactttcttccagagccacctgggcgaagaacattcatacggccataacccaggtcaggaacctgatcggaaaagaggaatacgtggattacatgccagtaatgaaaagatacagtgctccttcagagagtgaaggagttctgtaa

SEQ ID NO: 14001 - DNA, 675 bp, unidentified
  source 1..675: mol_type = other DNA
  misc_feature 1..675: note = Synthetic
atgtcacaaaacagaaagactctgcctgctgatggacctggtgggcacggagtgctttgcgagggtgtgccgcctagacaccggtgcgaaatgaagagtgtggcgagtcccttatgtcagttccacggcgtgttttgcctgtaccagtgtcgccagtgcctggcataccacgtgtgtgatgggggcgccgaatgcgttctcctgcatacgccggagagcgtcatctgcgaactaacgggtaactgcatgctcggcaacattcaagagggccagtttttagggccggtaccgtatcggactttggataaccaggttgacagggacgcatatcacgggatgctagcgtgtctgaaacgggacattgtgcggtatttgcagacatggccggacaccaccgtaatcgtgcaggaaatagccctgggggacggcgtcaccgacaccatctcggccattatagatgaaacattcggtgagtgtcttcccgtactgggggaggcccaaggcgggtacgccctggtctgtagcatgtatctgcacgttatcgtctccatctattcgacaaaaacggtgtacaacagtatgctatttaaatgcacaaagaataaaaagtacgactgcattgccaagcgggtgcggacaaaatggatgcgcatgctatcaacgaaagatacgtag

SEQ ID NO: 14002 - DNA, 279 bp, unidentified
  source 1..279: mol_type = other DNA
  misc_feature 1..279: note = Synthetic
aagatgaggaggactatgaggacgagccctgatcagccaggtggtgtttttgtagatgctgcgttcgacggcggtggcggacgggtcgcagcaggtgaatcccgctatgttggcggccctgcaaagccaaccttcgggcgtgacaccctcagacgactgggcggcggccatggatcgcatcctggccctaaccacccgcaatcccgaagccttcaggcagcagccccaggccaaccgcttttcggccattttggaagccgtggttccttctcgcactaa

SEQ ID NO: 14003 - DNA, 33 bp, unidentified; identical to SEQ ID NO: 6297
  source 1..33: mol_type = other DNA
  misc_feature 1..33: note = Synthetic

SEQ ID NO: 14004 - DNA, 33 bp, unidentified; identical to SEQ ID NO: 6298
  misc_feature 1..33: note = Synthetic
  source 1..33: mol_type = other DNA

SEQ ID NO: 14005 - DNA, 108 bp, unidentified
  source 1..108: mol_type = other DNA
  misc_feature 1..108: note = Synthetic
atggtaacttcgaaaccgttatttatagcagatatagggataggagtaggaatgccacgaatgaaaaaatacttaaaatgtaatcttatcgagtacacacaacaatga

SEQ ID NO: 14006 - DNA, 420 bp, unidentified
  source 1..420: mol_type = other DNA
  misc_feature 1..420: note = Synthetic
atgagagccaatcgggaagaactggatctcctgccaccagttggaggaatggctgttgatgtgatggaagtagaactccctgcgacgcgccgagcattcatgcttgtgcttgtacagacggccgcagtactcgcagcgattcacgggatgcaccttatgaatgagttgtacctgacttcctttgacgagaaatttcagtggaaaattgaggcctggcgcttgtacctcgcgctttactatgttgtctgcatcggcatgaccatcttctgtctcgatggtggtcatgctgacgagccctcgcgggaggcaagtccagacctcggcgcggcaggggcggagctcgaggacgagagcgcgcaggccggagctgtccagggtcctgagacgctgcggagtcaggtactccgcgcaaggacctga

SEQ ID NO: 14007 - DNA, 1479 bp, unidentified
  source 1..1479: mol_type = other DNA
  misc_feature 1..1479: note = Synthetic
atgggtctgtttggcatgatgaagtttgcccagactcaccatctggtgaagcgccggggcctccgggccccggagggctactttacccccatcgccgtggacctgtggaatgtcatgtataccctggtggttaaatatcagcgccgctacccaagttacgaccgcgaggcaatcacgctacactgtctctgtagtatgttacgggtgtttacccaaaagtccctgttccccatcttcgtgaccgatcgcggggtcgagtgtaccgagccggttgtgttcggggccaaggcgatcctggcccgcacgacggcccagtgccgcacggacgaggaggccagtgacgtagacgcctcgccgccgccttcccccatcaccgactccaggcccagtttcgccttttccaacatgcgccgccgcgggcacgccttcgccccgggggaccggggaacgcgggccgccggcccaggcccggcggccccctcgggcgcgccctcgaagccggccctgcgcctggctcacctgttctgtatccgcgttctgcgggcgctggggtacgcctacatcaactcgggtcagctggaggccgacgacgcctgcgcgaacctctatcataccaacacggtcgcgtacgtgcataccacggataccgatctcctgctgatgggctgcgatatcgtgttggacatcagcaccggctacattccgacgattcactgccgcgacctgctgcagtacttcaagatgagttacccgcagttcctggcgctgttcgtccgctgccacacagacctgcaccccaataacacctacgcgtccgtcgaggacgtgctgcgcgagtgtcactggaccgccccgagccgatcccaggcccgccgggcggcccggcgggagcgcgccaactcgcgctccctggagagcatgcctacgctgaccgcggccccggtcggcctcgagacgcgcatctcgtggaccgaaattctggcccaacagatcgcgggcgaggacgactacgaagaagacccccccctccagcccccggacgtcgccggtgggccgcgcgacggcgcccggtcgtcctcctcggagatactcaccccgcccgagctcgtgcaggtccccaacgcgcagcgggtcgcggaacaccgcggctatgtcgccggacgtcgccgccacgtcatccacgacgccccggaggccctggactggctgcccgatccgatgaccatcgccgagctggtggagcacagatacgtcaagtacgtcatatcgcttatcagccccaaggagcggggaccctggactcttctaaaaagactgcccatctatcaggacctccgcgacgaagatttagcgcgctccatcgtgactcggcatatcaccgccccggacatcgccgaccggtttctggcgcagctgtgggcccacgcgcccccgcccgcgttttacaaggacgtcctggctaaattctgggacgagtag

SEQ ID NO: 14008 - DNA, 168 bp, unidentified
  source 1..168: mol_type = other DNA
  misc_feature 1..168: note = Synthetic
agggctactttacccccatcgccgtggacctgtggaatgtcatgtataccctggtggttaaatatcagcgccgctacccaagttacgaccgcgaggcaatcacgctacactgtctctgtagtatgttacgggtgtttacccaaaagtccctgttccccatcttcgtga

SEQ ID NO: 14009 - DNA, 78 bp, unidentified; identical to SEQ ID NO: 6309
  misc_feature 1..78: note = Synthetic
  source 1..78: mol_type = other DNA

SEQ ID NO: 14010 - DNA, 36 bp, unidentified; identical to SEQ ID NO: 6310
  source 1..36: mol_type = other DNA
  misc_feature 1..36: note = Synthetic

SEQ ID NO: 14011 - DNA, 81 bp, unidentified; identical to SEQ ID NO: 6311
  source 1..81: mol_type = other DNA
  misc_feature 1..81: note = Synthetic

SEQ ID NO: 14012 - DNA, 1179 bp, unidentified
  source 1..1179: mol_type = other DNA
  misc_feature 1..1179: note = Synthetic
atgacaacgcgacacacgcagacgagggacggacgcatcgcgatccggcgcgacggggcgcgattggcccacgcgcgagcccgtgcccgcttcgagtggctgctcctggctcgcggcaggccgtccaaactgtacggctatacgagtcggcaccggggagaacggatccacctaccgtggccgcggtactggtgcctagaactccatccggatccgtacagggacgccaggagcgccaccgtgtggggtcaccgctggggttggccgccaacgcacgtgagacccagatccgttcaagactgcgccctggactcgagtctgtacgtatgttgcggatacggagaaaaacttcaacccgtgggcttcgtaagctcgtatctgacccactccccgctcgacacgcttcgcgtgctcctggtcggtagagacggagccgtgtacgtccaccacatgagggcggccagactctgccgtctggcgtcgaacgtaacggagtttgcaaggcgagggctgcagcgggaccccgtggcgtatgaggaagacctagagctgccggaccggcgtatgtgcggaacgaacgtcagacatctgttcgacgtgatcgccgcggccgccgacgaacacgacctgctgaccgtcggcggcctgtgtcagacgcacgccggagtgagctgtgaattactagagaccgtgcgagatccgtggacggcggttccgggcgtacgcatgactctgaccgtggcgcgggctcagtatcgcttgtggcccgatgcccggagacagctccgcctgcacctgtacgcgggacaccccctgggaccgtggatagtgtgcgccgttctgtctcgagagagggagacgcagacgccgtcgcctccgataggcagcggaggcgtgattctgggaaacgtgcccacgccggggccacgcgaggtggagacggcttgggtgatcgtcaccgtggcgggaccgttgttatcgttctggcccgataacggcaagatctgccgtctggcgaactcgttcgccgccctgtggaggatggggccgcgggccatgagaggacattggacgtattcggccccgggtagacatctccccggggacgcttggccactctgtgaacacgtgagaccgccagtcggaaaacttccccggcaaagagcgtacctggattag

SEQ ID NO: 14013 - DNA, 1179 bp, unidentified; identical to SEQ ID NO: 14012
  source 1..1179: mol_type = other DNA
  misc_feature 1..1179: note = Synthetic

SEQ ID NO: 14014 - DNA, 39 bp, unidentified; identical to SEQ ID NO: 6314
  source 1..39: mol_type = other DNA
  misc_feature 1..39: note = Synthetic

SEQ ID NO: 14015 - DNA, 12 bp, unidentified
  misc_feature 1..12: note = Synthetic
  source 1..12: mol_type = other DNA
atgcagccgtag

SEQ ID NO: 14016 - DNA, 21 bp, unidentified
  source 1..21: mol_type = other DNA
  misc_feature 1..21: note = Synthetic
atgctccgctccttctcgtag

SEQ ID NO: 14017 - DNA, 93 bp, unidentified; identical to SEQ ID NO: 6317
  source 1..93: mol_type = other DNA
  misc_feature 1..93: note = Synthetic

SEQ ID NO: 14018 - DNA, 18 bp, unidentified
  misc_feature 1..18: note = Synthetic
  source 1..18: mol_type = other DNA
atgattcagaatagataa

SEQ ID NO: 14019 - DNA, 84 bp, unidentified
  misc_feature 1..84: note = Synthetic
  source 1..84: mol_type = other DNA
atggaaactggagaaatcaaaacattttcatccgtgtgttttaagattagttctttaaagatatccatggtatataccaaataa

SEQ ID NO: 14020 - DNA, 546 bp, unidentified
  misc_feature 1..546: note = Synthetic
  source 1..546: mol_type = other DNA
atggctgaagtctctgaatttgatttcaaaataaagaaagataagaagaaacaagaaaaaacgaaatcgaagaaaatggttgtcaaagataatgaaacagtagtaacacatgaagaaaagtctgaacgtggttcagtctattctgaagaatcatcaagtcattcatcaagtaattacgctgaagcatatgaaaggctacagcgtgaacttaatgctagcgaatcaaatgacaacaagtgtaagcgaacaattagaaactgggcagatgaagttgaaaaacaagaaagtgaatctgagaacgaatatgatgtaccagatacagaattcattccaaagaaaacaaacataatagatatggggtctgaagcaaaagagcagataatgaatgaaatatcaaaaattagaatggaaatggatgtaattaaagaagcaatgaaaccacaaggcgttgatgctgcatttaacctcattctcaagaatgtagacaacctatctacaaaacaaaaacacgctcttgtaaacgcaatagttatgtcaatgaaataa

SEQ ID NO: 14021 - DNA, 42 bp, unidentified; identical to SEQ ID NO: 6321
  misc_feature 1..42: note = Synthetic
  source 1..42: mol_type = other DNA

SEQ ID NO: 14022 - DNA, 591 bp, unidentified
  source 1..591: mol_type = other DNA
  misc_feature 1..591: note = Synthetic
gtgcaatttagaagaaaacagaagaaaatggaagaagaaacgatacagaatatgactaaaatgctaatggcgacactaactgatcacatagattttaataaaatacttcaaacaacagttacggctatagtagcttttttctttaataaaaagatggcaactcctattatcaagaaagtcctatcaaaagtaaaagaaaaaatcaatgaaaaaatagatagcgtaattgatcagtcaatgctaagactaggaacgactcaaaattcgaaagaaatggtgacaaattgtatagcacaagaaatgcgtaagtttgacacaataatgaaaaatcttgaagatacaacgcttgattttgatgttatggctaggtttgatgagaaaacagttgacattgacaagaaaatacgtggaattgaagaatcaatggaaagaagaatgaaagattttgagattaaaatgaatgcattgatgaaatcagtaacacagtgcactaaaaagaaagaaacaccaatagttcatattgcacaacaagataaagtacagctgtacacaggaccaaaaaaagagtatgatcctcgtgacaagttgtaa

SEQ ID NO: 14023 - DNA, 213 bp, unidentified
  source 1..213: mol_type = other DNA
  misc_feature 1..213: note = Synthetic
atgcttcacatgggacaaaaaactctggtgccgtcacttctgtgtgcttgcggactcagaatctggtggacatatcactcactctgggatggtgggcatgggagtcagctgcacagtcactcgggaagatggaaccaatcgcagatagggctgccagtgaaccgatcacatgatgtcacccagacatcaggcatacccactagtgtgaaatag

SEQ ID NO: 14024 - DNA, 903 bp, unidentified
  source 1..903: mol_type = other DNA
  misc_feature 1..903: note = Synthetic
atgacgcagtcggtttcattagctgatttcattgtcaaaactgatgatggttatatgccaagtgacagagaatgtaaagtgcttgatagatttctgtccagagaacaaaaagcaattcgtgaagaatataaatccagaacgggagtgaaatgtgatttaagaaagaaaatgtttatgctagctgcaccatcaaggagatttactcaggaaggtgtagttcctatgaaggaattgagaagtaagactgacattccaagtgcagtgaaaagattgatcactgattggctgctgaaaacactagaagacgacgatgtctgtgaagtttttgaagatgtatttgaaaataagtttccagatattttcgcatcatcggataaaatttcaagatttgcaatgcgactagaaaatgaaaacgatttgattcataaaaatgtatcaaaggcaatgaatgcgtttgcagcttgttttcacgatattaagccttcatttgccacagagggaaaatgtactgttgcaagagcatgtgaagattcgatcattctggaatttcctgtaataccagaacatctgagaattggacaagttagaggagtattctataaattgtatccactatctgatgatctaccaacgcaaggttttcttgctttaaaacatgtgtcaaacaatcaattccaaatgtaccatggacacggacatgttagaacagtaccgttttctgaagtgccagaagcagtacgatcattcgcaaaaaaacagaaagatgaactggaaaagatagctaaagatcaacttgccgtgcagtgcggacagaaattcattaaaatgattgatgatctacgtgctggtaggaagattgaagaagtgatttctgacgtgatgaaattcgacaagaaacagtga

SEQ ID NO: 14025 - DNA, 102 bp, unidentified
  source 1..102: mol_type = other DNA
  misc_feature 1..102: note = Synthetic
atggttatatgccaagtgacagagaatgtaaagtgcttgatagatttctgtccagagaacaaaaagcaattcgtgaagaatataaatccagaacgggagtga

SEQ ID NO: 14026 - DNA, 882 bp, unidentified
  misc_feature 1..882: note = Synthetic
  source 1..882: mol_type = other DNA
atgtggaatgtaatgataagtttttctatgggccttgttttagggaatgtaattccgggagaaagctgtttccatcttatgataaagaaaacgctgtttgaacaagtagtgctaatattcctttttagcggaggtttgctattgacttaccgtcgggtgaatttgtttaactattgtcctttcaacgatctcaaaattataactttatcattactcgtgttgcaaatgaccgatgaattttttttggtaatctgctcgtttttatttttttctgaaatccgcttgagagccatagtctgtagatgcatgctaatatttccaacgcattcaatggcatcttatttcggcaccctaattgccattgtgttaaaaatatcagatttggttcattacagattgcttgttacagtgtttctgataacgccatatgtaaccagttataagtttctggttaactctcatcagtttgccatgtgtcttcagcgatacaaaccgatctataaaccgaatggcccgtaccaaatggctataaaagatgttattgtttatttgctgcaatttttaaccttaacgctgctggtttggtttggaaaattgtatttaccaagaaaaagttgccagcatttatttttcttggcagtcttacatagtaatttgtttatcactaaactatatcaacttgttctgtgtagtattctgtgtttgttagcaggggtaataacagaacattgtttcttttcattgttgtttgagttctttcttggcttaggttatagcgctctatttgctcaaatttcaaaaacagtgggtagaaaagatatttttacaggcgatttgttgaaccttttttattgttcagcttgctttgtaatttttttctaa

SEQ ID NO: 14027 - DNA, 78 bp, unidentified; identical to SEQ ID NO: 6331
  source 1..78: mol_type = other DNA
  misc_feature 1..78: note = Synthetic

SEQ ID NO: 14028 - DNA, 1776 bp, unidentified
  misc_feature 1..1776: note = Synthetic
  source 1..1776: mol_type = other DNA
atgcagcaacagccacctcctgatcccgcaatgcgggcggcgctgcagagccagccgtccggcattaactcctcggacgattggacccaggccatgcaacgcatcatggcgctgacgacccgcaaccccgaagcctttagacagcagccccaggccaaccggctctcggccatcctggaggccgtggtgccctcgcgctccaaccccacgcacgagaaggtgctggccatcgtgaacgcgctggttgagaacaaggccattcgcggcgacgaggccgggctggtgtacaacgcactgctggagcgcgtggcccgctacaacagcaccaacgtgcagaccaacctggaccgcatggtgaccgacgtgcgcgaagccgtggcccagcgcgaacggttccaccgcgagtccaacctgggatccatggtggcactgaacgccttcctcagcacgcagcccgccaacgtgccccggggccaggaggactacaccaacttcattagcgccctgcggctaatggtgaccgaggtgccccagagcgaggtgtaccagtcgggcccggactacttcttccagaccagtcgccagggcttgcagaccgtgaacctgagtcaggctttcaagaacttgcagggactgtggggcgtgcaggctccggtcggggaccgcgcgacggtgtcgagcctgctgacgccgaactcgcgcctgctgctgctgctggtggcgcccttcacggacagcggtagtatcaaccgcaactcgtacctgggctacctgattaacctgtaccgcgaggccattggccaggcgcacgtggacgagcagacctaccaggagattacccacgtgagccgcgcccttggccaggacgacccgggcaatctggaagccaccctgaacttcttgctgaccaaccggtcgcagaagatcccgccccagtacgcgctgagcgccgaggaggagcgtatattgagatacgtgcagcaaagtgtgggactgttcctgatgcaggagggggccacccccagcgccgcgctcgacatgaccgcgcgcaacatggagcccagcatgtacgccagtaatcgcccgtttattaataagctgatggactacctgcatcgggcggccgccatgaactctgactatttcaccaacgccatcctgaacccccactggctcccgccgccggggttctacacgggcgagtacgacatgcccgaccccaatgacgggtttctgtgggacgacgtggacagcagcgtgttctccccccgaccgggtgctaacgagcgccccttgtggaagaaagagggcagcgaccggcgcccgtcctcggcgctgtccggccgcacgggtgctgccgcagcggtgcccgaggccgccagtccctttccgagcttgtcactgaacagcgtccgcagtagcgagctgggcaggatcacgcgcccgcgcttgctgggcgaggaggagtacttaaataactcgctgttgaggcccgagcgggagaagaacttccccaataacgggatagagagtctggtggataagatgagccgctggaagacgtacgcgcatgagcacagggacgatccccgggcaacgcagggggccaccagccggggcagtgccgcccgtaaacgccgctggcacgacaggcagcggggactgatgtgggacgatgaggattccgccgacgacagcagcgtgttggacttgggcgggagtggtggtggtaacccgttcgctcacctgcgcccccgcgtcgggcgcctgatgtaa

SEQ ID NO: 14029 - DNA, 789 bp, unidentified
  misc_feature 1..789: note = Synthetic
  source 1..789: mol_type = other DNA
atggcggaacttgtttgtgatgcactggctaccttaacccgcaacacatatggtgacaacgatgaatcagctaaattttgcagaatgtttcgaactatgataagagattctggtctatacggcaatattgaaaactggagagccgcattctacagagagcgattgccaaaaagaatgtcacactcaactgtatcaattcaattagataatttagaacgcgaggtgctaaaaattagagctgaaggattttgtcagggatatactagaaaggagagaactttgaatgcatttgatttgagtgatgatggcaaaggaaatacaataattaaaccaacaacacatctttctagcattattctgcaaaattcatataattcggcttttaagcttccaaaaattccagatggactacttgaaaaaactagatatgaattggaggaagaaaagaaaaataatgatattttgaagcaaaagatcaaagaactagaaaacacaatttctcaattagaaaactatgaaaatgaagctaaagcttctcaatttgttttagaacatcttaaattcacaaatgaatccctaaaaattcaaagagatgaagctcaaatttgcttaattggtctctgtaataaattcggtttacagtgtgaaatcgataattccattcatgttactgaatcagataagaaaggaaaacggaagggcaggaaaaatagaagaattgaagtttcatttggtgctccaggacatgacttgaccgaacaaattagtactttaagtgatgttgaatga

SEQ ID NO: 14030 - DNA, 912 bp, unidentified
  misc_feature 1..912: note = Synthetic
  source 1..912: mol_type = other DNA
atggctgaacttcttaaagtgtgttttgatgagatgatgaaaagtggaaattgtagttttgaacatctaatggagaagatgaatgacgctggaattgatttggataaatggaagcaagcttttgatggtgctagactaccacaaagaatgactaaatcgacccttgcaatacaaaacacaaatctggagaaagagattgtcatgctgagagcgaaggaacaccgacacggttacgacaaaaacaaaagaacacttgcaaattttgacgttgagaggaaaaatgggaatacaattctaactccaaaaaccagactggctgaaattattctgctgaattcaacacgggatctgaaactaagcgcaccaccatccgactatattgaggagctagaggataaagtggcacaactggaagaagagagactgaatctaatgcgctgcaacaatgatatctactatcaatacctcacattacacacaactagttactgtcttcaagaaaccaacaaatggcaagaaaaaatgatctcaagactacaagaaaacgaaatggtgatgtcaagtgaaataaatgatctgaaatcaatggtaagaacactgacgagggagctaaattatgaaatttcatttgaagatgaaccagacacaggatacatttcggatgagaacagtcaagtcagtgaagatgatctgtctgaacaagagttagacaatgaccaacaagatgaaaatgagtcaagtgatgaagaaatatttgaggatcttgacgatctaatcaaccaatatgaacaaagacagagactaatggagagagaacgaattctcaatgaactacaagcaccagactatgacaccgagactgatgatgagaatgaatatgcatacaacattgagagagagcatagacattga

SEQ ID NO: 14031 - DNA, 1182 bp, unidentified
  misc_feature 1..1182: note = Synthetic
  source 1..1182: mol_type = other DNA
attcggaaagccatgtcgacgcgacacacacagaggacgggcggacgcatctcggtccggcgcaacgaggcgagactggcccacgcgcgagcccgtgcccgcttcgactggctgctcctggcccgcggcaggccgtccaaactgtacggctatgcgagccggcatcgcggagaactgatccacctaccgtggccgccgtgctggtgtctagaactccaccacgatccgtacagagacgccagaagtgccaccgtgtggggccaccgctggggttggccagcgacgcacgtgagacccagatgcgttcaagactgcgccctagactcctgtctgtacgtatgttgcggatacggagagaaacttcaacccgtgggtttcgtaaagtcgtatgtaaccaactcccagctcgacacgctccgcgtgctcctggtgggcaaagacggagccgtgtacgtccaccacatgagggcggcaagactctgccgactggcgtcgagcacaacggagtttacaagacgagggctgcaacgcgacgccgtgacgtatgaagaagacctagagctgccggaccagcgtatgtgcggaacgaacgcccgacatctgttcgacgtgatcgccgcggccgccgacgaacacaacctgctgaccgtcggcggcctgtgtcagacgcacgccggagtgtcctgcaacttactagagaccgtgggagatccgtggacggcggttccggccgcgcgcatgactctgaccgtgccgcaggttcagtaccggttatggcccgaagcccggagagacctccgccggcacctgtacgcgggccaccccctgggaccgtggctcgtgtgcggcgttctctctcgagagagggagacgcagaagccgtcgcctccgatacgtacgactgtgggaaacgtaccaacgccggggccacgcgaggtggagatcgcttgggtggtcttgactttggcgggacctctgttagcgttctggcccgataccggcaagatctgtcgtctggcaaactcgttttccaccttatggaagatgggaccgcgggccatgagaggacactggacgtactcggccccgggtagacatctccccggggacgcgtggccactgtgcgaacacgtgagaccgcaggtgggaaagcttccgaggaagagagcgtacctggattag

SEQ ID NO: 14032 - DNA, 1182 bp, unidentified; identical to SEQ ID NO: 14031
  misc_feature 1..1182: note = Synthetic
  source 1..1182: mol_type = other DNA

SEQ ID NO: 14033 - DNA, 1329 bp, unidentified
  source 1..1329: mol_type = other DNA
  misc_feature 1..1329: note = Synthetic
atagaaatctttcagacaaagatgactcaagggaaaatgactcccgaagagctaaagaaattagaacatgagtacaatcaaactgagaaggcattgacagagtcatctcagaaactgattcaagagatagatcaagctggtcaaaaccctgactccatccaacaacagtccataaaacagagatctgatgttgttgatgcttacaggaacaaattgaaagagttgcagggcatgattgctgccgggcaagctatgcttgctgaagaggcaaaaaagaaaagaaagccagatgtgccgggggttgaagaaggtgattatctcactgcaaagtcatcccttcggtatgggaacgttgtcgacctcaatccactcagcctagaagaacctgcaggccaaactgccaattggggaaagatattcgaatacattttgacccttacacaggttcttctccttaaaggcctctacatcttgaccacccgaggaagacagactagtaaagacaacaaaggtactagaatcaagcttaaggatgactcatgcatggaggaccggaatgggataaaacaacacaagtacctttacatatcccttccaacaagccaatcttccatccaagatgatgaactcacacctggacgttttaggacaatgatctcaggactcttgccaaatgagataaaggcaaaaaagctgatgagccctgtaatgggtgtcattggttttcaacatttagctgaggcttggccaggtgcaatggaaaagatgttgagtgaccagtgtgaatatatgaccaaggataaagcaaacccatcaaatagcactaatagggtttatttccgaacacgtcaggcccaagttgatgcacttaatttgcctgatatctcagcactgagaatgtttgctgaccaaaattataaaataccagcagatattgagtcagaagccaccccatggttatttgcaaatgcaccagaccgatgccctcctactgttcttcaagtggcaggtatcccggaacttggtgctttccttgcactcatgcaggacatacggggtgggattcttgcctctagtcttcgtggaacaggagaagagaagatagctaagaaatcatcattctatcaatcatatgtgagaagaacacaatcaatgggtgttaactgtgatcagaagatcatccacatctttatggattacttgggctcatattgtgttgaccactttaaccttggtgatgatatggatccagaactcaaggccaaggctcaggccctacttgagaagaaagtaaaggagatttcaagtcaggagcctattaaactgtaa

SEQ ID NO: 14034 - DNA, 24 bp, unidentified
  source 1..24: mol_type = other DNA
  misc_feature 1..24: note = Synthetic
atgggtggcaggagatggcactga

SEQ ID NO: 14035 - DNA, 72 bp, unidentified; identical to SEQ ID NO: 6345
  misc_feature 1..72: note = Synthetic
  source 1..72: mol_type = other DNA

SEQ ID NO: 14036 - DNA, 21 bp, unidentified
  misc_feature 1..21: note = Synthetic
  source 1..21: mol_type = other DNA
atgccagaagtaagcctataa

SEQ ID NO: 14037 - DNA, 192 bp, unidentified
  misc_feature 1..192: note = Synthetic
  source 1..192: mol_type = other DNA
atgttttattgccttgtaatttttgtaattattttttgtctaatgctgagaagctgctttttgatcattttgatttgcatcttgtctggagagacaatttggtgtttggatgctgtcaagggtgtgctagaactgttagcctattggagtttgttttatattatcaggagtcttatgaggtaccggaaatag

SEQ ID NO: 14038 - DNA, 1005 bp, unidentified
  source 1..1005: mol_type = other DNA
  misc_feature 1..1005: note = Synthetic
atagaaaggatgactacgaccacgcatagcaccgccgctatcatgagcctgctggacgaggccgagtggcgacagacgcagatggacgtggggggactgatccaggcgtcggcgttgggcaaggtggcgcttcgctacgcggtgaggaaactgatgaagcgcggagccaggctgcggcacgactcgggtctctacgtgtgcatctgcgacccctcttacgagtttctgcagatgaacctgagcaagatcagttggctggagcgacactgccccccgttggaccaggagctcatcatgttcggggtcatcgaggcctgggaggaagcttcggtgcggcccacgcgtcagctggtgttgttcatgacgcccaagtgggacgtgttcgcctacgactccggtatcctgtttttcctggcgcccagcatggcgcagttctggcacggtgccatagtgctggagtattggaacgctttgttcccggtggaggtgcgctcccacgtccgtcagcacgcgcacactatggacgacctggtgatggtcttccaccagctggactacgaaaagcaggtgctggaagcgcgtcgcgacaagaatacggaggggccgcgcacttttgccaagtcggtgaacagctacgtgcgcgccatcctggaatctgagcggcgaatccgcgaagggaaaattcctatgaccttcgtggatcgcgactcgctgcgagccaattcgttggcccacatccaggccaccggggctcagccttctcacgctccggcgcaacgggtgctgtccgcgccgccgagcctgccgtcgcccgtgtcggaagaagaccccgctgccgccgccacccctccgtcctccgccgccaccacccccccgtcctctgtcgtcccggcctccgtcgagagcgagttgtcctcgtcgccgccgttgccgccggtcgtggtgaaggatgtgatgtacacggccggggagggcgacgtggtacagatggtggtcgtggtctag

SEQ ID NO: 14039 - DNA, 123 bp, unidentified; identical to SEQ ID NO: 6354
  source 1..123: mol_type = other DNA
  misc_feature 1..123: note = Synthetic

SEQ ID NO: 14040 - DNA, 21 bp, unidentified
  source 1..21: mol_type = other DNA
  misc_feature 1..21: note = Synthetic
atgcaagatataaagaaataa

SEQ ID NO: 14041 - DNA, 6702 bp, unidentified
  source 1..6702: mol_type = other DNA
  misc_feature 1..6702: note = Synthetic
atggacaccgagtcccacagcggcacaacatctgacattctgtaccctgaatgtcacctcaattctcctatagttaaaggaaagatagcacaactgcatacaataatgagtttgcctcagccctacgatatggatgatgattcaatactgattattactagacaaaaaattaaactcaataaattagataaaagacaacggtcaattaggaaattaagatcagtcttaatggaaagagtaagtgatctaggtaaatatacctttatcagatatccagagatgtctagtgaaatgttccaattatgtatacccggaattaataataaaataaatgaattgctaagtaaagcaagtaaaacatataatcaaatgactgatggattaagagatctatgggttactatactatcgaagttagcatcgaaaaatgatggaagtaattatgatatcaatgaagatattagcaatatatcaaatgttcacatgacttatcaatcagacaaatggtataatccattcaagacatggtttactattaagtatgacatgagaagattacaaaaagccaaaaatgagattacattcaataggcataaagattataatctattagaagaccaaaagaatatattgctgatacatccagaactcgtcttaatattagataaacaaaattacaatgggtatataatgactcctgaattggtactaatgtattgtgatgtagttgaagggaggtggaatataagttcatgtgcaaaattggatcctaagttacaatcaatgtattataagggtaacaatttatgggaaataatagatggactattctcgaccttaggagaaagaacatttgacataatatcactattagaaccacttgcattatcgctcattcaaacttatgacccggttaaacagctcaggggggcttttttaaatcacgtgttatcagaaatggaattaatatttgcagctgagtgtacaacagaggaaatacctaatgtggattatatagataaaattttagatgtgttcaaagaatcaacaatagatgaaatagcagaaattttctctttcttccgaacttttggacaccctccattagaggcgagtatagcagcagagaaagttagaaagtatatgtatactgagaaatgcttgaaatttgatactatcaataaatgtcatgctattttttgtacaataattataaatggatatagagaaagacatggtggtcaatggcctccagttacattacctgtccatgcacatgaatttatcataaatgcatacggatcaaattctgccatatcatatgagaatgctgtagattattataagagcttcataggaataaaatttgacaagtttatagagcctcaattggatgaagacttaactatttatatgaaagataaagcattatccccaaagaaatcaaactgggacacagtctatccagcttcaaacctgttataccgcactaatgtgtctcatgattcacgaagattggttgaagtatttatagcagatagtaaatttgatccccaccaagtattagattacgtagaatcaggatattggctggatgatcctgaatttaatatctcatatagtttaaaagagaaagaaataaaacaagaaggtagactttttgcaaaaatgacatacaagatgagggctacacaagtattatcagaaacattattggcgaataatatagggaaattcttccaagagaatgggatggttaaaggagaaattgaattactcaagagactaacaacaatatctatgtctggagttccgcggtataatgaggtatacaataattcaaaaagtcacacagaagaacttcaagcttataatgcaattagcagttccaatttatcttctaatcagaagtcaaagaagtttgaatttaaatctacagatatatacaatgatggatacgaaaccgtaagctgcttcttaacgacagatcttaaaaaatattgtttaaattggaggtatgaatcaacagctttattcggtgatacttgtaatcagatatttgggttaaaggaattatttaattggctgcaccctcgccttgaaaagagtacaatatatgttggagatccttattgcccgccatcagatattgaacatttaccacttgatgaccatcctgattcaggattttatgttcataatcctaaaggaggaatagaagggttttgccaaaagttatggacactcatatctatcagtgcaatacatttagcagctgtcaaaatcggtgtaagagttactgcaatggttcaaggggataatcaagccatagctgttaccacaagagtacctaataattatgattataaagttaagaaagagattgtttataaagatgtggtaagattttttgattccttgagagaggtgatggatgatctgggtcatgagctcaaactaaatgaaactataataagtagtaaaatgtttatatatagcaaaaggatatactatgacggaagaatccttcctcaggcattaaaagcattgtctagatgtgttttttggtctgaaacaatcatagatgagacaagatcagcatcctcaaatctggctacatcgtttgcaaaggccattgagaatggctactcacctgtattgggatatgtatgctcaatcttcaaaaatatccaacagttgtatatagcgcttggaatgaatataaacccaactataacccaaaatattaaagatcaatatttcaggaatattcattggatgcaatatgcctccttaatccctgctagtgtcggaggatttaattatatggccatgtcaaggtgttttgtcagaaacattggagatcctacagtcgctgcgttagccgatattaaaagatttataaaagcaaatttgttagatcgaggtgtcctttacagaattatgaatcaagaaccaggcgagtcttcttttttagactgggcctcagatccctattcatgtaacttaccacaatctcaaaatataaccaccatgataaagaatataactgcaagaaatgtactacaggactcaccaaacccattactatctggattatttacaagtacaatgatagaagaggatgaggaattagctgagttcctaatggacaggagaataatcctcccaagagttgcacatgacattttagataattctcttactggaattaggaatgctatagctggtatgttggatacaacaaaatcactaattcgagtagggataagcagaggaggattaacctataacttattaagaaagataagcaactatgatcttgtacaatatgagacacttagtaaaactttaagactaatagtcagtgacaagattaagtatgaagatatgtgctcagtagacctagccatatcattaagacaaaaaatgtggatgcatttatcaggaggaagaatgataaatggacttgaaactccagatcctttagagttactgtctggagtaataataacaggatctgaacattgtaggatatgttattcaactgaaggtgaaagcccatatacatggatgtatttaccaggcaatcttaatataggatcagctgagacaggaatagcatcattaagggtcccttactttggatcagttacagatgagagatctgaagcacaattagggtatatcaaaaatctaagcaaaccagctaaggctgctataagaatagcaatgatatatacttgggcatttgggaatgacgaaatatcttggatggaagcatcacagattgcacaaacacgtgcaaactttacattggatagcttaaagattttgacaccagtgacaacatcaacaaatctatcacacaggttaaaagatactgctactcagatgaaattttctagtacatcacttattagagtaagcaggttcatcacaatatctaatgataatatgtctattaaagaagcaaatgaaactaaagatacaaatcttatttatcaacaggtaatgttaacaggattaagtgtatttgaatatctatttaggttagaggagagtacaggacataaccctatggtcatgcatctacatatagaggatggatgttgtataaaagagagttacaatgatgagcatatcaatccggagtctacattagagttaatcaaataccctgagagtaatgaatttatatatgataaggaccctttaaaggatatagatctatcaaaattaatggttataagagatcattcttatacaattgacatgaattactgggatgacacagatattgtacatgcaatatcaatatgtactgcagttacaatagcagatacaatgtcgcagctagatcgggataatcttaaggagctggttgtgattgcaaatgatgatgatattaacagtctgataactgaatttctgaccctagatatactagtgtttctcaaaacatttggagggttactcgtgaatcaatttgcatataccctttatggattgaaaatagaaggaagggatcccatttgggattatataatgagaacattaaaagacacctcacattcagtacttaaagtattatctaatgcactatctcatccaaaagtgtttaagagattttgggattgtggagttttgaatcctatttatggtcctaatactgctagtcaagatcaagttaagcttgctctctcgatttgcgagtactccttggatctatttatgagagaatggttgaatggagcatcacttgagatctatatctgtgatagtgacatggaaatagcaaatgacagaagacaagcatttctctcaagacatcttgcctttgtgtgttgtttagcagagatagcatcttttggaccaaatttattaaatctaacatatctagagagacttgatgaattaaaacaatacttagatctgaacatcaaagaagatcctactcttaaatatgtgcaagtatcaggactgttaattaaatcattcccctcaactgttacgtatgtaaggaaaactgcgattaagtatctgaggattcgtggtattaatccgcctgaaacgattgaagattgggatcccatagaagatgagaatatcttagacaatattgttaaaactgtaaatgacaattgcagtgataatcaaaagagaaataaaagtagttatttctggggattagctctaaagaattatcaagtcgtgaaaataagatccataacgagtgattctgaagttaatgaagcttcgaatgttactacacatggaatgacacttcctcagggaggaagttatctatcacatcagctgaggttatttggagtaaacagtacaagttgtcttaaagctcttgaattatcacaaatcttaatgagggaagttaaaaaagataaagatagactctttttaggagaaggagcaggagctatgttagcatgttatgatgctacactcggtcctgcaataaattattataattctggtttaaatattacagatgtaattggtcaacgggaattaaaaatcttcccatcagaagtatcattagtaggtaaaaaactaggaaatgtaacacagattcttaatcgggtgagggtgttatttaatgggaatcccaattcaacatggataggaaatatggaatgtgagagtttaatatggagtgaattaaatgataagtcaattggtttagtacattgtgacatggagggagcgataggcaaatcagaagaaactgttctacatgaacattatagtattattaggattacatatttaatcggggatgatgatgttgtcctagtatcaaaaattataccaactattactccgaattggtctaaaatactctatctatacaagttgtattggaaggatgtaagtgtagtgtcccttaaaacatccaatcctgcctcaacagagctttatttaatttcaaaagatgcttactgtactgtaatggaacccagtaatcttgttttatcaaaacttaaaaggatatcatcaatagaagaaaataatctattaaagtggataatcttatcaaaaaggaagaataacgagtggttacagcatgaaatcaaagaaggagaaagggattatgggataatgaggccatatcatacagcactgcaaatttttggattccaaattaacttaaatcacttagctagagaatttttatcaactcctgatttaaccaacattaataatataattcaaagttttacaagaacaattaaagatgttatgttcgaatgggtcaatatcactcatgacaataaaagacataaattaggaggaagatataatctattcccgcttaaaaataaggggaaattaagattattatcacgaagattagtactaagctggatatcattatccttatcaaccagattactgacgggccgttttccagatgaaaaatttgaaaatagggcacagaccggatatgtatcattggctgatattgatttagaatccttaaagttattatcaagaaatattgtcaaaaattacaaagaacacataggattaatatcatactggtttttgaccaaagaggtcaaaatactaatgaagcttataggaggagtcaaactactaggaattcctaaacagtacaaagagttagaggatcgatcatctcagggttatgaatatgataatgaatttgatattgattaa

SEQ ID NO: 14042 - DNA, 27 bp, unidentified
  source 1..27: mol_type = other DNA
  misc_feature 1..27: note = Synthetic
atgcaaagtaggaggagtcatttctga

SEQ ID NO: 14043 - DNA, 27 bp, unidentified
  misc_feature 1..27: note = Synthetic
  source 1..27: mol_type = other DNA
atgcaaagtaggaggagtcatttctga

SEQ ID NO: 14044 - DNA, 42 bp, unidentified; identical to SEQ ID NO: 2370
  misc_feature 1..42: note = Synthetic
  source 1..42: mol_type = other DNA

SEQ ID NO: 14045 - DNA, 42 bp, unidentified; identical to SEQ ID NO: 2370
  misc_feature 1..42: note = Synthetic
  source 1..42: mol_type = other DNA

SEQ ID NO: 14046 - DNA, 141 bp, unidentified; identical to SEQ ID NO: 6363
  source 1..141: mol_type = other DNA
  misc_feature 1..141: note = Synthetic

SEQ ID NO: 14047 - DNA, 45 bp, unidentified; identical to SEQ ID NO: 6364
  misc_feature 1..45: note = Synthetic
  source 1..45: mol_type = other DNA

SEQ ID NO: 14048 - DNA, 450 bp, unidentified
  misc_feature 1..450: note = Synthetic
  source 1..450: mol_type = other DNA
aggatgaacgtgacgcgcctcgagcaggtcatcgggctgcagcccttccacgacatggaccgcgtcaagatcaaccgcaaggaaaactgcatcctggggaaccgctgcttcgtaaagctggccgaggtcttccacatgccgcgctgctccgtgcccacgagcgccagcctgtgcgccaacaaccactctttcacgctgcacgagctgctgtactcgccgttccactacaagcagccgcagtaccagtacctgctgccgagcttcgtcttcacctgcattgagctcgcgcgcaagaacaaccagacgtgctactactgtaaggcggaccgcgcgaacgaggagggcagcctcaacctgaacatcttcgtgcccacgctggcgcgctccatgtacgtcgtcatcggcatccggatcaaggactactgggtcgaggccttcgagatcgtgtag

SEQ ID NO: 14049 - DNA, 42 bp, unidentified; identical to SEQ ID NO: 6368
  source 1..42: mol_type = other DNA
  misc_feature 1..42: note = Synthetic

SEQ ID NO: 14050 - DNA, 192 bp, unidentified
  source 1..192: mol_type = other DNA
  misc_feature 1..192: note = Synthetic
atggtgttcccgatcgtgtgctcgacgtgcggccgcgacctgtcgcacgagcggtttctgctcatcgtgcgacagcggccgctaaaggttgttttgcggacggtgcgcaacgtctgctgccgtataaagttgtctacacaaatagagccgcaccggaacctgacggtgctgcccatgcttgacataagctga

SEQ ID NO: 14051 - DNA, 132 bp, unidentified; identical to SEQ ID NO: 6370
  misc_feature 1..132: note = Synthetic
  source 1..132: mol_type = other DNA

SEQ ID NO: 14052 - DNA, 75 bp, unidentified
  misc_feature 1..75: note = Synthetic
  source 1..75: mol_type = other DNA
atgccagtgatacaagataaacccattcattcgtcaagatttaagaatattcaagctgatctcaaaacatcctga

SEQ ID NO: 14053 - DNA, 165 bp, unidentified
  source 1..165: mol_type = other DNA
  misc_feature 1..165: note = Synthetic
acgagccgctgctcctgctctgttgcgttggcgccagcctggcggccaaccgcctgctctcgcgcgccagcaagctcgatgccgttttctccgtgcacgccgtctttttcctgtggtttttgttccactttctctattcagtgttttaattttccaacctgttaa

SEQ ID NO: 14054 - DNA, 114 bp, unidentified
  source 1..114: mol_type = other DNA
  misc_feature 1..114: note = Synthetic
atgccagcccaacaaaatccgccggggtgccagtcccattcccgaaggcgtagcccgttaacttggctggcttggatggggagtagggccttttccattaccccaaggacctag

SEQ ID NO: 14055 - DNA, 195 bp, unidentified
  misc_feature 1..195: note = Synthetic
  source 1..195: mol_type = other DNA
atgtgcccggcccgcgcccgcccacccgtcgtcaaaggcacgaccgtcagcggggtctggtgtgggaggacgatgactcggcagacgacagcagcgtcctggatttgggagggagtggcaacccgtttgcgcaccttcgccccaggctggggagaatgttttaaaaaaaaaaaaaaaaagcatgatgcaaaataa

SEQ ID NO: 14056 - DNA, 141 bp, unidentified; identical to SEQ ID NO: 6377
  misc_feature 1..141: note = Synthetic
  source 1..141: mol_type = other DNA

SEQ ID NO: 14057 - DNA, 234 bp, unidentified
  source 1..234: mol_type = other DNA
  misc_feature 1..234: note = Synthetic
atgtctgcccccggatgctctgaaagacaggataagaagcgaggcactattggggagagagaatttggagaattgctgagctgggaccccactgaccttccccggacggtggcccgcgtctacgtggcggtgggaggtctctttgagcaggaggtctctgaggtgcagcgcctggagaatatttgcaccctcctggacctggccggggtggaatgtcagaccaaggccgattga

SEQ ID NO: 14058 - DNA, 234 bp, unidentified
  source 1..234: mol_type = other DNA
  misc_feature 1..234: note = Synthetic
atgtctgcccccggatgctctgaaagacaggataagaagcgagtcactattggggagacagaatttggacaattgctgagctgggaccccactgaccttccccggacggtggcccgcgtctacgtggcggtgggaggcctctttgagcaggaggtctctgaggtgcagcgcctggagaatatttgcaccctcctggacctggccggggtggaatgtcagaccaaggccgattga

SEQ ID NO: 14059 - DNA, 234 bp, unidentified
  misc_feature 1..234: note = Synthetic
  source 1..234: mol_type = other DNA
atgtctgcccccggatgctctgaaagacaggataagaagcgagtcactattggggagagagaatttggagaattgctgagctgggaccccactgaccttccccggacggtggcccgcgtctacgtggcggtgggaggtctctttgagcaggaggtctctgaggtgcagcgcctggagaatatttgcaccctcctggacctggccggggtggaatgtcagaccaaggccgattga

SEQ ID NO: 14060 - DNA, 24 bp, unidentified
  misc_feature 1..24: note = Synthetic
  source 1..24: mol_type = other DNA
aagaagataacagtcaatcaataa

SEQ ID NO: 14061 - DNA, 129 bp, unidentified
  misc_feature 1..129: note = Synthetic
  source 1..129: mol_type = other DNA
atagaccagttaaaacgaaagaccgatactgttataaagcggaacttaacaggtcaaagtattaccatgacgtacaaggattttcacttggccaatctgatttacacattgatcctacacagtttataa

SEQ ID NO: 14062 - DNA, 102 bp, unidentified; identical to SEQ ID NO: 6388
  misc_feature 1..102: note = Synthetic
  source 1..102: mol_type = other DNA

SEQ ID NO: 14063 - DNA, 150 bp, unidentified; identical to SEQ ID NO: 6389
  source 1..150: mol_type = other DNA
  misc_feature 1..150: note = Synthetic

SEQ ID NO: 14064 - DNA, 42 bp, unidentified; identical to SEQ ID NO: 6391
  source 1..42: mol_type = other DNA
  misc_feature 1..42: note = Synthetic

SEQ ID NO: 14065 - DNA, 114 bp, unidentified
  source 1..114: mol_type = other DNA
  misc_feature 1..114: note = Synthetic
atggtacttcttctatgttgtcatccggggccgggagacccggcctgtccttgtccattttgtctgcaacgaaagtgtgactcaccaacaccgcaccccccttgcacctattaa

SEQ ID NO: 14066 - DNA, 420 bp, unidentified
  source 1..420: mol_type = other DNA
  misc_feature 1..420: note = Synthetic
atgagagccgatcgggaagaactggatttcctgccaccagttggaggattggctgttgatgtgatggaagtagaagtttctgcggcgcgccgagcattcgtgtttgtgcttgtacagacggccgcagtagtcgcagcgttgcacgggttgtatctcgtgaatgagttgtacctggcttcccttgacgagaaatttcagtgggaagccgaggcctggcgattgtatctcgtgctcttctatattcgctgtatcggcctgttcatcttctgtttcgatggtggtcatgctgacgagcccccgcgggaggcaagtccagacctcggcgcgggaggggcggagctgaaggacgagagcgcgcaggctggagctgtccagagtcctgagacgctgcggactcagggactgcacgcagagatctga

SEQ ID NO: 14067 - DNA, 48 bp, unidentified; identical to SEQ ID NO: 6398
  source 1..48: mol_type = other DNA
  misc_feature 1..48: note = Synthetic

SEQ ID NO: 14068 - DNA, 63 bp, unidentified; identical to SEQ ID NO: 6399
  misc_feature 1..63: note = Synthetic
  source 1..63: mol_type = other DNA

SEQ ID NO: 14069 - DNA, 1242 bp, unidentified
  source 1..1242: mol_type = other DNA
  misc_feature 1..1242: note = Synthetic
aggaaaggtaccatcactgcaaagggctccgaaatcagggtactagacatggccgcatttacagatgaagaaatagacaacatcctttcatctagcgggatcgtgatagacgaaataattactgcagaaggaccaccaagtgggacagtggggaaaagctccattcctcataatgccacaagaaacaaagttgccgcatgggaagctcatctagcgaaacaacaaacatccacagatgatgagaaaggggatcagggctcaaccgggagaagccccagcgaggacgctgagccaggagccagtattgatccccagtccggcaccggtaacaatccggaggataatgctgattcaccgactctagaaaatgccagagcaccgtccgacggtttacttaacatgcttgacaaaattgcatccagggcagctgagaagagtcagtcaaaagaagcccaggcatcatacaatgagaacccaacaactaaaaaagggcagatgatagctggcaaggggaatcaagttcaggctgggacaaaaaagaaaattccaaaatcgggatccccccaaagtggcgaccgggacacaggagagagcactcaatatcatggagcacagaagggatcatcaccacaagctggtgcaacccagactgtgcacccatcacatcaacaccccagcagttcgcctgtagatgcggcaaatgccctaaattttgcagactttgctcacgcgatgttagggatgatggagagcatgaatcacaggatgagtaaacttgaatactcaatagagttgattttaaagcatgtgtcatgctgtccactaatcaggactgacatacaacaattgaagactgctgtcgcagtaatggaagggaatataagtatgatgaaactaatggatcctgggaatgctaatatatcatcccttaacgatttgcggaaggtttcgcaactcaggcctgtgctgattgctggtcctggagacccgtctccatatgttgccaatgacggaagcattgcagttaaccaattatcccaacctgtcacgaacagagatgaacttgttaaaacacttgttcctcaagctcctgacttgatggtaaagaaggagtcggttggagcactgataaaatcaagaccaatgcatcctgcagctgcaaaacgactgctagataagcttgcatctgctaccacaatagatgatatcaagaaagtgaaacggcttgcactcaatggctaa

SEQ ID NO: 14070 - DNA, 42 bp, unidentified
  misc_feature 1..42: note = Synthetic
  source 1..42: mol_type = other DNA
atgccacaagaaacaaagttgccgcatgggaagctcatctag

SEQ ID NO: 14071 - DNA, 762 bp, unidentified
  source 1..762: mol_type = other DNA
  misc_feature 1..762: note = Synthetic
ttggactacgaccgaccacacgacatgcaggcttctgagccgcgaatccccaccatggcgttgggggctgggcatgcccacgcatgcagggatgacggagatgatagcgtgattgacgccccgcccccatacgagagtgtggccggcgcgagcgcgggccagtttgtcgttattgatatcgacacccccacggactcgcctccaccgtactctgcagggacgtcgccggttgggcttgtttcaccggcttcttccggtgacggcgaggtgtgtgagcgtggccgctcgcgccgcgccgcctggcgggccgctcggcgcgccaggcgccgcgccgaacgacgggcgcggcgccggagctttggcccaggggggttgtttgtggagacccccctgtttctaccggaaactatgattggggcccaccctggcgtgggaggcgacctcccgtcgggcctccctacttacgcagaggcgacctcggatcgcccccccacctacgccatggtcatggccgcatgtccgaccgagccaccgggcgggtccgtggggccggccgaccaaccccgcgtgcaaagctcgcgcacgtggcgacccccgcttgtcaattcgcgagagctgtaccgggcccaacgcgcggcccgctgtgcgtcgagctccgacacgccccaagccccagggtggtgtggcgggacgtgtcgtcatgcggtttttggggtggtcgcggtggtcgtcgttatcatcttggccttcctttggcggtaa

SEQ ID NO: 14072 - DNA, 2949 bp, unidentified
  source 1..2949: mol_type = other DNA
  misc_feature 1..2949: note = Synthetic
atgtcactaatagggacgctcgagaagtacctctcagcacttgaagaaataaaaacaaaaggaggactacaaaaaatacatgatgatttgctacatgaattagacatgtttattgatgatatagacattaaagaagagaaagaaaccaaaattttgttcgaaaaaataagcagactattaaaaaagaagggcataaagacaacgccaatagaaaatgaatttaattcaaaaaaattcacagaaaagaatggcactgcagaaacagacaatatgagcaaaagaacagaagaaactatgactgaaaaagaaaatggaaatgctaacaccacacaacataacgtgaagagtgatggtgaaaagcgacatgacgacaattctaatatcaattcatatattcaaaatgtcataaacattagagatattttatccaaaacattattcgtcgatactgacgcagatgactatgcaatataccttccatcagaagttccggaatcaataaaaccaatccagatcgacgttatacctatcaatatgtttgagacatttgctaacatgagaaaaatcaatacaataaacatttcaaacaatgacttggtatctgacacatacggtccagcagaagtattgtatgacagcatatttttctcagatatggaccttgaaaagtacggtaacattgaaaaatacttcttatacaaagcttcaaacgtatcacggaaattgccaaatgttaattatatgaccgaatgcacaaaaattccaaacccatataacaacgataacacaattacgacgatgtttggacaagggacgtattatgacatgctaatggatcgtacagataagagtttgactggaagaagaactgatgctcagtatgatgatatttctgttgatgcaataaacagacaaatatccatatcactacggatacatccagtagatgatcagctactcaacatagccataaacaattgcatccagacacagccattacaaccggtcttaaatgaatacattatgatagcggctgatggatatgttgcatcccctaaaaaacgttatgataggaacacattgactatatcaaatgttttttcaccagttttcaatagactgtgtgtgttatcaggcacaacatacagagctagaactttacaatctatgacttttatgtcgagactgtggaaaaccaatgttttcaaaacatcactagaggatgatatagctaaaatgtatgctggagccgaaatttcaatgactacgatcgatggaacaacagccagtcttgctacaataaacatttctgcggccgaacaagctttaataggtatactaaatgcgtcattttttagattcgactttaacttaactggacctcaaaactcgttaggagctgcgatatcggcgttaatagcgttgatagtactaccaattgaccaagatacaatggataatgatacatatgatatgttgtgtaacactgtttttaatgaaatgatggcaaatgcaatgaacctaccagcgtttgtgcgaagagctggagatgaaaatgcgtttagaagatatgtgaatggaccaattccgagagaagcttctgcttttattagattcattttgttacgaagaggatggttgctttttcagagatctgatgatagaacgattcattgtgacatcttagtaccaaattgtgacacgcagaatgtaaatgatcaaccatatgttttactctcagacttcttcgctgcgatattggaatcttccagacgtaatccaaatccaggaaaaaatacatccgctaattcgtttagacgactaattcgaggacttagggacattgtctgtaacaaaatcatgccagctatgaggttaattaggtacaatgtagaaagaatagctagaattcaaagtatgttaccatattctgctgatcttgcattagttaacccctctttgagagatgaaagattgagagcaaacatcccattatcaggatttttatcattgttaatgggaatatcaaaggcaccagatgcatttgattggacaacagtattaacattttgtgattcaatgcgaaaattaaactatgctgaaacaatatcggtcgaagaagctctaaccgttgctatttcatcacatgatatagataaatcagtatcaaaaaaagacattataaaagacgtattgcacccaccaacttcagccgtagctgcgattacaaaggttccatcagcgtcactttctgcattgctatcagatacggttttaattaacctggtaaaaaactcaaaaccatttaggaaaattacagacatagtgaaagttttgaaagcagcttttcaacattcaccgactgcgagttatggagtagtcaaaggcgctctattgatgtcatcaccccaaaattttaggagatcatctcaatatgttaaaagagataatgtaatacacaatgtcgtagatggcattcaaaaattcaaagcagaagatctagttaaaggcaatcactttcctggtctaattaattcaataaagaacggtgatgatatatatatagaaggacctttaccagtaagaacatcgcattcatcggaggtcgctaccgcttctttcgcctttctaacaatgaattcaccatatgacgccttcattgatccaactgatttacaacatcaaagattaataaaaattagagcagttgaccatttttcagactcgtcaattgacatgataccatcgaaatttgacaatttgctagctaagacatcagtattcgtacatgatgctcaaagcttaatggtacagtcaaaatcaacagtgagacggttcaactaccacgaatcactattacatattgacatagcaaatctgattaacttctcagttgctttgccaactgaactacagctattcgatggaacattagtgtatgatgtgtag

SEQ ID NO: 14073 - DNA, 579 bp, unidentified
  source 1..579: mol_type = other DNA
  misc_feature 1..579: note = Synthetic
atgtccattcttatctcgcccagtaataacaccggttggggtctgcgcgctccaagcaagatgtacggaggcgcacgcaaacgttctacccaacatcctgtccgtgttcgcggacattttcgcgctccatggggcgccctcaagggccgcactcgcgttcgaaccaccgtcgatgatgtaatcgatcaggtggttgccgacgcccgtaattatactcctactgcgcctacatctactgtggatgcagttattgacagtgtagtggctgacgctcgcaactatgctcgacgtaagagccggcgaaggcgcattgccagacgccaccgagctaccactgccatgcgagccgcaagagctctgctacgaagagctagacgcgtggggcgaagagccatgcttagggcggccagacgtgcagcttcgggcgccagcgccggcaggtcccgcaggcaagcagccgctgtcgcagcggcgactattgccgacatggcccaatcgcgaagaggcaatgtatactgggtgcgtgacgctgccaccggtcaacgtgtacccgtgcgcacccgtccccctcgcacttag

SEQ ID NO: 14074 - DNA, 2934 bp, unidentified
  source 1..2934: mol_type = other DNA
  misc_feature 1..2934: note = Synthetic
aagcgctgcaagatggaagtgattgaaaagctcgagacaattagagaaacgttaaatgacacaaaagataaaaaagatttccaaaaaattcatgatgaactagttcaatatcttgacggtatagatccactgactatcgatgatgataaatggaatgaaatccttaaactttttaaaattatcatagtaaagttaaaaaactcaacaatcaaaacgacttctcttgaaaatgagttaacccaacatgagaaaaaaagaacggttaaagaagtggaaaaagttgaagaagacatgaaggtggatgtggcgaatgataatagcaaaccaactcttatggataaagtattacaggtgtcaagtcagccaaataatccatattctgctgatgtattacaaataagaacaattttatcaaaaactttgtttgttgatacggattctgaggcatattcactatatgttccagaatctcagaaacttgatgtttcaccaattactattgaattaactacgattgaaaagtatcaaccaaaggttaatattctcaaacaagcagttatagtcccatcacaaaatccattgctagcagatacctatggtgcacctgagatacttttttctactgatttctttgatgatatcacttcaaattcttcagaaggattacaattatatttctttgataaggcatacaaattaaaaaaagaattaccaaatctaccatttctttcatcattagataaggatgttaacccgcttaatccacttaattcagtatgtaaatcatttggacaagaaaagtattatgatatggtaatggatcgcaccgatagaggattagatgctagaagagcagcaatgcaatttgataatgttatcgttgatgcacaaaacagaaccgttcaatttaatgttagaatgcatccatttgatttacaattgctacgtatatctcaacagttcgctgagccaatgcaagatttggctccagttgtaagagagtatatgatgctaggagccgacggatatgtgttaacacagaagacaagattggatagagatcagcaattaatagctaacagaagatctgtggtatttgatagaatgtgtgaattgtcagggcctttatatagatcacgtattgttcattcaatgagaatgatgtcaaaattatggagaacgaatgtctttagaacttctcttgaagatgaaataaccaaaatttacgccgctgctgaggtatctatggtttctattgatgcgactacgtctgcactttccaccattaatattgcatcagctgaacaaacgctgaatgcgttattaaacatgtctttttttagatgtgagttagatttaattggtagtcagtcttcttttggagctgcaatgtctgcaatgattgcactaatgatactcccaacagatcaagaaaatatggatgacgaagtgtttgatgttctatgcaatcttgtttacaatgaattaatagcatgggctgctgatagacctgttttcgttaggagagctggagcaacaaacgcatttaggcaatttgttaatgctggattgaatcgtgacatcactaattatatgagatttgtattgttaagaagaccttggcttccactttacaactctagagatgtgcggagaaatgctcacgttctggttcctaatgttgatttagctaatattaatgatcaagtgtacgttgcaattaatagtttcctgaatggaattattgaagcatcaagaaggaacccaaatcctaataaaacgatttctgccaattcatttcgaaaattaatgaaaaacatgagagatatttgtgttaatagattgatgccagttataagattaattagatacaacgttgaaagaataggtatgattttgcacatgttaccatattcagcagacatttttgatatcaacagaaatttgagagatgaacggcttagaattaaaattccgatgtctggctttctgtccttagttatgggcataacgaaagctcctgatgcttttgattggtcacaggttctaaattttgctgatgatgtaaggaaaatggattatgctgaagcaatttcaattgaagattcagcatcagtggctataatgcggaatgatgctaatagagcaacttcgaagaaagaaattttcatttcagaagttaaaccaccaactccaactgtagcttcaatacaaaaaattccctcagcaactttgactgcaatgttttcagacagacagttaattaatttaattagagacactcattcattcagagtaattcgtgaaatagctgtagctctccaagcggcatttgataattcccctacatctcaacatggagttggtaaaggtgcagtgcttcatccagttccacaaaattttggcagatcttctcaattcgtgagaagagataacatattactgcaacgtccagctggaattcaacaatttacaatagaagacttaaaacaaggaagatattttcaaggtcttatggcacaaattagagccagacaaccgattatagttaatggccctattcctttaagaatttctgatgccgctgaaattgaacaagttacattagcatttctaactatgaattcaccatatgatgcatacattgatccaagagatttgaaacaacaaaaacttttgactgatagagaagtggatttatttatcgatcaaaatccagctagaccaaatgatgaatttgataatgtaatggctagaacatcagttttcataattgacgcccctagagctatcgttccaattaatcctcaaagactaaattttccatatcatgatattatggtaactgattctgtgactaagttcatcgaatttacagttgcactgactccagatctacaattatttaacggtttactagtatttgagcaataa

SEQ ID NO: 14075 - DNA, 84 bp, unidentified; identical to SEQ ID NO: 6414
  source 1..84: mol_type = other DNA
  misc_feature 1..84: note = Synthetic

SEQ ID NO: 14076 - DNA, 228 bp, unidentified
  misc_feature 1..228: note = Synthetic
  source 1..228: mol_type = other DNA
atgagccaaaagataaagttgcttttgatagctataatagtctattccctacatcaattttttcatatagcaggcaagaccgcctattcggtacttgtaatcatgttttggataataacattcattattcttttgctctctttgattctatggttgataatctttcaacctaccttccaaatgattggaatattattaagatatctgattcaattgattaccccatag

SEQ ID NO: 14077 - DNA, 1701 bp, unidentified
  misc_feature 1..1701: note = Synthetic
  source 1..1701: mol_type = other DNA
ataaaactgaaaatcaaaatgtccaacatggatattgacagtataaataccggaacaatcgataaaacaccagaagaactgactcccggaaccagtggggcaaccagaccaatcatcaagccagcaacccttgctccgccaagcaacaaacgaacccgaaatccatctccagaaaggacaaccacaagcagtgaaaccgatatcggaaggaaaatccaaaagaaacaaaccccaacagagataaagaagagcgtctacaaaatggtggtaaaactgggtgaattctacaaccagatgatggtcaaagctggacttaatgatgacatggaaaggaatctaattcaaaatgcacaagctgtggagagaatcctattggctgcaactgatgacaagaaaactgaataccaaaagaaaaggaatgccagagatgtcaaagaagggaaggaagaaatagaccacaacaagacaggaggcaccttttataagatggtaagagatgataaaaccatctacttcagccctataaaaattacctttttaaaagaagaggtgaaaacaatgtacaagaccaccatggggagtgatggtttcagtggactaaatcacattatgattggacattcacagatgaacgatgtctgtttccaaagatcaaagggactgaaaagggttggacttgacccttcattaatcagtacttttgccggaagcacactacccagaagatcaggtacaactggtgttgcaatcaaaggaggtggaactttagtggatgaagccatccgatttataggaagagcaatggcagacagagggctactgagagacatcaaggccaagacggcctatgaaaagattcttctgaatctgaaaaacaagtgctctgcgccgcaacaaaaggctctagttgatcaagtgatcggaagtaggaacccagggattgcagacatagaagacctaactctgcttgccagaagcatggtagttgtcagaccctctgtagcgagcaaagtggtgcttcccataagcatttatgctaaaatacctcaactaggattcaataccgaagaatactctatggttgggtatgaagccatggctctttataatatggcaacacctgtttccatattaagaatgggagatgacgcaaaagataaatctcaactattcttcatgtcgtgcttcggagctgcctatgaagatctaagagtgttatctgcactaacgggcaccgaatttaagcctagatcagcactaaaatgcaagggtttccatgtcccggctaaggagcaagtagaaggaatgggggcagctctgatgtccatcaagcttcagttctgggccccaatgaccagatctggagggaatgaagtaagtggagaaggagggtctggtcaaataagttgcagccctgtgtttgcagtagaaagacctattgctctaagcaagcaagctgtaagaagaatgctgtcaatgaacgttgaaggacgtgatgcagatgtcaaaggaaatctactcaaaatgatgaatgattcaatggcaaagaaaaccagtggaaatgctttcattgggaagaaaatgtttcaaatatcagacaaaaacaaagtcaatcccattgagattccaattaagcagaccatccccaatttcttctttgggagggacacagcagaggattatgatgacctcgattattaa

SEQ ID NO: 14078 - DNA, 51 bp, unidentified; identical to SEQ ID NO: 6418
  source 1..51: mol_type = other DNA
  misc_feature 1..51: note = Synthetic

SEQ ID NO: 14079 - DNA, 51 bp, unidentified; identical to SEQ ID NO: 6418
  misc_feature 1..51: note = Synthetic
  source 1..51: mol_type = other DNA

SEQ ID NO: 14080 - DNA, 51 bp, unidentified; identical to SEQ ID NO: 6418
  source 1..51: mol_type = other DNA
  misc_feature 1..51: note = Synthetic

SEQ ID NO: 14081 - DNA, 1074 bp, unidentified
  misc_feature 1..1074: note = Synthetic
  source 1..1074: mol_type = other DNA
atgttctcgtgcaagcagcacctgtccctgggggcctgtgtcttctgtctcggcctcctggccagcacccccttcatttggtgctttgtctttgccaacctgctctctctggagatcttctcaccgtggcagacacacgtgtacaggcttggattcccgacggcatgcctaatggccgtcctctggacgctggtacccgccaagcacgcggtgagggccgtcactccagccatcatgctgaatattgccagcgccttgatcttcttctccctcagagtctactcgaccagcacgtgggtttctgccccctgtctctttctggccaacctgcctctcttatgcctgtggccccggctggccatcgagattgtttacatctgcccggctatacaccaaaggttctttgaacttgggttgctcttggcctgcaccatctttgccctgtccgtggtctccagggccctggaggtgtcggctgtcttcatgtctccatttttcatctttctggctttgggctctggaagcctggccggtgctcggcgtaaccagatttacacctcgggtctcgagcggagacgcagcattttctgcgcccggggagatcattcggtggcatccctgaaggagaccctccataaatgcccgtgggatctgctggccatctctgccttgaccgttcttgtcgtctgtgtgatgattgtgttgcatgtgcacgcagaggtgttctttggactctctagatacctgcccctctttctctgtggggcgatggcctccggggggctgtacctgggccattccagcatcattgcatgtgtcatggccaccctctgcaccctgacatctgttgtggtatatttcctccatgaaacccttggacccctgggcaagaccgtgctgtttatctcaatctttgtctattactttagcggggtagcggccctgagcgcagctatgcgctacaagcttaagaagtttgtgaacggacccctggtccatctccgtgtggtatacatgtgctgttttgtctttactttttgtgaatatctgttggtgacattcattaaatcctaa

SEQ ID NO: 14082 - DNA, 1074 bp, unidentified
  misc_feature 1..1074: note = Synthetic
  source 1..1074: mol_type = other DNA
atgttctcgtgcaagcagcacctgtccctgggggcctgtgtcttctgtctcggcctcctggccagcacccccttcatttggtgctttgtctttgccaacctgctctctctggagatcttctcaccgtggcagacacacgtgtacaggcttggattcccgacggcatgcctaatggccgtcctctggacgctggtacccgccaagcacgcggtgagggccgtcactccagccatcatgctgaatattgccagcgccttgatcttcttctcccttagagtctactcgaccagcacgtgggtttctgccccctgtctctttctggccaacctgcctctcttatgcctgtggccccggctggccatcgagattgtttacatctgcccggctatacaccaaaggttctttgaacttgggttgctcttggcctgcaccatctttgccctgtccgtggtctccagggccctggaggtgtcggctgtcttcatgtctccatttttcatctttctggctttgggctctggaagcctggccggtgctcggcgtaaccagatttacacctcgggtctcgagcggagacgcagcattttctgcgcccggggagatcattcggtggcatccctgaaggagaccctccataaatgcccgtgggatctgctggccatctctgccttgaccgttcttgtcgtctgtgtgatgattgtgttgcatgtgcacgcagaggtgttctttggactctctagatacctgcccctctttctctgtggggcgatggcctccggggggctgtacctgggccattccagcatcattgcatgtgtcatggccaccctctgcaccctgtcatctgttgtggtatatttcctccatgaaacccttggacccctgggcaagaccgtgctgtttatctcaatctttgtctattactttagcggggtagcggccctgagcgcagctatgcgctacaagcttaagaagtttgtgaacggacccctggtccatctccgtgtggtatacatgtgctgttttgtctttactttttgtgaatatctgttggtgacattcattaaatcctaa

SEQ ID NO: 14083 - DNA, 1074 bp, unidentified; identical to SEQ ID NO: 14081
  misc_feature 1..1074: note = Synthetic
  source 1..1074: mol_type = other DNA

SEQ ID NO: 14084 - DNA, 117 bp, unidentified; identical to SEQ ID NO: 6421
  source 1..117: mol_type = other DNA
  misc_feature 1..117: note = Synthetic

SEQ ID NO: 14085 - DNA, 117 bp, unidentified; identical to SEQ ID NO: 6422
  source 1..117: mol_type = other DNA
  misc_feature 1..117: note = Synthetic

SEQ ID NO: 14086 - DNA, 1713 bp, unidentified; identical to SEQ ID NO: 12659
  source 1..1713: mol_type = other DNA
  misc_feature 1..1713: note = Synthetic

SEQ ID NO: 14087 - DNA, 768 bp, unidentified
  misc_feature 1..768: note = Synthetic
  source 1..768: mol_type = other DNA
ataccgccaggaaggcgagctccagcgatgtcatttagggagctgattttgtaccacctggtgcgatacctggccacagagaacgacgccttcctggtccagtttgtctcgctgtgccgttccttctccgtggacgtgccagcgctactagcgcgcttttccacgccgcggcatgctcgcctgttggcgcgcgcgctcaactgcaagcagtacaccgaggagctggccttggagtttccccccgatgcgctgcgcgagctgctgcgcctgaagctgcgccgctgcacgccgcgcgtgcgccgcgccgcgcggctggacgcgagagcgcgcggggcggcactagtggctggccgcgaggtggctgtgcgtgctgccaatgaggagctgctgacgtacctggtgcgcacttacaaccccgcgctgtaccgctaccgacgcgctggcgcgcgctcgtacactggcgcgggcgcgggagccggtaccggcgatcctgtggaggcaccaggactctgcgcgcccgcgggcgcgccggtgctagtagtgtgcggccggtctcgcattcctttttttgcgtacgcggcagcgcgcgtggtctcgaaccgggacctggaggtggtggtgaccgacgcgtgcgtgcaggcgctgctacgcgaggagcacgcgccgctgctggaggccgtgtttcggcgcggtgccgacacggcgctcaaccgcgcgctgcgtagcgtgtttcgcttcttgcggagcgcgagcgagcgcgcgacgtaa

SEQ ID NO: 14088 - DNA, 69 bp, unidentified; identical to SEQ ID NO: 6433
  source 1..69: mol_type = other DNA
  misc_feature 1..69: note = Synthetic

SEQ ID NO: 14089 - DNA, 2220 bp, unidentified
  misc_feature 1..2220: note = Synthetic
  source 1..2220: mol_type = other DNA
atggagagtcgggcccacaaagcatggatgacgcacaccgcatcaggtttcgaaacagattaccataagattttaacagcaggattgtcagtccaacaaggcattgtgagacaacgggtcattcaagtccaccaggttacaaacctagaagaaatatgccaattgatcattcaagcctttgaagctggtgttgattttcaagagagtgcagacagtttcttgctgatgctatgtttacatcatgcttatcagggtgactacaagcaattcttggaaagcaatgcagtcaagtaccttgagggtcatggctttcgctttgaggtcaggaaaaaggaaggagtcaagcgactcgaagaattgcttcctgctgcatccagtggcaagagcatcaggagaacactggctgcaatgcctgaagaggagacaacagaagcaaatgccggacagttcctctcttttgctagcttatttcttcctaagctagttgtcggagaaaaagcctgtctagaaaaggtgcagcggcaaattcaagttcattctgagcagggattgatccaataccccacagcctggcagtcagttggacacatgatggtcattttcagactgatgagaacaaattttctaattaagttcctccttatacatcaagggatgcatatggtagcaggacacgatgctaacgatgctgtcatcgcaaactctgtagctcaagcacgtttttcaggattattgatcgttaaaacagtgctagatcacatccttcagaaaacagagcacggagtgcgtcttcatcctttggcaagaactgctaaggtcaagaacgaagtaaattcctttaaggctgcccttagctcgctagcacaacatggagagtatgctccttttgctcgcttgctgaatctttctggagtcaacaatctcgagcacggactgtttcctcagctttctgcaattgccctaggtgtcgcaacggcacacggcagtaccctggcaggagtaaatgtgggggaacagtatcagcaactacgagaagcagccactgaggcagaaaaacaattgcagaaatacgctgaatctcgcgagcttgaccatctaggtctcgatgatcaagagaagaagatcttgaaagacttccatcagaagaaaaatgaaatcagcttccagcagacaacagccatggtcacactacggaaggaaaggctagccaagctcactgaggcaatcacctccacatcccttctcaagacaggaaaacagtatgatgatgacaacgatatcccctttcctgggcccatcaatgataacgaaaactcagaacagcaagacgatgatccaacagattctcaggacactaccatccctgatatcattgttgacccggatgatggcagatacaacaattatggagactatcctagtgagacggcgaatgcccctgaagaccttgttctttttgaccttgaagatggtgacgaggatgatcaccgaccgtcaagttcatcagagaacaacaacaaacacagtcttacaggaactgacagtaacaaaacaagtaactggaatcgaaacccgactaatatgccaaagaaagactccacacaaaacaatgacaatcctgcacagcgggctcaagaatacgccagggataacatccaggatacaccaacaccccatcgagctctaactcccatcagcgaagaaaccggctccaatggtcacaatgaagatgacattgatagcatccctcctttggaatcagacgaagaaaacaacactgagacaaccattaccaccacaaaaaataccactgctccaccagcacctgtttatcggagtaattcagaaaaggagcccctcccgcaagaaaaatcccagaagcaaccaaaccaagtgagtggtagtgagaataccgacaataaacctcactcagagcaatcagtggaagaaatgtatcgacacatcctccaaacacaaggaccatttgatgccatcctatactattacatgatgacggaggagccgattgtctttagcactagtgatgggaaagaatacgtataccctgattctcttgaaggggagcatccaccgtggctcagtgaaaaagaggccttgaatgaggacaataggtttatcacaatggatgatcaacaattctactggcctgtaatgaatcacaggaacaaattcatggctatccttcagcaccacaagtaa

SEQ ID NO: 14090 - DNA, 51 bp, unidentified; identical to SEQ ID NO: 6436
  misc_feature 1..51: note = Synthetic
  source 1..51: mol_type = other DNA

SEQ ID NO: 14091 - DNA, 159 bp, unidentified
  misc_feature 1..159: note = Synthetic
  source 1..159: mol_type = other DNA
atgccaagcacgtcgaccacgttcttcttggtgaaaagtgaaagaatattgaccctcaaaatagggtacttgtcctccaagtgggacaggatcgtgttggccagcgcgcatacagggcacagaggcttgcccagcagcagcagcacgtctttcatttaa

SEQ ID NO: 14092 - DNA, 3483 bp, unidentified
  misc_feature 1..3483: note = Synthetic
  source 1..3483: mol_type = other DNA
atggactcctttcaatttttcagttggttactgaaggatattgaaaggaatctactgtacaccagtttggtatatacaagtccaagaattgcaatagttcgatatgaagaaagtgaaaaatcaagattatggaaatcgaaagaaactaacgttttatctccagaggaaattctgagcaagatcaaagataagctagattctttatcatgtattcatgacaaaattgaagaactgttacgcatacggtatttcactgtatacgtcgaggacaaatctgataagaggaacataattttaacctggttgagcagaactataacagacttggggaaacatgttgagtatgattctatcaagttgattgagctacaggcaagacagtggaggatagataatgctaacttcctacgaccttatcattataatattccaattaatgaatatcttcgagataacgaaattgagttgttagacactggtgataataaatggaaatcagacactctacagggattactccctaatttctatcatcgtacgcatactctagtgggatctattctttatgcaattaattccagactggacaaatattctactgatcaaaagcgtgctttatcttacttgttgcacgttattcaaaaatgcttttctgaaggttatctcgagatgtctagagatagaaaatggaatcatacattggatgagttgagaaactcaagatttcatttatacaacgcaaaaataatacacgccgcttgtgctatgatttcgttagctcattctgatcacattgatttggagttcctatgtcaaatcattaccgtgtatagcataattccagctaacgcagcaaaattactttcgtcaccaatgacaatgtatgtgggagtcgtgacttttagctcgcatcaagtggcatcaactggtaacgcctccgaatgctctcctactactattcaaaacaacgtttacgttgacaaagctcaatatgatgaatggagcaacatgtttaactctgaccctcttaatgcctctaaattattacgtctgatgaatagcaatctaaagacttcaattgaacaattttcactaatttttaattgtttttcagctactttccatgtaggccaccgtatagataatgctcaagatgccataacagatcaggttacagctacatacacatcagacattgatcgagaaatgtatgataattactactataggttgaagaatatgcttaaagaagaaataatacaatacgttgaagatcatattgctaaacagtatgttgacgttacagccgaatccctttcagctttggccaattcatcaaatggattctctaaagaagtgacttttattgatagaaagattaagactactaaaaaaattctgcacttagataatgatttgctagctgaagattacaatgatttaggaaaagcattatctcatggaataccaatgggtacgagaaacgttcccgctaggcaaacaagaggaatattcattctcccatggcaggtggcggctatacaacacactatagctgagtcgttgtacaaacgagcaaagaagggttcgtatcaagggtcattcgctgaagcttatacagcaaagacggcctctctcacatatggagtattagctgaggatacctctaaagctaccaaaatcatattatacactgatgtatctcagtgggacgccagtcaacataataccgaaccataccgatccgcttggattaacgccatacgtgaagcgagatctgaaatgaaatggctgtattctgatgagcctattgtattaaatatgaacgttcttgattcaatgataaaaatccaagagtatcttttaaattccaatttaatcgtggcttctccaggctcacaacgtccactaaaaataataagatatcatggtgttgcatcgggtgaaaaaacaaccaaaataggcaactcgttcgcaaatgtagcactaatagaaacagttttagacagtgtgaaacaagaaattccagatatagaagttacacatctaagagtagatggagacgataatgtagtgtcattaactacgtcatgtcaaatatcaaagttgcaagaaacggttaagagagcatattcaaaactgaatgctagagttaaagcacttgcttcatatacaggtctagagatggcaaaaagattcatagtatgtggaaaaatattcgaaagaggggcaattcccatttttacggctgaaagaccttacggaaccgatgtgtcaatacaatccatgtgcggatcatccatttattcgtctgccgttaatgcgtaccgtgggtttggcgattcatattttgcgttcatgcaagatgtattggttcctccgtcatcatccgtaaggataactggaagattaagggtgttgttgtcaccagtaactttgtatgcaactggtccgctcagctttgaaataactcctcagggattaggaggcagatgtcgtatgtacacacaatcagaaaaacttttcacattatttaagctgttaactcaaactgtatctgtttcagttactccagaagaaattaagaagtattctaacacgcctcaatttaaaaaacgtacaagcgtcatgatcaaaagtatgcaaatgaagttacacactgaagctgcagcattgtcaagaataatgattgataaagaagaacaaaaaacattaggagtgccaaatgttcagagtcaaaagaatagaagtcagatattaaaggcaattaacattctcggtgttccagaacagagtggtatatccccgaaagggtattacccagaagaactctattctctcgttgtcaaacattcaaccatcaaatttattgattatcaacagccaatcgacatatatcgtgtaaataacaaagctgtagagttattacgtgcccaattgggggtaaggatatctgactcaaaaccaatcgccaaaccatccaatcatttgtatgatatagttagttctatttctccaatcaaactgtcacctagcgatttgttaaaacaatccagaaaatatgatttgtccacgtacaaaggtaagagaacatatctgcttgatctaggtctcacaggaaatacactgaagacttatctcgcttcaaaattactttttagagatcttttactatccaaatatgacgagctatattcgacgccaggatttggtgccacacaactaacgacaatcccgttaaatgtctcttcggctgaaaaagtcttttccataagattgaatttaccttctcatttgtatgagattgtcatgttgttattgttatatgaatatgtacactatgtattcatgtcccacaaaacttttaccgctacaatgcatgcttcaagtcaagaagaatctgcgcgattaactaaactcgtgctacatatgttagatgatatacaactggatcaagtgtcattttcagatgacgcttggtag

SEQ ID NO: 14093 - DNA, 72 bp, unidentified; identical to SEQ ID NO: 6439
  source 1..72: mol_type = other DNA
  misc_feature 1..72: note = Synthetic

SEQ ID NO: 14094 - DNA, 1176 bp, unidentified
  source 1..1176: mol_type = other DNA
  misc_feature 1..1176: note = Synthetic
atttttgacgcaatggcacaagaacaactacttgctgaacttgagggatacctcagaggagttaacccaatgaccaggcaaacgattatgaagtctgcaagaggtgggatggatagtgctaaggaggcagcaaaagcagcgaagaagggagaaatgcaactaacaagtggagagagcatagtggtgcacatatgcctgagagccatgtaccctggaataaagccatggtcagaagccaaaaaagatcttgataaagctacagaaggactgagtggaaaagactgcaaaaatataagaaaagctctgaggaaggcaggagacctgacagggataaaggagatgatgatgatgtatgaaatgagggaggacaaaaaagcagaaatggtagagcaaatctacgatgacccagaggattttacagaagatgtaaggcttgggaccgttgctgcctggcttcaatgcaaaaacaaaaggagcgagaaatatcatcacaagatgtcaatgtctggaagcactgcacttgccttgggagatgcccaaaaggccggaatggccatagaaaatatggctagtgttgtgccaatgaaaaaagaggcccaggcactgcacaaagacgcagaagttttgattgaactggcaagaatagcatatgggtcaagagcaatggaagggcacctgcaaaatgcaatggacggaattggaagcaaagtcagtggaatggctaatcttgccctaaaaaggtcagttcttactttgttaatgttggtaatttgtgggatccccacttgtgtaaatgctgaaactgtggaagaattttgtagaaagaaactaaatcagacggaagaaaaggtttatgtccattgtttcaatgaggatgatggtcgggcaatgactttagctgctttgatacttggatgctttagtatgctttacattttaataaaggcaatactgatgcttttgttgacaatcataaatggaagaccaaatggaagttgggatgacttgaaacatgttgtaaaatgtttttcagagactggaagtgagaacttcgccagggatataatggtcctggaatccaggcgagatggggaggagacaagctccccagaggagggactaggccctccattgagtggattcaatgaaaatggtgtattcatggaaacattataa

SEQ ID NO: 14095 - DNA, 2319 bp, unidentified
  misc_feature 1..2319: note = Synthetic
  source 1..2319: mol_type = other DNA
atgtcactactattaacgctcgcaaaagagtatgcaaatctcacaaaggataagaaatcatgcaaattgctgtcgcaagggaccgtgtcaagctacaccacttttaagaaatggacaacatcgagaaaagagaaaaacccatcccttcgaatgagatgggcaatgggaagcaagttcccaattatggcaaacagagaaattttggaagaagctgggataccagaacaatgggaagggatagacctttggtcaaaaaaggatgatgtttcaaagttggggatggtgttagcgtctccagcagccataacttactggaatttttgtggacctggagtggacaattcttctgtaataaaagatgtttataaagcaaaatttatgaaaaaagaaagatggagagagactctatggggaccaatgaactttgaattggtgggtaaacaaagaagagtggttgaaactcaaccagtggaaataaagctaaaccaaaaagaaataaaagaactaacgatgtgggttctttttgaagatgaagcaaaccttgcaagcaaattcatacaggaaaatttctcacttgtcctgtcattaagagaactttacaagggaaaggcagtaaataaagatgttgcagctttcatgattgcccaccaattttctcccgagaagaggttcttacccacttttggccccattagaccagaaagaatggagctactccactgtttagggggtgatttctggaagatagaggcagtaactgcagggagcctgaacgaagaacaaaagaagagagatgttagagcagttgctagaaaaatttgccttagagcaagtgtggacttatttactccagcagagaagataagggactatatagcaagtgtgacaatgagatttggaacagtagaaagaacattcgaagacgtaataagaaacagtgatgacatatctgcggaagtaaccttatgcaaggcggcacttgggtgcgaattgggcaaaagcatgagctttgggaatctaaatctgaggaaagtcagtggagaagcagaaacaatggaaaaaacagtatattggggattaaagcccataaaatataaatgctggagaggagaggaaacattttattgtgaactgaggaaggtaacttgtatgtttagaaggtctgaaggcctagattgggctaacattggacctggttcacctgaagaaagaagagagcttttggcaatggtgatgatattctgcagagatgggagattctttgaatctgcaccagttaatattgatgaatcattctttaggacaagactgaataaagaaataccttatcaatatgtgctgctaaaatgggtaaggcaatcgagagacaacttggatgccttgttgagtacaagaggactaatacctgctcatattggacaattcggaaaaggaatgggaatagatggaagtagctcatcttctatggtttacaagggagtcatgttgtcgaagacaccgatagacatagtggagagcaaagagaagcacagactgtttttaaatgacaatatagaagcagtgacagagagaggagcaatggttgcatccataatggacctatcagaggataatagagaaacatttaacgatgtgacttttaaccatgtcgacttagctgttctcaaagatgaaaagactgcaataataaagatatatcgatcactagtggaaagaataaacactgatgatgatggcctacctgctttgataatgggtaaaagatatttagagttgtatcaattagatgaagtaaaagacgcggtcgggctaataccaaaaaggatgctgggggcgtattcctaccaagcaagacagctcatacagtcacagatcaaaaatgacagttatagccttcctgaaataataaagttactgcccttctgttacagccctccaaagaaaatgttatttgatgggactttccatttcaaaaatcaaatgtatgttaggcctggaataaacacaaaccttttcagttttagtaagaccgacaaaagcaagatatatgtgaacggaagcgcagtaaaaataaagcttgtgctcggagacgatgaaatggacaccagtcttgcctttgttgaaggatttcaagtttgtgaatatgatccaagagcacctttgataccaagaagagatttgagactgattgggttcggaaagaaagttagagtttttgttggtcagggacaggagaaaaccctggtgaggacgagctccaaaagagccgcctcccatgatgtaagcaaaaacattcgtagaatgcgtctggaagtttga

SEQ ID NO: 14096 - DNA, 2262 bp, unidentified
  source 1..2262: mol_type = other DNA
  misc_feature 1..2262: note = Synthetic
atggaaataaacccatatctactcatgttaaacaatgatataacgtcaatgatatcattgacatacccatatactggggcacctcctatgtcacatggaacatcgaccaaatactcaatggagactgtgtcaagaacttactcctacagtagaactaaaaaagaggtaccttcgggaatattcccaatagagagaaggaaattctgtaacacaatagaagacaaagaaaacctagaaaaaccgaatggaaatgttgatataaatttcatgttatcgctggcagaaatgctggaagaaaagatggggaaagggttcttcaaattctgtgccaatgaagctgaagctgaaattttgaagatgcacttcagcaagctcactgaaggaaggcaaacttatgactggacaagtgaaagaaatatgccagcagccaccgctcttcagctaacagtagacgctatacaagaaacacagggaacattcaaaggaactaccatggttgaatattgcaacaagatattagaaatgatggattggccggaagtgaaattcaaaaaggtcagaatgattgttcagaggcattgggacccgaaaaccaaaaaagaaataaaaatgaagtctccaacattgatgataacaaagattggaagagaagaattcataaagaggatatgcacgataaataccatggccaaagacggagaaagaggaaaatacaaaagaagagctatagccacccccgggatgggaatcaggccattctcaaaaattgtggaaactttagcacaaaagatttgtgagagactagcagagagcggtttgcctgttgggggaaatgagaagaaagccaaactaaaaactacggtctcttcaacaaactcaaaactacaagaagggcagttcatggtaaacataacaggggacaacagcaagtggaatgaatgtcagcaaccagaagcttatcttgcaatgttggcatacattactaaagacagcagcaacttaatgaaagatctctgctcagtagcaccaacattgttctgcaataagtacgtaaaaatgggacaaggtttccgagcaaaaaacaaaagaaaaaccaaagaaatagtgatacccgcaaaaaagatgaaagaaaggaaagaattgatgaacgcggaatggagggacctatttgaaacaatagaaccttacatggatggagagtgctgcttcttggggggaggaatgctgatgggaatgtttaacatgttgtcaactgtttttggagtcatgacattaaattacagggaggaagcattggccagaaggaactgttactggactgggctacaaagttcagatgattttgtgctcttttgcatctctaggacttggccagagatggagatgactattctaaaattcatcgctgtttgcaagttgatgggaataaacatgtctttggaaaaatcctacgggtgcttgcctgaactttttgagttcacaagcatgttcttttccggggattttgtctcaaacatagccttggagttacctgctttcacaacagctggaatgaatgaaggaaccgacttcacagctgcgatgtctgtcataagaacaaacatgattaataatggactttctcctgggactgctttaatggccctgcgaatttgtctgcaggaatttagagcaacatacagagtacacccttatgattctggagtgaagaatcatcgaatgaaaatcataaggaaattcattgaaactattgaaaacaaagatggattgctgatatcagatggcgggaaattaatgaacaatatctcaagtttgcacatccctgaagaaatattgaaagaggatttgatggatccctcctacaggaacagagttttcaatcctaggaacccctttacacagtttgagaagacagttgacatctttaaggcaagtggacctataagggtagaggagaacgaggcagttgtatcaacgcattcctttagaacaaggagcaataggacattgctaaatacagacatgagggcaatggctctcgaagagaaaagataccaagttgtttgcaacatgtaccgatcggtcttcgaaagtgcagacgttaacaccccaataggatcaatgtcgatgggagaggcaattgaagccaaaatccttgaccgggccagaacccagtttgaaaatggaatcatagggggagaagaatattctgaaatcaaaagactaatcgaggacgccaagcgtcaacgactgtctgtttaa

SEQ ID NO: 14097 - DNA, 30 bp, unidentified; identical to SEQ ID NO: 6447
  misc_feature 1..30: note = Synthetic
  source 1..30: mol_type = other DNA

SEQ ID NO: 14098 - DNA, 24 bp, unidentified
  source 1..24: mol_type = other DNA
  misc_feature 1..24: note = Synthetic
atggagaccatgaaagaacaatga

SEQ ID NO: 14099 - DNA, 57 bp, unidentified
  source 1..57: mol_type = other DNA
  misc_feature 1..57: note = Synthetic
atgaatatacccttgaggatgagacaaccccaagatacgttcttttggagggattga

SEQ ID NO: 14100 - DNA, 1698 bp, unidentified
  source 1..1698: mol_type = other DNA
  misc_feature 1..1698: note = Synthetic
atagcgaccgagacactgcccaataaacacacccagatcacccacataatctctagcatgaagatcttatttgctaccctgctagtagtgaccacccctcacttagtcactggccagatccactggggcaatctttcgaaaattggagtcgtagggacgggtagtgctagttacaaggtgatgacccaatcgagtcaccagacactagttataaagctgatgcccaatatcaccgctatagacaactgcactaagactgagattgaggagtataagaggctgttggggacagtgcttcagcctattaaggtcgctctgaacgccattactaagaatataaaaccaatcaggagttccactaccagtaggagacacagaaggttcgcaggggtcgctttggctggtgcagctctcggagttgcaaccgcagcccagattacagcagggattgctcttcatcaatcaatgatgaatacccaggctattgaaagtcttaaggcaagtctggaaacaactaatcaagcaattgaggaaatacgacaagcaggccaagaaatgatcctagcagttcaaggtgtccaggactacatcaacaatgaactggtacctgcaatgggccaattatcgtgtgatatcgtgggtcagaagctagggctgaaactgctcagatactacactgaaatattatcattatttggccccagcctcagagacccaatttcggccgagatttctatccaggctttgagttacgccttaggtggggacataaacaaaatactagaaaagctagggtatagcgggagtgatctccttgctatactggaaagtaaaggtatcaaagctaagataacctatgtggatatcgaaagttacttcattgtgctcagcattgcctatccttcgctttctgaaattaaaggggtgataattcatcgcctggagggtgtctcttacaatatagggtcgcaggagtggtataccacagtacctcgatatgtggcaacccaaggttacctcatttcgaatttcgatgacacaccctgtgcattctccccagagggcactatctgcagccagaatgcattatacccaatgagcccactcctccaggaatgtttccgtgggtcaaccaggtcatgcgctcgtacactggtctctgggtctatagggaataggtttatcctatccaaggggaacctcattgccaactgtgcctcaatcttgtgcaagtgttacaccactggctcaataataagtcaagatcctgacaagatcctaacatatatagctgcagaccaatgccccatcgtagaagtggacggtgtaaccatccaggttgggagcagagagtaccctgatgcagtgtacctgcataaaatagaccttggcccaccaatatcgctggagaagctagatgttgggactaacctcggcaatgcagtgacaaaactggagaaagccaaggatctactagattcatctgatctgatcctggaaaccatcaagggtgcttcagtcacgaacacaggccatattctagttggagccgggttgattgcagtagtgggtatcctcattgttacctgttgctgtaggaagcgcagtaatgacagcaaagtgtccactgtgatattgaatccgggtcttaaaccagacctcactggtacatccaaatcctacgtacggtcactgtag

SEQ ID NO: 14101 - DNA, 381 bp, unidentified
  source 1..381: mol_type = other DNA
  misc_feature 1..381: note = Synthetic
acgaggaagtgcgtcggtccctggtctacgatgcaacgcgacagacggtatcgctgcagactggctccttacaatcgtcaccagctaccaccttgtgaggaccgcggcagtgctgttgtagaggagaactctcggtacttagaatgtgaaaatatgaacatgcacaatggcggcatgcagttttttaccgaaacgttggagaacctgtcccagggatttgtgtccatcacggatccatgtttcatcaccaaagagactgtttggatcttaactcccaaataccggactgactcacaacagtttactgccatgaagggggagaggctggtgtatgctgtgagatggaagggtggaggaagccttactgtgcgtgtaaaataa

SEQ ID NO: 14102 - DNA, 891 bp, unidentified
  misc_feature 1..891: note = Synthetic
  source 1..891: mol_type = other DNA
acgaggaagtgcgtcggtccctggtctacgatgcaacgcgacagacggtatcgctgcagactggctccttacaatcgtcaccagctaccaccttgtgaggaccgcggcagtgctgttgtagaggagaactctcggtacttagaatgtgaaaatatgaacatgcacaatgttagtgaggtgaggagtataccatcttgtattagctttattgtactgcaggagtggcccgtgtattgggattgtattttaacggcctgggaaaaacatgtgatgaaaatgtatatgaaagtgtgtatctgctgtgccacgttagatctggatttccatcagaccattaggggttatgagagatggattattcactgtcattgtaactctcccggttctcttcagtgtagagctggtggggcggtgttagctaattggtttaaaatggctatctatggctccctgataaatgtgaggtttccctggtacaggcaggtggtgaacaggggtttgccccgggaggttctgtatgcgggtagcatgtttgtacgcggcagacacctgatttatgttaaagtaaggttggacggacacgcggtggcgctgttggagcgaatgagctttggctggagcgtgttcagctatgggatcatgaacaacctgattgtgatggtgtgcgattcttgccggaatctcagtgagattcagatgcgctgctgcgccagacgcactcgtagactgatgatccatgctgtgaggctgctggacaatctaacttcttaccagcctcacaggagtcgcaccgagaggttcagacagcgccacctgcgtggtttagtggaacatcatcgcacctttactctgtctgagtttgatcggggagataacccgtggagagcctga

SEQ ID NO: 14103 - DNA, 246 bp, unidentified
  source 1..246: mol_type = other DNA
  misc_feature 1..246: note = Synthetic
aagagagcttattccagcatgcagtttttgggtgctagctttggagcattaaagttttcccttacgcttgccagtcccacgcttagccctggctctgaattgtcagctgtagtggcccaggacttaagtgactttttgcagctgacattgaggcgcgagctcagggcggagggcagaaccttattgaatcttgttgttttgaacacgctgcaggtggtggagcagcaggatctgtttctattatga

SEQ ID NO: 14104 - DNA, 924 bp, unidentified
  misc_feature 1..924: note = Synthetic
  source 1..924: mol_type = other DNA
atgttccacctaataactgatactctaatagtgatacttattttatctaattgtgtagagtggtcacaaggtcagatgtttactgatgatatatattataatggtaacgttgagactatcataaattctactgatccttttaatgttgaatctttatgtatttattttccaaatgcagttgtaggatcacaaggaccaggtaaatctgatggacatttgaacgatggtaattatgctcagaccatcgccactttatttgaaacaaaaggattcccaaaaggttcaataatacttaaaacatacacacagacatcagactttataaattcagtagaaatgacatgctcttacaacatagttattattcctgatagcccaaatgattcagaatctattgaacagatagcagaatggattttaaatgtttggagatgtgatgacatgaatttggaaatttatacttatgaacaaattggaataaacaatttatgggctgcatttggtagtgactgcgatatatctgtctgtccattagatactacaagtaatggaatcggatgttcgccagctagtacagaaacttatgaagttgtatcaaatgacacccaattggcattaattaatgttgtggataatgttagacatagaatacagatgaacactgctcaatgtaaattaaaaaattgtattaagggtgaggctcgactgaatactgcactaataaggatttcaacatcatcaagttttgataattcattgtcaccattaaataatggccaaacaacaagatcgtttaaaataaatgcaaagaaatggtggactatattttatacaataattgattatattaatacaattgtacaagcaatgactcccagacatcgggcaatttatccagaagggtggatgttgaggtatgcgtaa

SEQ ID NO: 14105 - DNA, 1188 bp, unidentified
  misc_feature 1..1188: note = Synthetic
  source 1..1188: mol_type = other DNA
atggatgtacttttttctatagcgaaaactgtgtcagatcttaaaaagaaagttgtggttggaacaatttatactaatgtagaagatgttgtacaacagacgaatgaattgattagaactttaaatggaaatatttttcatactggtggcattggaacacagcctcagaaagagtggaattttcagctgccacaattgggtacaactttattaaatttagatgataattatgttcaatcaactagaggcataatcgattttttatcatcttttatagaagctgtatgtgatgatgaaattgttagagaagcttcaagaaatggtatgcaacctcaatcaccagctcttatattattatcttcatcaaaatttaaaacaattaattttaataatagttctcaatctattaaaaattggaatgctcaatcaagacgtgagaatcctgtatatgagtataaaaatccaatgttgtttgaatataaaaattcgtatattttacaacgcgcaaatccacaatttggaagcgtcatgggtttaagatattatacaacaagtaatacttgtcaaattgcagcatttgattccaccctagctgaaaatgcaccaaacaatacacaacgcttcgtttataatggcagactaaaaagacccatatcaaacgttttaatgaaaatagaagctggtgctccaaatataagcaacccaactattttacctgatcctaataatcaaacaacttggctttttaatccggtacaattaatgaatggaacatttaccattgaattctataataatggtcaactaattgatatggttcgaaatatgggaatagttactgtaagaacttttgattcttatagaataacaattgacatgattagaccagctgctatgactcaatacgttcaacgaatttttccacaaggtggaccttatcattttcaggctacatatatgttaacattaagtatattagatgctaccacagagtccgttctatgtgattctcattcagtggaatattcaatagtagcaaacgttagaagagattcagcgatgccagctggaactgtttttcaaccgggatttccatgggaacacacactatccaattacactgttgctcaagaagataatttagaaagattattgttaattgcatctgtgaagagaatggtaatgtag

SEQ ID NO: 14106 - DNA, 27 bp, unidentified
  misc_feature 1..27: note = Synthetic
  source 1..27: mol_type = other DNA
atgttgtacaacagacgaatgaattga

SEQ ID NO: 14107 - DNA, 519 bp, unidentified
  source 1..519: mol_type = other DNA
  misc_feature 1..519: note = Synthetic
aggctcggaacggctgcaaacgtgatcgagctacctgttgcctcaatggcagacgattccagcttcaccttgacaagaaagaaaactaataaaaaagagaaggaaaaaaacgtcacaagaggtcaaaggatgaattttgaagaagaagatgtttcagtagctggtgaaaccgacactaagagcattgccacagaatcggagtcatcaacacattcatatgaagactacgaaagagcgtatagagaactaacaaaagattctagctcagaacaagttaacttaactaatactgctattgaacagaagaatctttctcgatttgatgaacggaagaatgtttgtgatccaacgttaaatctgttgatctcacaaatgaaagctgaaattgatcaattgaaagttaaagtaagtgatcaaagcctagataacgcttacaacaaaattcttgcaaacgtagaaatcttgacctcatcacaaaagaaggctctgctaatggcgctagcatcctcaatgaaataa

SEQ ID NO: 14108 - DNA, 15 bp, unidentified
  source 1..15: mol_type = other DNA
  misc_feature 1..15: note = Synthetic
ctgaaaattatataa

SEQ ID NO: 14109 - DNA, 312 bp, unidentified
  source 1..312: mol_type = other DNA
  misc_feature 1..312: note = Synthetic
ttgataagagaaatgttgaccaatcaattaaagaatacgaagagttattccctacatcagtttcaacgaataattcagaaatcgttaagcttggtgcttgtggacacatcgttactaattgcttacacgttgatcacccttattttacaagtaatattactagtctgggagattatgcacccactggttggaggtacgaagcaatgggtaaaagagatgatcaattgggcgatttcatttttaatcatatatttgatcagtgcaatggctggcaaaatggcgagtacattaatagatttaattatggtgtaa

SEQ ID NO: 14110 - DNA, 78 bp, unidentified; identical to SEQ ID NO: 6467
  source 1..78: mol_type = other DNA
  misc_feature 1..78: note = Synthetic

SEQ ID NO: 14111 - DNA, 174 bp, unidentified
  misc_feature 1..174: note = Synthetic
  source 1..174: mol_type = other DNA
atgcaaagcgccattataaaaaacttaggacccaggtctacaaatccgctcaccccgggacaacccgccccagcgaccgacccagatggcagaggagcaagcttaccatgtcaacaaaggcctggaatgcatcaaggctctcagggcccgacccctcgaccccctggtcgttga

SEQ ID NO: 14112 - DNA, 15 bp, unidentified
  misc_feature 1..15: note = Synthetic
  source 1..15: mol_type = other DNA
atggtattattataa

SEQ ID NO: 14113 - DNA, 438 bp, unidentified
  source 1..438: mol_type = other DNA
  misc_feature 1..438: note = Synthetic
atgcgagccgatcgggaagaactggatctcccgccaccagttggaggagtggctgttgatgtggtgaaagtagaagtccctgcgacgggccgaacactcgtgctggcttttgtaaaaacgtgcgcagtactggcagcggtgcacgggctgtacatcctgcacgaggttgacctgacgaccgcgcacaaggaagcagagtgggaatttgagcccctcgcctggcgggtttggctggtggtcttctacttcggctgcttgtccttgaccgtctggctgctcgaggggagttatggtggatcggaccaccacgccgcgcgagcccaaagtccagatgtccgcgcgcggcggtcggagcttgatgacaacatcgcgcagatgggagctgtccatggtctggagctcccgcggcgacaggtactccgccaccgagggacctga

SEQ ID NO: 14114 - DNA, 315 bp, unidentified
  misc_feature 1..315: note = Synthetic
  source 1..315: mol_type = other DNA
atggatcacgcgctcttcacacacttcgtcggccgaccccgtcactgtcggttggaaatgttgattctggacgaacaggtgtctaagagatcctgggacaccacggtttaccacaggcgccgcaaacatctacctcgacgtcgcgctccgtgcggcccccagaggcccgccgagattcccaaaagaagaaaaaaggcggccgtccttctattttggcacgatttgtgctggctgtttcgacgacttttctttcctcgggaggactcagagccactgatgtcggatccggcacggtctcccgaagaggaggagtaa

SEQ ID NO: 14115 - DNA, 3768 bp, unidentified
  misc_feature 1..3768: note = Synthetic
  source 1..3768: mol_type = other DNA
atgttcccgttccaaccaatgtatccgatgcagccaatgccctatcgtaacccgttcgcggccccgcgcaggccctggttccccagaaccgacccttttctggcgatgcaggtgcaggaattaacccgctcgatggctaacctgacgttcaagcaacgccgggacgcgccacctgaggggccacctgctaagaaacctaagagggaggccccgcaaaagcaaaaagggggaggccaagggaagaagaagaagaaccaggggaagaagaaggccaagacggggccgcctaatccgaaggcacagagtggaaacaagaagaagcccaacaagaaaccaggcaagagacagcgcatggtcatgaaattggaatctgacaagacattcccaattatgctggaagggaagattaacggctacgcttgcgtggtcggagggaagttattcaggccgatgcacgtggaaggcaagatcgacaacgacgttctggccgcacttaagacgaagaaagcatccaaatatgatcttgagtatgcagatgtgccacagaacatgcgggccgatacattcaagtacacccatgagaagccccaaggctattacagctggcatcatggagcagtccaatatgaaaatgggcgtttcacggtgccaaaaggagttggggccaagggagacagcggaagacccattctggataatcagggacgggtggtcgctattgtgctgggaggtgtgaatgaaggatctaggacagccctttcagtcgtcatgtggaacgagaagggagtaactgtgaagtatactccggagaactgcgagcaatggtcactagtgaccactatgtgcctgctcgccaatgtgacgttcccatgtgccgaaccaccaatttgctacgacagaaaaccagcagagactttggccatgctcagcgttaacgttgacaacccgggctacgatgagctgctggaagcagctgttaagtgccccggaagaaaaaggagatctaccgaggagctgtttaaggagtataagctaacgcgcccttacatggccagatgcatcagatgtgccgttgggagctgccatagtccaatagcaattgaggcagtgaagagcgacgggcacgacggctatgttagacttcagacttcctcgcagtatggcctggattcctctggcaacttaaagggaaggactatgcggtatgatatgcacgggaccattgaagagataccactacatcaagtgtcactccacacatctcgcccgtgtcacattgtggatgggcatggttattttctgcttgctaggtgcccggcaggggactccatcaccatggaatttaagaaaggttcagtcacacactcctgctcagtgccgtatgaagtgaaatttaatcctgtaggcagagaactctacactcatccaccagaacacggagcagagcaagcgtgccaagtctacgcgcacgatgcacagaacagaggagcttatgtcgagatgcacctcccgggctcagaagtggacagcagtttgatttccttgagcggcagttcagtcaccgtgacacctcctgtcgggactagcgccttggtgaaatgcaagtgcggcggcacaaagatctccgaaaccatcaacaaggcaaaacagttcagccagtgcacaaagaaggagcagtgcagagcatatcgactgcagaatgacaagtgggtgtataattctgacaaactgcccaaagcagcgggagccaccctaaaaggaaaactacacgtcccgttcttgctggcagacggcaaatgcaccgtgcctctagcaccggaacctatgataaccttcggtttccgatcagtgtcactgaaactgcaccctaagaatcccacatatctgaccactcgccaacttgctgatgagcctcattacacgcacgagctcatatctgaaccagctgttaggaattttaccgtcactgaaaaggggtgggagtttgtatggggaaaccatccgccgaaaaggttttgggcacaggaaacagcacccggaaatccacatgggctgccacatgaggtgataactcattattaccacagataccctatgtccaccatcctgggtttgtcaatttgcgccgccattgtaaccgtttccgttgcagcgtccacctggctgttttgcaaatccagagtttcgtgcctaactccttaccggctaacacctaacgccaggatgccgctttgcctggccgtgctttgctgcgcccgcactgcccgggccgagaccacctgggagtccttggatcacctatggaacaataaccaacagatgttctggattcaattgctgatccctctggccgccttgattgtagtgactcgcctgctcaagtgcgtgtgctgtgtagtgccttttttagtcgtggccggcgccgcaggcgccggcgcctacgagcacgcgaccacgatgccgagccaagcgggaatctcgtataacaccatagtcaacagagcaggctacgcgccactccctatcagcataacaccaacaaagatcaagctgatacccacagtgaacttggagtacgtcacctgccactacaaaacaggaatggattcaccagccatcaaatgctgcggatctcaggaatgtactccaactaacaggcctgatgaacagtgcaaagtcttcacaggggtttacccgttcatgtggggaggtgcatattgcttttgcgacactgagaatactcaggtcagcaaggcctacgtaatgaaatctgacgactgccttgcggatcatgctgaagcatacaaagcgcacacagcctcagtgcaggcgttcctcaacatcacagtgggggaacactctattgtgaccaccgtgtatgtgaatggagaaactcctgtgaacttcaatggggtcaaactaactgcaggtccactttccacagcttggacaccctttgacagaaaaatcgtgcagtatgccggggagatctataattacgattttcctgagtatggggcaggacaaccaggagcatttggagacatacaatccagaacagtctcaagctcagatctgtatgccaataccaacctagtgctgcagagacccaaagcaggagcgatccatgtgccatacactcaggcaccatcgggttttgagcaatggaagaaagataaagctccgtcattgaaattcaccgcccctttcggatgcgaaatatatacaaaccccattcgcgccgaaaattgtgctgtagggtcaattccattagcctttgacattcccgacgccttgttcaccagggtgtcagaaacaccgacactttcagcggccgaatgcactcttaacgagtgcgtgtattcatccgactttggcgggatcgccacggtcaagtattcggccagcaagtcaggcaagtgcgcagtccatgtgccatcagggactgctaccctaaaagaagcagcagtcgagctaaccgagcaagggtcggcgaccattcatttctcgaccgcaaatatccacccggagttcaggctccaaatatgcacatcatatgtcacgtgcaaaggtgattgtcaccccccgaaagaccacattgtgacacacccccagtatcacgcccaaacatttacagccgcggtgtcaaaaaccgcgtggacgtggttaacatccctgctgggaggatcggccgtaattattataattggcttagtgctggctactattgtggccatgtacgtgctgaccaaccagaaacataattga

SEQ ID NO: 14116 - DNA, 2487 bp, unidentified
  misc_feature 1..2487: note = Synthetic
  source 1..2487: mol_type = other DNA
atgttcccgttccaaccaatgtatccgatgcagccaatgccctatcgtaacccgttcgcggccccgcgcaggccctggttccccagaaccgacccttttctggcgatgcaggtgcaggaattaacccgctcgatggctaacctgacgttcaagcaacgccgggacgcgccacctgaggggccacctgctaagaaacctaagagggaggccccgcaaaagcaaaaagggggaggccaagggaagaagaagaagaaccaggggaagaagaaggccaagacggggccgcctaatccgaaggcacagagtggaaacaagaagaagcccaacaagaaaccaggcaagagacagcgcatggtcatgaaattggaatctgacaagacattcccaattatgctggaagggaagattaacggctacgcttgcgtggtcggagggaagttattcaggccgatgcacgtggaaggcaagatcgacaacgacgttctggccgcacttaagacgaagaaagcatccaaatatgatcttgagtatgcagatgtgccacagaacatgcgggccgatacattcaagtacacccatgagaagccccaaggctattacagctggcatcatggagcagtccaatatgaaaatgggcgtttcacggtgccaaaaggagttggggccaagggagacagcggaagacccattctggataatcagggacgggtggtcgctattgtgctgggaggtgtgaatgaaggatctaggacagccctttcagtcgtcatgtggaacgagaagggagtaactgtgaagtatactccggagaactgcgagcaatggtcactagtgaccactatgtgcctgctcgccaatgtgacgttcccatgtgccgaaccaccaatttgctacgacagaaaaccagcagagactttggccatgctcagcgttaacgttgacaacccgggctacgatgagctgctggaagcagctgttaagtgccccggaagaaaaaggagatctaccgaggagctgtttaaggagtataagctaacgcgcccttacatggccagatgcatcagatgtgccgttgggagctgccatagtccaatagcaattgaggcagtgaagagcgacgggcacgacggctatgttagacttcagacttcctcgcagtatggcctggattcctctggcaacttaaagggaaggactatgcggtatgatatgcacgggaccattgaagagataccactacatcaagtgtcactccacacatctcgcccgtgtcacattgtggatgggcatggttattttctgcttgctaggtgcccggcaggggactccatcaccatggaatttaagaaaggttcagtcacacactcctgctcagtgccgtatgaagtgaaatttaatcctgtaggcagagaactctacactcatccaccagaacacggagcagagcaagcgtgccaagtctacgcgcacgatgcacagaacagaggagcttatgtcgagatgcacctcccgggctcagaagtggacagcagtttgatttccttgagcggcagttcagtcaccgtgacacctcctgtcgggactagcgccttggtgaaatgcaagtgcggcggcacaaagatctccgaaaccatcaacaaggcaaaacagttcagccagtgcacaaagaaggagcagtgcagagcatatcgactgcagaatgacaagtgggtgtataattctgacaaactgcccaaagcagcgggagccaccctaaaaggaaaactacacgtcccgttcttgctggcagacggcaaatgcaccgtgcctctagcaccggaacctatgataaccttcggtttccgatcagtgtcactgaaactgcaccctaagaatcccacatatctgaccactcgccaacttgctgatgagcctcattacacgcacgagctcatatctgaaccagctgttaggaattttaccgtcactgaaaaggggtgggagtttgtatggggaaaccatccgccgaaaaggttttgggcacaggaaacagcacccggaaatccacatgggctgccacatgaggtgataactcattattaccacagataccctatgtccaccatcctgggtttgtcaatttgcgccgccattgtaaccgtttccgttgcagcgtccacctggctgttttgcaaatccagagtttcgtgcctaactccttaccggctaacacctaacgccaggatgccgctttgcctggccgtgctttgctgcgcccgcactgcccgggccgagaccacctgggagtccttggatcacctatggaacaataaccaacagatgttctggattcaattgctgatccctctggccgccttgattgtagtgactcgcctgctcaagtgcgtgtgctgtgtagtgccttttttaagtcgtggccggcgccgcaggcgccggcgcctacgagcacgcgaccacgatgccgagccaagcgggaatctcgtataa

SEQ ID NO: 14117 - DNA, 1179 bp, unidentified
  misc_feature 1..1179: note = Synthetic
  source 1..1179: mol_type = other DNA
atggatcccactgatctgagcttctccccagatgagatcaataagctcatagagacaggcctgaatactgtagagtattttacttcccaacaagtcacaggaacatcctctcttggaaagaatacaataccaccaggggtcacaggactactaaccaatgctgcagaggcaaagatccaagagtcaactaaccatcagaagggctcagttggtgggggtgcaaaaccaaagaaaccgcgaccaaaaattgccattgtgccagcagatgacaaaacagtgcccggaaagccgatcccaaaccctctattaggtctggactccaccccgagcacccaaactgtgcttgatctaagtgggaaaacattaccatcaggatcctataagggggttaagcttgcgaaatttggaaaagaaaatctgatgacacggttcatcgaggaacccagagagaatcctatcgcaaccagttcccccatcgattttaagaggggggcagggataccggcgggttccatagaagggagtactcaatcggatgggtgggagatgaagtcaaggtcactgagtggtgcaatccatcctgttctccaatcaccgctgcagcaaggcgatttgaatgcacttgtcaccagtgtccagtcacttgctctgaatgtgaacgagatacttaatacagtgagaaatttggactctcggatgaatcaactggagacaaaagtagatcgcattctctcatctcagtctctaatccagaccatcaagaatgacatagttggacttaaagcagggatggctactttagaaggaatgattacaactgtgaaaatcatggacccgggagttcccagtaatgttactgtggaagatgtacgcaagacactaagtaaccatgctgttgttgtgccagaatcattcaatgatagtttcttgactcaatctgaagatgtaatttcacttgatgagttggctcgaccaactgcaacaagtgttaagaagattgtcaggaaggttcctcctcagaaggatctgactggattgaagattacactagagcaattggcaaaggattgcatcagcaaaccgaagatgagggaagagtatctcctcaaaatcaaccaggcttccagtgaggctcagctaattgacctcaagaaagcaatcatccgcagtgcaatttga

SEQ ID NO: 14118 - DNA, 669 bp, unidentified
  source 1..669: mol_type = other DNA
  misc_feature 1..669: note = Synthetic
atggatcccactgatctgagcttctccccagatgagatcaataagctcatagagacaggcctgaatactgtagagtattttacttcccaacaagtcacaggaacatcctctcttggaaagaatacaataccaccaggggtcacaggactactaaccaatgctgcagaggcaaagatccaagagtcaactaaccatcagaagggctcagttggtgggggtgcaaaaccaaagaaaccgcgaccaaaaattgccattgtgccagcagatgacaaaacagtgcccggaaagccgatcccaaaccctctattaggtctggactccaccccgagcacccaaactgtgcttgatctaagtgggaaaacattaccatcaggatcctataagggggttaagcttgcgaaatttggaaaagaaaatctgatgacacggttcatcgaggaacccagagagaatcctatcgcaaccagttcccccatcgattttaagaggggcagggataccggcgggttccatagaagggagtactcaatcggatgggtgggagatgaagtcaaggtcactgagtggtgcaatccatcctgttctccaatcaccgctgcagcaaggcgatttgaatgcacttgtcaccagtgtccagtcacttgctctgaatgtgaacgagatacttaa

SEQ ID NO: 14119 - DNA, 3720 bp, unidentified
  misc_feature 1..3720: note = Synthetic
  source 1..3720: mol_type = other DNA
atggcgtccgctatggagagtgacagcagcggcggtagcggaggggcagacgcccagccacccctggcagaggtggacggggggctcgcccgcgtgacgcgtcagttgctgctgtctggggacgaccccgctgcccgcctgcgcgcgctgatgcctctggagctggggatctttggactgggggatttggcccagccggtgctggtgcgcgattttttaaatactctcaccctcatgagcggccacgcttacccggcggcggtcctccgccaccacgcctactacctactccgggcggcctccttttccaggcgcagcttcggcctcggccatctggaggcggccctggacgtgctggcatcctcactgccccccacgacagcctctccggccaccgacgatccgctggacggctctcggctcatcgcagagacccgggccctggcggccgcgtaccggcgcatcatcgaagagggcagcggggaggtgctcgcggtctctggcccaacggccacctttgccttcgtggaagagctggtggccgacacttatctggcccggtgggacgccttcccgcgggaggggctgtcattctacgcttttaacgcggcgaaaacgacgctggggagatggctggtcaccgtatacgcggagaccaaccgctacccctgggcggctgcagggcagggtcagcccacggccgcggacatcaaggccatggccgtggagctggtggagcacagtgggggcggggccggcgggggagagggtgaagaaagcggtggtggtctctttcaccgccccgagtcactttccagcgtggtggcctcgctgcccctggcccggcggcgggcggtagagatcctgggcgtgtacgcggaggccagcgggggacaaacgccccccgtcgcggctgtgcccgtcctggcctttgacgccgcccggctccggcttttggagccctcaggggccctcttttacgactatgtgtacgaggccctgctctgggaccagacttacggcgtcccagactcggtcatcgaggccttcctggccgggatggcggcagagatggaggccctggccgctcgtgtgcaggaggcggcggggagccgggcatccttctctccagccgccatcgagcaggtggccacggttctgctctcggccgggctcaacgagaccgtggcgggggactacgccatgatgctggcctctgtgccccgggtgtcccgctcgcggtggaggtggctcgaggccaccgccgccctcctagagagtctatcgggctttgccctgcactttttccgactgctgcccaccgcgagccccacgagccgcttcgcccgtgtggcccgggcggcctacctgcgggcggaggccgaggccgtggacagacgagcccggcgcaccagcggcccctctacgcccgccgccgcccccgccgcgacggctgtgggtgtgggggcggcggcggacccttgggacgccgtaacccctctgcgcatcttcatcgtcccccctcccgcggccgagtatgagcaggtggcgggggacctttcatccgaactcctcaggtctctgctatgggtccgctacagccgcctgtggcaggccccggccccggctccggccctcccctgtaagccccccctactccccggcgagcagggaagaaggcagtggacggcagcggtggcggcggccccgcggacagacgtcgaggcatactgccggtccctgagggccggccaaacggcgcgcgcggatccggcctatgtccacagccccttcttcccggccgccttcatcgagttccaaatctggcccgcccttcgccgggtcctctccaacgagctgcccaaaacccgctctctggccgccctgcgctggctggtctccttcggcagcgacctggccctcccttcccccgagctgacccgggcccgccgtcctctcgagctcatatacgccaccgtctgggagatctatgacggggcccctccgatgcctggggagtccccccaggcggtcggactgcgccccctcaacttagagggggaaggcaaggccggggacgcaggagccgagggtgcagaagacgaagagggcgggggcccctgggggctgtcgtcccacgacgcagtccttaggatcatggacgccgtccgagaggtctcaggcatcatctccgagactatctcagcttcagagcgggcggcggaagcaccaccgcttgcctggcccacctccctcttttcactcctcttcaccctgagatacagcacgacggcggagtcgttgggcctggccacccgccgctttctggtctcgggtgagaccctctcggaggacatctcgcgcttgacgggggcagcttggaggctgtgctcccgcccgctcctgtacgacgcagagaccgggagggtgcagatccctctggcgacggaagaggaggaggaggcggtggtagcggtgaaggaaaagagcgtttcatcctccccccgccactactccacggacctccagacgctaaagagcgtcgtggagggcatccaggatgtgtgccgggacgccgccgccaggtgggccctggccacggccgacacggccaccctcagaaggcgcctcctggtgccggccctcagggagagccggggcatcgcggatcaccccctctgggcccacaccagcgagcccctgcgtccggatctcgaggagctcaacgagcgggtggagcacgccctggagctgggatacagcctgacgggcgccctcaggcgcagcgtcgcctaccggttccgggattacacattcgcccgcctgttccagccacccgccatcgacgccgagcgtgccgaggccatagtccggcgagacgcccgcccaccacctgtcttcatccccgcacccaggcggcttccgcaggggggagcagacaccccacctcccctcagcatggacgacatcctgtatctaggcaagagcatctgcaaggccctggtggacgtcctcgaccatcatcctgccgcgccagagaccacccctattaaaacatacacacccgccatggacctaaatccggaacagatcacagtcacccccagaagcccctcggttctcgccgcctttgctcgcacggcccgggtccagacccaccacctcgtgccggccctaaccgacgattccccctcacccgtgggacaaacgcccccgccattccgcatcctccccgccaaaaaactcgcggccattctcctgggtaacggcaggaacgcgagcaagcgccgggccagccgggacctgtcaccaccgccccacggcaggtggcgtgccgttttggactcctccccattctccttctcctcctcagacttttccgaccaggacgagggagagggaggggaggcagatctcaggggcgtgccgggaggaggaggagaaggagcatacgaggaagacagggaaaggccatcggatatcgacaccgcggcccgagcccagaaggttgagacctcctgcccccgcagacgcagtccgcggactaccccctctccttcaaggcgggcaagcggcggcggcggcccagacagaggagaggcggaggcacacacgtaccccccttatctctcggcggctgccgccgccagccgcgtaagaccccggaccagaaggggggcgacaaggcgtcctccccgccccaccgccgaagatgagtaa

SEQ ID NO: 14120 - DNA, 3741 bp, unidentified
  source 1..3741: mol_type = other DNA
  misc_feature 1..3741: note = Synthetic
acggacccctggaccttcatggcgtccgctatggagagtgacagcggcggcggtagcggaggggcagacgcccagccgcccctggcagaggtggacggggggctcgcccgcgtgacgcgtcagttgctgctgtctggggacgaccccgctgcccgcctgcgcgcgctgatgcctctggagctggggatctttggactgggagatttggcccagccggtgctggtgcgcgattttttaaatactctcaccctcatgagcggccacgcttacccggcggcggtcctccgccaccacgcctactacctactccgggcggcctccttttccaggcgcagcttcggcctcggccatctggaggcggccctggacgtgctggcctcctcactgccccccacgacagcctctccggccaccgacgatccgctggacggctctcggctcatcgcagagacccgggccctggcggccacgtaccggcgcatcatcgaagagggcagcggggaggtgctcgcggtctctggcccaacggccacctttgccttcgtggaagagctggtggccgacacttatctggcccggtgggacgccttcccgcgggaggggctgtcattctacgcttttaacgcggcgaaaacgacgctggggagatggctggtcaccgtatacgcggagaccaaccgctacccctgggcggctgcagggcagggtcagcccacggccgcggacatcaaggccatggccgtggagctggtggagcacagtgggggcggggccggcgggggagagggtgaagaaagcggcggtggcggtctctttcaccgccccgagtcactttccagcgtggtggcctcactgcccctggcccggcggcgggcggtagagatcctgggcgtgtacgcggaggccagcgggggacaaacgccccccgtcgcggctgtgcccgtcctggcctttgacgccgcccggctccggcttttggagccctcaggggccctcttttacgactatgtgtacgaggccctgctctgggaccagacttacggcgtcccagactcggtcatcgaggccttcctggccgggatggcggcagagatggaggccctggccgctcgtgtgcaggaggcggcggggagccgggcatccttctctccagccgccatcgagcaggtggccacggttctgctctcggccgggctcaacgagaccgtggcgggggactacgccatgatgctggcctctgtgccccgggtgtcccgctcgcggtggaggtggctcgaggccaccgccgccctcctagagagtctatcgggctttgccctgcactttttccgactgctgcccaccgcgagccccacgagccgcttcgcccgtgtggcccgggcggcctacctgagggcggaggccgaggccgtggacagacgagcccggcgcaccagcggcccctctacgcccgccgccgcccccgccgcgacggctgtgggtgtgggggcggcggcggacccttgggacgccgtaacccctctgcgcatcttcatcgtccctcctcccgcggccgagtatgagcaggtggcgggggacctttcatccgaactcctcaggtctctgctatgggtccgctacagccgcctgtggcaggccccggccccggctccggccctcccctgtaagccccccctactccccggcgagcaggggagaaggcagtggacggcggcggtggcggcggccccgcggacagacgtcgaggcatactgccggtccctgagggccggccaaacggcgcgcgcggatccggcctatgtccgcagccccttcttcccggccgccttcatcgagttccaaatctggcccgcccttcgccgggtcctctccaacgagctgcccaaaacccgctctctggccgccctgcgctggctggtctccttcggcagcgacctggccctcccttcccccgagctgacccgggcccgccgtcctctcgagctcatatacgccaccgtctgggagatctatgacggggcccctccgatgcctggggagtccccccaggcggtcggactgcgccccctcaacttagagggggaaggcaaggccggggacgcaggagccgagggtgcagaagacgaagagggcgggggcccctgggggctgtcgtcccacgacgcagtccttaggatcatggacgccgtccgagaggtctcaggcatcatctccgagactatctcagcttcagagcgggcggcggaagcaccaccgcttgcctggcccacctccctcttttcactcctcttcaccctgagatacagcacgacggcggagtcgttgggcctggccacccgccgctttctggtctcgggtgagaccctctcggaggacatctcgcgcttgacgggggcagcttggaggctgtgctcccgcccgctcctgtacgacgcagagaccgggagggtgcagatccctctggcgacggaagaggaggaggaggcggtggtagcggtgaaggaaaagagcgtttcatcctccccccgccactactccacggacctccagacgctaaagagcgtcgtggagggcatccaggatgtgtgccgggacgccgccgccaggtgggccctggccacggccgacacggccaccctcagaaggcgcctcctggtgccggccctcagggagagccggggcatcgcggatcaccccctctgggcccacaccagcgagcccctgcgtccggatctcgaggagctcaacgagcgggtggagcacgccctggagctgggatacagcctgacgggcgccctcaggcgcagcgtcgcctaccggttccgggattacacattcgcccgcctgttccagccacccgccatcgacgccgagcgtgccgaggccatagtccggcgagacgcccgcccaccacctgtcttcacccccgcacccaggcggcttccgcaggggggagcagacaccccacctcccctcagcatggacgacatcctgtatctaggcaagagcatctgcaaggccctggtggacgtcctcgaccatcatcctgccgcgccagagaccacccctattaaaacatacacacccgccatggacctaaatccggaacagatcacagtcacccccagaagcccctcggttctcgccgcctttgctcgcacggcccgggtccagacccaccacctcgtgccggccctaaccgacgattccccctcacccgtgggacaaacgcccccgccattccgcatcctccccgccaaaaaactcgcggccattctcctgggtaacggcaggaacgcgagcaagcgccgggccagccgggacctgtcaccaccgccccacggcaggtggcgtgccgttttggactcctccccattctccttctcctcctcagacttttccgaccaggacgagggagagggaggggaggcagatctcaggggcgtgccgggaggaggaggagaaggagcatacgaggaagacagggaaaggccatcggatatcgacaccgcggcccgagcccagaaggttgagacctcctgcccccgcagacgcagtccgcggactaccccctctccttcaaggcgggcaagcggcggcggcggcccagacagaggagaggcggaggcacacacgtaccccccttatctctcggcggctgccgccgccagccgcgtaagaccccggaccagaaggggggcgacaaggcgtcctccccgccccaccgccgaagatgagtaa

SEQ ID NO: 14121 - DNA, 1488 bp, unidentified
  source 1..1488: mol_type = other DNA
  misc_feature 1..1488: note = Synthetic
atggggcaattcattagtttcatgcaggagatacctattttcttgcaagaagcactcaacattgcattggtggcagtcagcctcatctgtatagtgaaaggcttggtgaacctatacaggtgcggactgtttcaattgatggtcttccttgtgttggctggcagatcatgttcagaggaaacatttaagataggtatgcacacaaaattccaagaggtgtccctctctttaagtgcacttttgaccaatcagtctcatgaacttcctatgttatgtttagccaacaaaacacatctctatctaaagagtggtagatccagtttcaaaatcaacattgatagtgtcactgtgttaacaagatctgaagtgaacttaacatcaattaatttgacgagatcgatcgatgtctttgttcactctcctaaacttggttcttgttttgaaagtgatgaggagtgggttgttgcttggtggattgaagccatcggtcacagatgggaccaggacccaggtcttctatgcaggaataaaaccaaaacagagggtaaactgatccagattaacatttcaagagctgatggcaatgttcactatggatggagattaaaaaatggacttgatcatatttacagaggacgtgaagaaccctgttttgagggtgagcagtgtcttatcaaaattcaacctgaagactggccgactgactgtaaggctgaccacacaaacacattccgctttttatcaaggagccaaaaaagcatagctgtaggaaggactctcaaggcatttttctcctggtcgcttactgaccctttagggaacgaagcccctgggggatactgtcttgaaaagtggatgcttgttgctagcgaattaaagtgttttgggaacactgcaattgccaagtgcaaccaaaatcacgactcagagttttgtgacatgctaaggctgtttgattacaacaaaaatgctataaaaacactgaatgaggagactaagacgagggtgaatgtcctgagccacaccatcaatgctctgatctcagacaaccttctgatgaagaataagattcgagagctgatgagtgtaccttattgcaactacacacgattttggtatgtcaatcacacactttcaggacagcactctcttccaagatgctggatgataagaaacaattcttacctcaactcatctgaatttagaaatgagtggattcttgaaagtgatttcctcatttctgagatgctgggtaaggagtattcagagagacaggggagaactccaatcactttagtggacatttgtttttggagtacagtgttcttcactagcacactattcttgcacctcattggtttcccaactcatgaacacattcgaggggaaggttgccctctcccccatagattgaacagcatgggaggatgtaggtgtgggaagtatctgcctctgaagaagccaactatttggcatcgtagacattag

SEQ ID NO: 14122 - DNA, 1314 bp, unidentified
  source 1..1314: mol_type = other DNA
  misc_feature 1..1314: note = Synthetic
atgggaatcaaaaacctgaaagcgctgctgctgcagcacgagtctttgttggcgcgcgagctgcccggcgagcacgccgcggtcttcgtggacttcatgggtgtttacattgccgcggcgtattccgccggcagcgcgcgcgagctacggagtaccatgaacgcgaagctgcaggcctggcgcgcgcgcgcgccgcgcgtagtgctctttgtggaccgcggcgtcatcgacatcaagcgcgctctgcgccagcgccgccaggacagcattgccgcggcgtgcgcgcgtaagcgcgaggcagttcgcgcgctggccgcgcgcgcctccgcgttggacccgtcagacccattctacgcggagacgcgcgagggactgcgcgcgcgcatacgcaaggcgcgcttctaccttttcctggccgaggccgggaacctgtaccgcctgcgcgacgagctgctagccgccgcgccgccaggcgtggccgtggtgcattgcgacgaggtggatgctgagttcgagatgtgcgcgcgcgcgcttgcactggcacggagtacaggccgctggccgctgctagtcagcaacgaccaggacaccctctgtctggcttgtgccgacgcgcttcctaaggccattgccagcgcgggcgccgagtatgagctgtggcctagcacgcacgcggtctacttggccaagctgaccgtgttgctcaacggctgcgacttcttcccggggctggcggggctagctgtcactcgcgacacgttgccgcgcttccgccttttcgaagacttttccatgcgcaacgtgctgcgtagcctggccttccgcgactacgcgctgcgcggcgcggcgcgcgtggaggacgcgcgcgcaatcttgcgctttatcgagcgctacgtggctctggagcgcgccgtctaccgcgagccgccgcctccgccaatgtctgtgcatgccttcctgcgcgcggcgcttgcaccgctctgggcgccgctagcagccgcgcgcgcggcaggtaccgcgctgttggacgcactcgccgccgcgctgcaggcgctgcccgctgcgcgcccgcgccgctcgcgcacgcgccgcgccgcgcgtggcatgctggcataccaccgcgaacgctcgcccacgcgcgaggacgtagcactgctggccggcatgctgggcttccgagtaggcccggcgcccgggctactagccgtgtgcttgcaacgccgcgacgtactgctgtgcttcgagggcgccttctactttagcgaccgcttcattattgaaaagagagcgcccgtgataaatatctgcgcctag

SEQ ID NO: 14123 - DNA, 606 bp, unidentified
  misc_feature 1..606: note = Synthetic
  source 1..606: mol_type = other DNA
aagccgcactttctaaaaaaaaaaaaaatgtccattctcatctcgcccagtaataataccggttggggactgtatgcgcccaccaagatgtatggaggcgcccgcaagcgctctacccagcatcctgtgcgcgttcgcggtcatttccgcgctccctggggcgcactcaagggtcgtacccgcactcggaccacggtcgatgatgtgatcgaccaggtggtcgccgatgctcgtaattatactcctactgcgcctacatctactgtggatgcagttattgacagtgtggtggcagacgcccgcgcctatgctcgccggaagagccgaaggaggcgcatcgccaggcgccacagggctactcccgccatgcgagccgcaaaagctattctgcggagggccaaacgtgtggggcgaagagccatgcttagagcggccagacgcgcggcttcaggtgccagcagcggcaggtcccgcaggcgcgcggccacggcggcagcagcggccattgccaacatggcccaaccgcgaagaggcaatgtgtactgggtgcgtgatgccactaccggccagcgcgtgcccgtgcgcacccgcccccctcgcacttag

SEQ ID NO: 14124 - DNA, 1650 bp, unidentified; identical to SEQ ID NO: 10536
  source 1..1650: mol_type = other DNA
  misc_feature 1..1650: note = Synthetic

SEQ ID NO: 14125 - DNA, 618 bp, unidentified
  misc_feature 1..618: note = Synthetic
  source 1..618: mol_type = other DNA
atgggctccagcgagcaggagttggtcgccatcgtgcgcgaactgggctgcggaccttactttctgggcacgtttgacaaacgctttccgggttttatggcaccgcataagctggcgtgtgccattgttaacacggcgggccgcgaaaccggcggcgtacactggctggccctggcctggaacccaaagaaccgtacctgctacctcttcgacccatttggcttttcggacgagcgcctcaaacagatttaccagtttgagtatgaaggtctcctaaagcgtagtgcgttggcctcaaccccggaccattgtatcaccctaattaagtccacccaaactgttcaaggaccgttttcggcggcctgcggccttttctgctgcatgtttttacatgcttttgtaaactggcccaccagtcccatggagcgcaaccccaccatggaccttcttaccggcgttccaaacagcatgcttcaaagcccccaggttgtacccaccctgcgtcacaaccaggagcggttgtaccgtttcctggcgcaacgttctccctactttcagcgtcattgcgagcgtatcaaaaaagccaccgcgtttgaccaaatgaaaaacaacatgtaa

SEQ ID NO: 14126 - DNA, 1515 bp, unidentified
  source 1..1515: mol_type = other DNA
  misc_feature 1..1515: note = Synthetic
attcgcctctcgagatcgttattcccggacccaaccgcccccatggacctgttggtcgacgatctgtttgcggacgcggacggggtttcgccaccgccccccaggccagccgggggtcccaagaacaccccagccgcccctccgctgtacgccaccggtcggctgagtcaggcccagctgatgccctcgccgcccatgcccgtcccccccgcggccctgtttaaccgtctcctcgacgatctgggcttcagcgcgggtcccgcgctgtgtaccatgctagatacctggaacgaggacctgttctctgggttcccgaccaacgccgacatgtaccgggagtgcaagtttctgtcgacgctgcccagcgacgtgatcgactggggggatgcgcacgtccccgagcgctccccgatcgacattcgcgcccacggcgacgtggcgttccccaccctgcccgccacccgcgacgagctgccttcgtactacgaggccatggcgcagtttttccgcggtgagctgcgggcgcgggaggagagctaccggaccgtgttggcaaatttttgctcggccctgtaccggtacctgcgcgccagcgttcggcagctacaccgccaggcacacatgcggggccgcaaccgcgacctgcgggagatgctgcgcaccacgatcgcggacaggtactaccgcgagaccgcgcgcctggcgcgcgtcctgtttctgcatctatacctctttctgagccgcgagatcctatgggccgcgtacgccgagcagatgatgcggcccgatctgttcgacggcctctgctgcgacctggagagctggcgccagttggcgtgtctgtttcagcccctgatgtttatcaacggatcgctcaccgtgcggggagttcccgtggaggcccggcgactgcgggagctaaaccacattcgcgagcacctgaacctcccgctggtgcgaagtgcggcggcggaggaacccggggcgcccctcacgaccccgcccgtcctgcagggcaaccaggcccgctcctctgggtactttatgctgctgatccgggccaagttggactcgtactccagcgtcgcgacctcggagggcgagtccgtcatgcgggagcacgcgtatagccgcgggcggaccagaaacaattacggatcgacaatcgagggcctgctcgacctcccggacgacgatgacgctcccgcggaggccgggctggtggcgccgcgcatgtcgtttctctccgcgggacaacgcccccgcagactgtccaccaccgcccccattaccgacgtcagcctgggagacgaactccgcctggacggcgaggaggtggatatgacgcccgccgacgccctggacgacttcgacttggagatgctgggggacgtggagtccccctccccgggaatgacccacgaccccgtctcgtatggggctttggacgtggacgattttgagtttgaacagatgtttaccgatgccatgggcattgacgactttggggggtag

SEQ ID NO: 14127 - DNA, 888 bp, unidentified
  source 1..888: mol_type = other DNA
  misc_feature 1..888: note = Synthetic
gtgtacacgtactttaaaatcgccgcaataatgaaacgcgctgtatccaaaaccaccgtcgcgtctaaccgcgctcctcagcaggaagatgcagcgcccgccaggcggttcggcgagaaccaggcgatgtcgtgcaccgacgcgatcaacttcgccaagtcgctctcgtcgagccagaccaaggccatcgatgctgtgactctaactccgtcgcagtacccgagctgctccaacatcaacgtgtgtctcgtcgaaagtctagcatccaagctcgtctcgccgctcatcgtcgtgaagggcgagtttaagatctacccgagcaagaagaccgacatgcagcggcagaacgacaacgggtacttcggtcgcctcaagcccgtgagcgccagtccgctgctctaccagctgctggagaacatatacgagaacatcaaaaccggcgttcgcgttccgccgtcgctgcgcaacttcaacactgaaacatccatcgacaacacctttaagtccggatgtctgtatctcaaccgcctgaccggcgctctcctagagttcaccagcgacgacgacgcccagccgcagatatgtccgctgatacgagagatagaaaacctcgcaacccgcgacgcgcagatggcgacgctcatcctggcgccggtggtgttctaccgctcgggcggcgagggcaaagtcaccttcgcggttaagaagatcaccatgccgcgcgagtgctcgctgaccgtgctcggtctcgagggcgagcagacgtgtgtgcgcatgagcgagactcagcccacattcaccgaggagcaggacgtgcgcggcctgggcgtcgtcgatcctggcacgggcttcgaggacgaggagttggaagcgccgttcaatatctag

SEQ ID NO: 14128 - DNA, 117 bp, unidentified
  misc_feature 1..117: note = Synthetic
  source 1..117: mol_type = other DNA
aggaagatgcagcgcccgccaggcggttcggcgagaaccaggcgatgtcgtgcaccgacgcgatcaacttcgccaagtcgctctcgtcgagccagaccaaggccatcgatgctgtga

SEQ ID NO: 14129 - DNA, 123 bp, unidentified; identical to SEQ ID NO: 6512
  source 1..123: mol_type = other DNA
  misc_feature 1..123: note = Synthetic

SEQ ID NO: 14130 - DNA, 3744 bp, unidentified
  source 1..3744: mol_type = other DNA
  misc_feature 1..3744: note = Synthetic
atggagttcataccagcacaaacttactacaatagaagataccagcctagaccctggactcaacgccctactatccaggtgatcaggccaaaaccacgccgaagaaggcctgcaggacaactcgcacaactgatatccgcagtcagcagactagcactgcgtacagttccccagaaaccacgccggacccgaaaaattaagaagcaaaagcaagtaaagcaagaacaacagagtactacgaaccagaagaaaaaggcgccgaaacaaaagcagacccaaaagaaaaagagaccaggacgaagggaaaggatgtgcatgaagattgaaaatgactgcatcttcgaagtcagacatgaaggaaaagtaacggggtatgcatgcctagtaggtgataaggtaatgaaaccagcacacgtgaaaggaactattgacaacgcagacctagcgaagttggcgttcaaaagatcatccaaatatgatctagagtgcgcacagataccagtgcacatgaaatcggacgcctcaaagttcacccatgaaaaaccagaaggctattacaactggcatcacggagcagtacagtattctggagggaggttcacgatccctacaggcgcaggaaagcctggggacagcggaagaccaatctttgacaacaaggggcgtgtcgtggctattgttctaggcggagcaaacgaaggaaccaggacagcactatctgtagtgacttggaataaagacatagtcacaaaaatcacaccagaggggtcagttgaatggagccttgccctccctgtcatgtgcctgttggcaaatacaaccttcccatgttcccaaccgccttgcgcgccgtgctgctacgaaaagaaaccggaagaaaccttgagaatgctggaggacaacgtcatgcaaccaggatattaccagttactcgattcagcattggcctgctcacaacgtcgtcaaaaacgtaatgcaagagaaaacttcaatgtctacaaagtcactaggccgtacttagcccactgtcctgactgcggggagggacactcatgccacagcccaatagcattagaacggatcagaagtgaggcaacagatggtaccttgaaaatccaggtatctctgcaaatcggaataaagacagacgacagccacgattggacgaagctacggtatatggatagccatacacctgtggatgcagaccgatccgggttgtttgtcagaacgtcagcaccgtgcaccatcacgggaacgatgggacatttcatactagcacgctgtccgaaaggagagacgctgacggtaggatttgtagacagtagaaggatcagtcacacgtgcatgcacccgttccgccacgagccaccgctgatagggagagagaagtttcactcccgcccgcagcatggcaaagaactaccttgcagtacatacgtccataccacagcggcaactgctgaggaaatagaagtgcatatgccgccagatacccctgactacacgctgatgacacagcaagcgggaaacgttaagatcacagttgacggccagacggtacgatacaagtgcaaatgtgacggctccaatgaaggattaataaccgctgacaaagtcataaataactgcaaagtagaccaatgccacacagcggttacaaaccacaagaaatggcaatacaattcaccgctgaccccgcggaactccgaacaaggagatagaaaaggtaagatccatatcccatttccactggtgaacacaacctgcagggtaccaaaagcaagaaatccgactgtcacatacggtaaaaacagagtcactctgctgttacatccagaccacccaacactcctttcgtaccgcgccatgggaaggatcccggattaccatgaagagtggataacaaacaagaaggaaataagtatcacagtaccagcagaaggcttagaggttacgtggggtaataatgacccatacaaatattggccccaactgtctacaaatggtactgcgcacgggcacccacatgaaataatcctctattactatgagctgtacccaactaccacaattgctgtactagctgctgcttctatcgtaataacatctttggtaggtctatcattaggcatgtgcatatgcgcgagacgcaggtgcatcacgccatatgagctgactccaggagctaccatcccattcctcctaggtgtactatgctgtgccaggactgcaaaagcagcatcgtactacgaagctgcaacatacctctggaatgagcaacaaccattattttggttacagcttctaatccctctgtcagctgcaattgttgtgtgtaattgcctaaaacttttaccatgctgctgcaaaacattgacttttttagccgtcatgagcatcggtgcccgcactgtgaccgcgtacgagcacgcaacagtgatcccgaacacggtgggagtaccgtgtaagactcttgttagcagaccagggtacagccctatggtcttagaaatggagctacagtcggtcactctggaaccagcattatccttggattacattacgtgtgagtataaaacaatcacaccgtccccgtacgtaaaatgctgtggtacagctgaatgtaaggccaagaacctgccagattataactgcaaagtattcacaggcgtctacccatttatgtggggaggagcatactgcttctgtgacgcagagaacacacagctcagcgaggcacacgttgagaaatcagaatcatgcaaaactgagtttgcatcagcctacagagcccacacagcttcagtatcagctaaactacgtgtcttttaccaagggaataatatcaccgtgtctgcatacgccaatggtgatcatgcagttacggtggaagacgcgaagtttgtcatcggtccactatcgtccgcctggtcaccatttgataataagatcgtggtgtacaaaggcgaagtctacaatatggactatccacctttcggcgcagggaggccaggacagttcggtgacatccagagccgcacgccagacagcaaggacgtctatgcgaatacgcagttaatactgcaaagaccagcggcaggagcaatacacgtgccttactcccaggcaccttcgggctttaagtactggctcaaggaaaaaggggcatcattgcagcatactgcaccatttggctgtcagatagcaacaaacccggtaagagcagtgaactgtgcagtgggcaacataccagtctccattgacatcccagatgcagctttcaccagggtcactgacgctccttccatcacagacatgtcctgcgaagtagcttcgtgtacccattcatctgattttggaggtgccgcagtcataaagtacacagctagtaaaaaaggaaaatgcgccgtgcactctgtaacaaatgcggtcactatccgcgaacctaacgtagatgtcaagggaacagcacaattgcaaattgccttctcgaccgcactagctagtgcggaattcaaggtgcagatctgctccacactggtacactgctcagcgacgtgccatcctcctaaagaccatatagtcaattacccgtcacctcacaccacactaggagtgcaggacatttcaacgacagctatgtcttgggtccagaagattacaggaggagtgggactcgtggttgctatagctgctttgatcttaattatagttctctgcgtatcatttagcagacactaa

SEQ ID NO: 14131 - DNA, 2472 bp, unidentified
  misc_feature 1..2472: note = Synthetic
  source 1..2472: mol_type = other DNA
atggagttcataccagcacaaacttactacaatagaagataccagcctagaccctggactcaacgccctactatccaggtgatcaggccaaaaccacgccgaagaaggcctgcaggacaactcgcacaactgatatccgcagtcagcagactagcactgcgtacagttccccagaaaccacgccggacccgaaaaattaagaagcaaaagcaagtaaagcaagaacaacagagtactacgaaccagaagaaaaaggcgccgaaacaaaagcagacccaaaagaaaaagagaccaggacgaagggaaaggatgtgcatgaagattgaaaatgactgcatcttcgaagtcagacatgaaggaaaagtaacggggtatgcatgcctagtaggtgataaggtaatgaaaccagcacacgtgaaaggaactattgacaacgcagacctagcgaagttggcgttcaaaagatcatccaaatatgatctagagtgcgcacagataccagtgcacatgaaatcggacgcctcaaagttcacccatgaaaaaccagaaggctattacaactggcatcacggagcagtacagtattctggagggaggttcacgatccctacaggcgcaggaaagcctggggacagcggaagaccaatctttgacaacaaggggcgtgtcgtggctattgttctaggcggagcaaacgaaggaaccaggacagcactatctgtagtgacttggaataaagacatagtcacaaaaatcacaccagaggggtcagttgaatggagccttgccctccctgtcatgtgcctgttggcaaatacaaccttcccatgttcccaaccgccttgcgcgccgtgctgctacgaaaagaaaccggaagaaaccttgagaatgctggaggacaacgtcatgcaaccaggatattaccagttactcgattcagcattggcctgctcacaacgtcgtcaaaaacgtaatgcaagagaaaacttcaatgtctacaaagtcactaggccgtacttagcccactgtcctgactgcggggagggacactcatgccacagcccaatagcattagaacggatcagaagtgaggcaacagatggtaccttgaaaatccaggtatctctgcaaatcggaataaagacagacgacagccacgattggacgaagctacggtatatggatagccatacacctgtggatgcagaccgatccgggttgtttgtcagaacgtcagcaccgtgcaccatcacgggaacgatgggacatttcatactagcacgctgtccgaaaggagagacgctgacggtaggatttgtagacagtagaaggatcagtcacacgtgcatgcacccgttccgccacgagccaccgctgatagggagagagaagtttcactcccgcccgcagcatggcaaagaactaccttgcagtacatacgtccataccacagcggcaactgctgaggaaatagaagtgcatatgccgccagatacccctgactacacgctgatgacacagcaagcgggaaacgttaagatcacagttgacggccagacggtacgatacaagtgcaaatgtgacggctccaatgaaggattaataaccgctgacaaagtcataaataactgcaaagtagaccaatgccacacagcggttacaaaccacaagaaatggcaatacaattcaccgctgaccccgcggaactccgaacaaggagatagaaaaggtaagatccatatcccatttccactggtgaacacaacctgcagggtaccaaaagcaagaaatccgactgtcacatacggtaaaaacagagtcactctgctgttacatccagaccacccaacactcctttcgtaccgcgccatgggaaggatcccggattaccatgaagagtggataacaaacaagaaggaaataagtatcacagtaccagcagaaggcttagaggttacgtggggtaataatgacccatacaaatattggccccaactgtctacaaatggtactgcgcacgggcacccacatgaaataatcctctattactatgagctgtacccaactaccacaattgctgtactagctgctgcttctatcgtaataacatctttggtaggtctatcattaggcatgtgcatatgcgcgagacgcaggtgcatcacgccatatgagctgactccaggagctaccatcccattcctcctaggtgtactatgctgtgccaggactgcaaaagcagcatcgtactacgaagctgcaacatacctctggaatgagcaacaaccattattttggttacagcttctaatccctctgtcagctgcaattgttgtgtgtaattgcctaaaacttttaccatgctgctgcaaaacattgacttttttaagccgtcatgagcatcggtgcccgcactgtgaccgcgtacgagcacgcaacagtgatcccgaacacggtgggagtaccgtgtaa

SEQ ID NO: 14132 - DNA, 897 bp, unidentified
  misc_feature 1..897: note = Synthetic
  source 1..897: mol_type = other DNA
ttgcgccgcctaatgcatccgcaccacagaaactatacggcctcaaaagcctcggcacatagcgtgaagtcggtgtccaggtgtggaaaatctcgctcagagctgggaagaatggaaagggttggcagtgtggcccgctcaatatgttcccggcacaccagacatggtgtagacagatcccatttttcactacgggacttcttcaggggaatctctgccaactttgagctgggcaaagattttctgcgtgagatgaacacccccatacatgtctcagaggccgtgtttctcccactgtcactgtgcactctctcccccgggcgctgccttcgcctgtctcccttcggccacagcctgactctggggtctcactgcgagatctgcatcaataggtcccaggttcatgtgcctcaggagtttagctccacccagctctccttcttcaacaatgtccacaagataatacccaacaagaccttctatgtgtctctgctcagcagctctcccagtgcagtaaaggctggactttcccaacccagccttctctacgcttacctggtcaccggacacttttgtggcaccatctgccccatcttcagcacaaatggaaaagggcgcctaatcatgcatctcctgctccagggcacctcccttcacatcccagagacctgcttgaaactgttatgtgaaaacataggccccacctacgagctggccgtggacctagtaggggacgccttctgcataaaggtcagccccagagacacggtatatgagaagactgtcaatgtcgacgaagatgccatctacgaggccatcaaggacctggaatgtggggatgagctgcgcctacagatcatcaactatacccagctcattttggaaaataaacagtag

SEQ ID NO: 14133 - DNA, 957 bp, unidentified
  source 1..957: mol_type = other DNA
  misc_feature 1..957: note = Synthetic
atggccccggtcaccccagatgccgtgaatgcacgccaacagcgaccggcagatcccgcattgcgccgcctaatgcatccgcaccacagaaactacacggcctcaaaggcctcggcgcatagcgtgaagtcggtgtccaggtgtggaaaatctcgctcagagctgggaagaatggaaagggttggcagtgtggcccgatcaatatgttcccggcacaccagacatggtgtagacagatcccatttttcactacgggacttcttcaggggaatctctgccaactttgagctgggcaaagattttctgcgtgagatgaacacccccatacatgtctcagaggccgtgtttctcccactgtcactgtgcactctctcccccgggcgctgccttcgcctgtctcccttcggccacagcctgactctggggtctcactgcgagatctgcatcaataggtcccaggttcatgtgcctcaggagtttagctccacccagctctccttcttcaacaatgtccacaagataatacccaacaagaccttctatgtgtctctgctcagcagctctcccagtgcagtaaaggctggactttcccaacccagccttctctacgcttacctggtcaccggacacttttgtggcaccatctgccccatcttcagcacaaatggaaaagggcgcctaatcatgcatctcctgctccagggcacctcccttcacatcccagagacctgcttgaaactgttatgtgaaaacataggccccacctacgagctggccgtggacctagtaggggacgccttctgtataaaggtcagccccagagacacggtatatgagaaggctgtcaatgtcgacgaagatgccatctacgaggccatcaaggacctggaatgtggggatgagctgcgcctacagatcatcaactatacccagctcattttggaaaataaacagtag

SEQ ID NO: 14134 - DNA, 957 bp, unidentified; identical to SEQ ID NO: 14133
  source 1..957: mol_type = other DNA
  misc_feature 1..957: note = Synthetic

SEQ ID NO: 14135 - DNA, 168 bp, unidentified
  misc_feature 1..168: note = Synthetic
  source 1..168: mol_type = other DNA
ctgcgcgaggagcccaagatcgagctgctgccgctggagatgtacgcggaccccgaccgcgtgcgcgcgctcatcaacgagacgcgcgccacggagggcgtctacgggcgctgctacctggaggccgacggccgaacggtgcgcatggctctgaagagccttatttaa

SEQ ID NO: 14136 - DNA, 21 bp, unidentified
  source 1..21: mol_type = other DNA
  misc_feature 1..21: note = Synthetic
gtggcgttcgccttcgcataa

SEQ ID NO: 14137 - DNA, 72 bp, unidentified; identical to SEQ ID NO: 6523
  source 1..72: mol_type = other DNA
  misc_feature 1..72: note = Synthetic

SEQ ID NO: 14138 - DNA, 2070 bp, unidentified
  misc_feature 1..2070: note = Synthetic
  source 1..2070: mol_type = other DNA
ttgcgccgccgcgtcatggatctgcctactaccgtcgtgcgaaaatactggacttttacgaatcctaaccgcatcctgcatcagagcgttaatcagactttcgacgtgcgccagttcgtctttgacaacgcccgtctggtcaactgcgtggacggcgatggcaaggtgctgcacctcaacaagggctggctctgcgctaccattatgcagcacggcgaggcttcggctggcgccaagacgcagcagggcttcatgtccattgacattacgggcgacggggaacttcaggagcacctctttgtacgcggcggtatcgtctttaacaaatccgtctcctcggtggtgggctccagcggacccaatgagagcgcgctgctcactatgatttccgagaacggtaatttgcaagtgacttacgtgcggcattacctgaaaaaccatggcgaatcctccggcggaggcggtggttgcggcgccgcgtctaccgcctccgccgtctgcgtgtcctcgttgggtggcagcggcgggactcgcgacggcccttctgcggaggaacagcaacggcgaaggcaggaacagcgtcacgaagaacggcgcaaaaaatcgtcctcgtctgccggtggtggtggaggcggcggcgctagtggtggcggtggcggcggcgggagcggcggtcagcactcctcggactccgccaacggactgctgcgggatccccggttgatgaaccggcagaaggagcggcggccgcctccctcctccgagaacgacggctctcctcccctccgggaggcgaagagacaaaagaccaccgcacagcacgaaggccatggcggcggcggcaagaacgagacggagcagcagtccggtggtgctggcggtggtggtggcggcggcagcggccgcatgtcgctgccgctggacacgtctgaagcggtggcctttctcaattactcgtcctcatcctccgcggtctcttcttcctccaacaaccaccaccaccatcatcaccaccataacgccgtgacggacgtggccgccggcaccgacggtgcgttacttctacccattgagcgcggagcggtggtttcgtcgccgtcgtcgacgtcgccgtcgtcacttctttcgctccctcgacccagcagcgcccacagcgcgggcgagacggtgcaggagtccgaggcggcggcgacggcggcggctgcggggttaatgatgatgaggaggatgaggagggctccggctgaggcggcggaggcaccaccgcagtcggaggaggagaatgattccaccactccagtctctaactgccgtgttcctccgaattcgcaggaatccgcggcgcctcagcctcctcgcagtccgcgttttgatgacattatacagtcattgaccaaaatgctcaatgattgtaaggagaaaagattgtgcgatctccccctggtttccagcagactcttgccagagacgtcgggcgggactgtcgtcgtcaaccacagcagcgtcgcgaggaccgccgcagctgtctccacagccggcgttggccccccagcagtcgcatgtccgccactcgtcaccaccggtgttgtaccctcaggttccgtcgccggtgtcgcgcccgttgccgccgcagtcgaaacaccagctgctcctccccggcccgtgtgtgaaatcaagccctacgtggtaaaccccgttgtcgccaccgccgcggctgccagtaactcttcctcgtcttcttcggctccactgccgccgccaccaccaccgccgggcggacgtcggggtcgggcccggaacaatacccgaggaggcggcggcggtggtggcggtggtagaaacagccggcggcaggccgcatcgtcgtcgtcttcctcctctcggagatcgcgacggagaaacaaccgccatgaggacgaggacaacgatcctctgctccggttgtcgcaagtcgccggcagcggccgccggcgagggccctcgttcctcgaggacggactcgaaattatcgatcccagcgaggaggctgcgatcgccgccgcctcgatcgcggcgtttttcgacgattaa

SEQ ID NO: 14139 - DNA, 333 bp, unidentified
  misc_feature 1..333: note = Synthetic
  source 1..333: mol_type = other DNA
atgttctatctcaataacgtgatccggcgccgcatcgtgctcaacttcgactacccgaaccaggagtacgacttctttcacatgttccacctcctaaatacggtactgtgtcctcgcagcttcgacagccccaccaagaaggtgcttttcttgcagcaatcgatcttccgcttcctgggtatccagtcaccgctgcccgagaagttgccattgcccgagcgcccgcgcaagcatgaaccagcacaacgtggagtacctggccaagatcctgtgtctgaaggccgaggtcgcgcgaaacccgtacgtggtcgtcagcaaggagctcctgagtag

SEQ ID NO: 14140 - DNA, 201 bp, unidentified
  source 1..201: mol_type = other DNA
  misc_feature 1..201: note = Synthetic
atggacgaggccggcaagacgggcgtgacggtcgaggacgccgcgcggcacctaggcggcgacgcgcgcctggccgagatgacgctgacgagcctgtgcagagagaaaattgcaaagagaagaaccgttgacggcatgaaacggtttgccctgaacccccgactcgaggctcgcgactcgcccatggtcgtgttcaactag

SEQ ID NO: 14141 - DNA, 510 bp, unidentified
  source 1..510: mol_type = other DNA
  misc_feature 1..510: note = Synthetic
atggccgcgccgcgccgaatcagccttcccagcgtgacaatctctgcgccgcgcgcggtgctgcgccaggaaaggcaggagcctctgtcctgcgtgcttcccgagtactactacactgtcgcgcagctgcgcctgcaggtcaactccgagcgcgcgcgctgctggttctgctcgcaggcggtgggcgccgcggcctgggccatcgaaactctgcacgggcacgccgtgggcagcttctgctcgcgcatctgccgcgactcctttgcgagcactgtacgcacgcacgtggcgctgcgcgaggagcccaaggtcacgctgttgccgctggtctttttccagcatcccgagaaggtgctcgagctcatccgctcgctgcgctcgcgcgagggcatctacggaacctgcttcttcgacgagcgcgcgggggcggtcacgctcacgctgcgcagcctgcatgagcaggacgagaccgccggcggcgtattcaatgatgcgcgcgactctaaatag

SEQ ID NO: 14142 - DNA, 24 bp, unidentified
  misc_feature 1..24: note = Synthetic
  source 1..24: mol_type = other DNA
atgcgtttcttcgttgccggctaa

SEQ ID NO: 14143 - DNA, 24 bp, unidentified
  source 1..24: mol_type = other DNA
  misc_feature 1..24: note = Synthetic
atgcgtttcttcgttgccggctaa

SEQ ID NO: 14144 - DNA, 90 bp, unidentified; identical to SEQ ID NO: 6533
  source 1..90: mol_type = other DNA
  misc_feature 1..90: note = Synthetic

SEQ ID NO: 14145 - DNA, 27 bp, unidentified
  source 1..27: mol_type = other DNA
  misc_feature 1..27: note = Synthetic
ataacactctccaggagagaaatttag

SEQ ID NO: 14146 - DNA, 48 bp, unidentified; identical to SEQ ID NO: 6536
  misc_feature 1..48: note = Synthetic
  source 1..48: mol_type = other DNA

SEQ ID NO: 14147 - DNA, 303 bp, unidentified
  misc_feature 1..303: note = Synthetic
  source 1..303: mol_type = other DNA
ctgggcttgaagtccgaacacagcgtggggagcacggtggagacgagctggaacatgtattccgcgccctccacatggtgcaaggccatgtgcacgtttggggccgtcatttatttagtattaaatgacggccgtaccggtaaccgatattcctggagactacgggccgacgtccttttcggaggacaactacccgctgaacaagcactacgagctcaccaaaggccagctctcgatcctgcgcacggtcaacgacaagctgctcgcgcgcaccgtgcagcactcggacggagagagcgatga

SEQ ID NO: 14148 - DNA, 1095 bp, unidentified
  source 1..1095: mol_type = other DNA
  misc_feature 1..1095: note = Synthetic
atgaaggtccaggggtccgtcgatcgccgccgtctgcaacgccgaatcgcggggctgctgccccctccggcccggcgtctaaatatttcccgggggtccgaattcacgcgggacgttcgtgggctggttgaggaacacgcgcaggcctcctcgctgagtgcggcggccgtctggcgcgcagggctgctggccccgggggaggtggcggtcgccgggggtggcagtggaggggggagcttcagctggtctgggtggcggccgccagtctttggggactttctgatacacgccagctccttcaacaacgccgaggcaactggaacgccccttttccaattcaagcagagtgacccgttctcgggcgtcgacgcggtattcactcctctctccctgtttatcctaatgaatcacggccggggtgtagccgcccgggtcgaggcaggtgggggcctgacgcggatggccaacctgctgtacgacagccccgcaaccctggctgacctggtcccggactttgggcggctggtggccgaccgccgcttccacaacttcatcacccctgtgggccccctggtggagaatataaagagcacctatctgaataaaatcaccacggtggtccacgggcctgtggtcagcaaggccatccctcgcagcaccgtcaaggtgacggtgccccaggaggcctttgtggatctggacgcgtggctctccggcggcgccgggggtggcggtggaggatgcttcgtcggggggctgggcctgcagccgtgccccgccgatgcgcgcctctatgtcgctctgacctatgaggaagccgggccgcggtttacgtttttccagtcgtcccgcggccactgtcagatcatgaatatcttaagaatttattactcaccatccatcatgcaccgctacgctgtggtccagcccctacatatagaggagctgaccttcggggcggttgcctgtctggggacatttagtgctactgacggttggaggaggtctgccttcaattaccgtggctctagcctccccgtggtggagattgacagcttttattccaacgtctctgactgggaggtgattctctag

SEQ ID NO: 14149 - DNA, 1095 bp, unidentified
  source 1..1095: mol_type = other DNA
  misc_feature 1..1095: note = Synthetic
atgaaggtccaggggtccgtcgatcgccgccgtctgcaacgccgaatcgcggggctgctgccccctccggcccggcgtctaaatatttcccgggggtccgaattcacgcgggacgttcgtgggctggttgaggaacacgcgcaggcctcctcgctgagtgcggcggccgtctggcgcgcagggctgctggccccgggggaggtggcggtcgccgggggtggcagtggaggggggagcttcagctggtctgggtggcggccgccagtctttggggactttctgatacacgccagctccttcaacaacgccgaggccactggaacgccccttttccaattcaagcagagtgacccgttctcgggcgtcgacgcggtattcactcctctctccctgtttatcctaatgaatcacggccggggtgtagccgcccgggtcgaggcaggtgggggcctgacgcggatggccaacctgctgtacgacagccccgcaaccctggctgacctggtcccggactttgggcggctggtggccgaccgccgcttccacaacttcatcacccctgtgggccccctggtggagaatataaagagcacctatctgaataaaatcaccacggtggtccacgggcctgtggtcagcaaggccatccctcgcagcaccgtcaaggtgacggtgccccaggaggcctttgtggatctggacgcgtggctctccggcggcgccgggggtggcggtggaggatgcttcgtcggggggctgggcctgcagccgtgccccgccgatgcgcgcctctatgtcgctctgacctatgaggaagccgggccgcggtttacgtttttccagtcgtcccgcggccactgtcagatcatgaatatcttaagaatttattactcaccatccatcatgcaccgctatgctgtggtccagcccctacatatagaggagctaaccttcggggcggttgcctgtctggggacatttagtgctactgacggttggaggaggtctgccttcaattaccgtggctctagcctccccgtggtggagattgacagcttttattccaacgtctctgactgggaggtgattctctag

SEQ ID NO: 14150 - DNA, 99 bp, unidentified; identical to SEQ ID NO: 6541
  misc_feature 1..99: note = Synthetic
  source 1..99: mol_type = other DNA

SEQ ID NO: 14151 - DNA, 519 bp, unidentified
  misc_feature 1..519: note = Synthetic
  source 1..519: mol_type = other DNA
atggctttccgtgcttcgggacccgcctaccagcccctcgcccccgcggcctccccggcgcgggctcgtgttccggccgtggcctggatcggcgtcggagcgatcgtcggggcctttgcgctcgtcgccgcgttggttctcgtaccccctcggtcctcgtggggactctcgccgtgcgacagcggctggcaggaattcaacgcgggatgcgtcgcgtgggaccccacccccgtcgagcacgagcaggcggtcggcggctgcagcgcgccggccacccttatcccccgtgcggccgccaagcacctggccgctctgacacgcgtccaggcggagagatcgtcgggttactggtgggtgaacggagacggcatccggacctgtctgagactcgtcgacagcgtcagtggcatcgacgagttttgcgaggagctcgcgatccgcatatgctactacccacgaagccccggcgggtttgtccgcttcgtaacttcgatacgtaacgccctggggttgccgtga

SEQ ID NO: 14152 - DNA, 222 bp, unidentified
  misc_feature 1..222: note = Synthetic
  source 1..222: mol_type = other DNA
agggcgccgaacttaatggaatcctacaggcgtttgccccgctgcgcacgagccttctggactcgcttctggttatgggcgaccggggcatccttatccataacacgatctttggggagcaggtgttcctgcccctggaacactcgcaattcagtcggtatcgctggcgcggacccacggcggcgttcctgtctctcgtggaccagaagcgctccctcctga

SEQ ID NO: 14153 - DNA, 33 bp, unidentified; identical to SEQ ID NO: 6546
  misc_feature 1..33: note = Synthetic
  source 1..33: mol_type = other DNA

SEQ ID NO: 14154 - DNA, 126 bp, unidentified
  misc_feature 1..126: note = Synthetic
  source 1..126: mol_type = other DNA
atcatgtgtaccaaaacagactgtgataaatatagattaaaggtttccattcttcacccaattagtttcttggaaaaatttattatgagagacattttctcagactggataaatggcggaaactaa

SEQ ID NO: 14155 - DNA, 126 bp, unidentified; identical to SEQ ID NO: 14154
  source 1..126: mol_type = other DNA
  misc_feature 1..126: note = Synthetic

SEQ ID NO: 14156 - DNA, 126 bp, unidentified
  misc_feature 1..126: note = Synthetic
  source 1..126: mol_type = other DNA
atcatgtgtaccaaaacagactgtgataaatatagattaaaggtttccattcttcacccaattagtttcttggaaaaatttattatgagggacattttctcagactggataaatggcagaaactaa

SEQ ID NO: 14157 - DNA, 180 bp, unidentified
  misc_feature 1..180: note = Synthetic
  source 1..180: mol_type = other DNA
atgtcacaattaatcctggaccatttgcgcaaacaggttatgctccagttaactggggacctggagaaattaatgattctacgacagttgaaccattgctggatgggccttatcaaccaacgacattcaatccaccagtcgattattggatgttactggctccaacgacacctggcgtaa

SEQ ID NO: 14158 - DNA, 15 bp, unidentified
  misc_feature 1..15: note = Synthetic
  source 1..15: mol_type = other DNA
atgggttatcgttaa

SEQ ID NO: 14159 - DNA, 2655 bp, unidentified
  misc_feature 1..2655: note = Synthetic
  source 1..2655: mol_type = other DNA
atgataagcagaaacaggcgcagaaataatcaacaaaaaaacatagaaaaagagaaacaattagagactataattaacaaagaagttaaggaaaacaaagattctatgaaagaagataagctagtagttacagaagaaagcaatggagacgtcacaactgctaaagaacaatcgaataatattaatttacaaaagaatgatttggttaaagaagtcatgaatatacagaatcaaacattaaatacagtagttactgagaataaagttgaaatagaagaaatagttaaaaaatacattccatcatataatactgatagcctcattgttaaaaagttaactgaaatccaggaatcaagtgctaaaacatataatacattgtttagattatttactccagttaaaagttatttatatgatataaatggtgagaaaaaattatcgactagatggtattggaaattgctcaaagatgatttacctgctggtgattactcagttagacaattcttcctgtcactatatttaaatgttttagaggaaatgcccgattacataatgcttcgtgatatggcagtggataacccatattcagcagaagcaggtaaaatcgtagatggaaagtctaaagaaattttgattgaactatatcaagaccagatgacagaaggatatattagaagatatatgtctgaattaagacataaaatatctggagagacaaatactgcaaaatacccagctattctacatcccgtggataatgaacttaatcaatactttcttgagcatcagttaattcaaccattaactacaaggaacattgcagaattgattccaactcaattatatcatgatccaaattacgtttttaatattgatgcagcctttttaacaaattcaagatttgttccaccatacttaacacaggataggattggattacatgatggatttgaatcaatatgggattcaaaaactcatgctgattacgtttcagctagaagatttatacctgatttaactgaactggtggatgctgaaaagcaaataaaagaaatggctgcacatttacaactagaggctattacggtacaggttgaatcacaatttttagcaggaattagtgctgctgcagctaatgaagcgtttaaatttataattggctcagttttatctaccagaacaatagctgtagaattcataacctcaaactatatgtcactagcatcatgtatgtatttaatgactattatgccatcagagattttcttaagagaatcattagttgctatgcaattagcaataataaatacccttatttatccagctctaggtttagcgcaaatgcattatcaagcaggtgaagtgaggactccattcgaattagctgaaatgcaagtagctaatagatctattagacaatggttacatcattgtaatacacttcaatttggtagacagataacggaagggataattcatctacgatttactaatgatatcatgacaggcaggatagtgaacttattttcaacaatgttagtggctctatcatctcagcctttcgctacatatcctttagactataaaagatctgtacaaagagcgttacaacttttatcaaatagaacagctcaaatagcagatttaaccagattaatagtatacaattatactacattatctgcttgtatagttatgaatatgcatttagtaggaactcttactgttgaacgtatacaagccacttctctaacttctttaatgatgttaatctctaataagacagttattccggaaccatcgtctcttttttcatatttctctagtaacattaattttcttacaaattataatgagcaaattgataatgtggtagcagaaataatggccgcatatagattgaatttatatcaacagaaaatgttgatgctcgttaccagatttgtgtcaaagttatacatatttgatgctcctaagataccaccagatcagatgtatagattaagaaaccgattaagaaatattccagttgaaagaagaagagctgacgtattcagaattattatgaataatagagatttaatcgaaaaaacatcagaacgtatatgccagggtgtgctgttatcttatacaccaatgcctttaacttacgttgaagatgtcgggttaacaaatgtaattaatgacactaatagctttcaaataattaatattgaagaaattgagaagaccggtgactattcagctataacgaatgcattacttcgggatactccaatcatattgaaaggtgcgattccatatgttactaactcatcagtaattgatgttttatctaaagtggacaccacagtgttcgcaagcattgtaaaagatagggacatttcaaagttaaaaccaataaaattcataattaattcagattcatccgaatattatttagtacataataataaatggacaccaacaacaactacagcagtatataaagctagatctcagcaatttgatatacaacattcagtatcaatgctagagtcaaacttattttttgtggtatataatgatttatttaaatacattaaaaccactacagttctgccgataaatgctgtctcttatgacggtgcaagaattatgcaagaaacataa

SEQ ID NO: 14160 - DNA, 78 bp, unidentified
  misc_feature 1..78: note = Synthetic
  source 1..78: mol_type = other DNA
atggagacgtcacaactgctaaagaacaatcgaataatattaatttacaaaagaatgatttggttaaagaagtcatga

SEQ ID NO: 14161 - DNA, 24 bp, unidentified
  source 1..24: mol_type = other DNA
  misc_feature 1..24: note = Synthetic
ttgatgccatttgcgacaatgtaa

SEQ ID NO: 14162 - DNA, 945 bp, unidentified
  misc_feature 1..945: note = Synthetic
  source 1..945: mol_type = other DNA
ctgatatcgattattctactaaattacatacttaaatcattaactagaataatggactttataatttatagatttctttttataattgtgatattgtcaccatttctcagagcacaaaattatggtattaatcttccaatcacaggctccatggacactgcatacgctaattcaacgcaagaagaaacattcctcacttctacactttgcctatattatccgactgaggctgcgactgaaataaacgataattcatggaaagacacactgtcacaactatttcttacgaaagggtggccaactggatccgtatattttaaagaatatactaacattgcatcgttttctgttgatccgcagttgtattgtgattataacgtagtactaatgaaatatgacgcgacgttgcaattggatatgtcagaacttgcggatctaatattaaacgaatggttgtgtaatccaatggatattactctgtattattatcagcaaactgacgaagcgaataaatggatatcaatgggctcatcatgtacaattaaagtatgtccacttaatacacaaactcttggaattggatgcttgacaactgatgctacaacttttgaagaagttgcgacagctgaaaagttggtaattactgacgtggttgatggcgttaatcataagctggatgtcacaacagcaacgtgtactattagaaactgtaagaaattgggaccaagagaaaacgtagccgttatacaagttggtggttctgacatcctcgatataactgctgatccaactactgcaccacagacagaacggatgatgcgaattaactggaaaaaatggtggcaagttttttatactgtagtagactatgtagatcagataatacaagttatgtccaaaagatcaagatcactaaattcagcagcattttattacagagtgtag

SEQ ID NO: 14163 - DNA, 36 bp, unidentified; identical to SEQ ID NO: 6561
  misc_feature 1..36: note = Synthetic
  source 1..36: mol_type = other DNA

SEQ ID NO: 14164 - DNA, 597 bp, unidentified
  misc_feature 1..597: note = Synthetic
  source 1..597: mol_type = other DNA
atgtctctcagtattgacgtgacgagtcttccttctattccttcaactatatataagaatgaatcgtcttcaacaacgtcaactctttctggaaaatctattggtaggagtgaacagtacatttcaccagatgcagaagcattcaataaatacatgctgtcgaagtctccagaggatattggaccatctgattctgcttcaaacgatccactcaccagtttttcgattagatcgaatgcagttaagacaaatgcagacgctggcgtgtctatggattcatcagcacaatcacgaccttcaagtaatgtcggatgcgatcaagtggatttctccttaaataaaggcttaaaagtaaaagctaatttggactcatcaatatcaatatctacggatactaaaaaggagaaatcaaaacaaaaccataaaagtaggaagcactacccaagaattgaagcagagtctgattcagatgattatgtactggatgattcagatagtgatgatggtaaatgtaagaactgtaaatataagaagaaatacttcgcattaagaatgagaatgaaacaagtcgcaatgcaattgattgaagatttgtaa

SEQ ID NO: 14165 - DNA, 537 bp, unidentified
  source 1..537: mol_type = other DNA
  misc_feature 1..537: note = Synthetic
atgtctctcagtattgacgtgacgagtcttccttctattccttcaactatatataagaatgaatcgtcttcaacaacgtcaactctttctggaaaatctattggtaggagtgaacagtacatttcaccagatgcagaagcattcaataaatacatgctgtcgaagtctccagaggatattggaccatctgattctgcttcaaacgatccactcaccagtttttcgattagatcgaatgcagttaagacaaatgcagacgctggcgtgtctatggattcatcagcacaatcacgaccttcaagtaatgtcggatgcgatcaagtggatttctccttaaataaaggcttaaaagtaaaagctaatttggactcatcaatatcaatatctacggatactaaaaaggagaaatcaaaacaaaaccataaaagtaggaagcactacccaagaattgaagcagagtctgattcagatgattatgtactggatgattcagatagtgatgatggtaaatgtaagaactgtaaatataagaagaaa

SEQ ID NO: 14166 - DNA, 15 bp, unidentified
  misc_feature 1..15: note = Synthetic
  source 1..15: mol_type = other DNA
atggtatccaattaa

SEQ ID NO: 14167 - DNA, 45 bp, unidentified
  misc_feature 1..45: note = Synthetic
  source 1..45: mol_type = other DNA
ataaagattgcattgatgattctggtgtgtataatgcatgtatag

SEQ ID NO: 14168 - DNA, 126 bp, unidentified
  misc_feature 1..126: note = Synthetic
  source 1..126: mol_type = other DNA
atcaacaaactaataaagtggtatcagactatgtggatgcaggaaactacacctatgctcaattgccacctacaacgtggggatctgggtcaatacttaaatcggcattctctacacctgaaataa

SEQ ID NO: 14169 - DNA, 360 bp, unidentified
  misc_feature 1..360: note = Synthetic
  source 1..360: mol_type = other DNA
ctgggcagggtgtacctcttaatgccaattctacccctgcgcaaaatgctgggtattggcggagacaggacagaaaaattaataccgggaatggaattaagcaactggctcccaggtggtacttctactacactggaactggacccgaagcagcactcccattccgggctgttaaggatggcatcgtttgggtccatgaagatggcgccactgatgctccttcaacttttgggacgcggaaccctaacaatgattcagctattgttacacaattcgcgcccggtactaagcttcctaaaaacttccacattgaggggactggaggcaatagtcaatcatcttcaagagcctctagcttaa

SEQ ID NO: 14170 - DNA, 876 bp, unidentified
  misc_feature 1..876: note = Synthetic
  source 1..876: mol_type = other DNA
aggaactaccgggaggagaggcgcggaatgccgcagaaagcgcggtggcaggacacggtccggatgcggagccccgagaagaaaccgagcccgagtccgaggagtccagcgccgagaagtaagggcacgtccgcgcggcccgagcaggacgtgcacgtggtttgctcgatcgatgtaggtacccgcaaccccgcgcgtacgctgctcgagattcgtggcgagcatctgcgcgtgctgtcagtggacaagctagactggagcacggactgggagcaccgcgtggcgcgcgacgtgtgctctgtgcgcgcagacgtggtgctcgtggaaaagcagggcccgcgctcgccgcacgcgaagttcctgcatttcatgcgcgggctacttttcgggcaaacgccagtgctttgtcgcaaccccgcgctgcgcggcggcagctaccgcgcgcgcaagcgccgctcggtacaacttttcctgcgtcgcctgagcttctttggcattgacactcgcgaactacgagcgcacagcaagcttgacgacgtggcggacagcttccacatggcactcgagtacgcgctggcgcgcgcggcgcaagcagagcgcgcgcgtgagagtgcgacggcgcgcgcccggcaagcgggcgcgaacgtcgcggcaggatttcgagcctgtccggagcctctcgcgcgcgcggacactcctccacaccgacgaaggcgcgcgcgtgtcacacaggcaagtgagttgctcgtcgcagtaaggcacgacaggtcgtgtgtgcggcaagccgagaataaggagcgagcgtggcacacgcccaagctcgacgcgccgcggagaacagagaccttcgagcgcgcagggggaagagagcactga

SEQ ID NO: 14171 - DNA, 1197 bp, unidentified
  source 1..1197: mol_type = other DNA
  misc_feature 1..1197: note = Synthetic
ttggaaacaatcttgtatagagtcatttttcctaatcatccgaaggcttcaacgaaaatgcaaagtctaccctccagaagatctgaaacaaacaagaaaataatttctgaaaaaatctctgaaacaattacacttaacaaattgcctatgtccagatacttgcactttttcctgtttactgtaacggatgtggatgatatctggaactttagcgaaacaaaagagagctctcttacatggcctaaaatcgatgcaaagcaattaaatgaatatgtgaacactgaattgacggtttatcaacgaccattttctttacttggaattcctcaaaacggtttattcaaatcctgtgaaaaaatttacgatgagttctttgcagaacatatggacaatgaaaagaaatatctcacctttccaagaaacagatctagcagatttggttttgaaaatgttcctcgagtaaacgaacttccaattttaataaatcattttgagaaaagtcggatggatgtaattctaaatacaaataaaattgtactcgtaaatagagaacttatatgggtgccttgtgaacaagtacgcatttttaatttaaacgtgtcattaaacattcccgacggactttttgggattttgactggaacagttaacgacactctctgcgaatgtgtaacagaactcatcacaacagaaaacgttatctccatttctttaataaacctgtcaagtgaatcagtaatgttgttacctggtgatatagaattagtgattaacatccttccatgctatataccggaaccctgggaaacttataattttccttctccaaattttatcaagttttcactaattaccaataaagatttctatgtagaatccaataattacacaatccaaaattttgattacatgtttgattgtcctgatgaattgaaagctttaataatagcaaacaaagaaattctctgtcatggattagtggttgaaactaatatctggttaaagaacacaactccaagtgtaaagatttttaatcccacttctcagaggatctttgtgcaagcaggaatttgtattgcaaccatcattttcacatgcggtcattttattttaaagctattacctaatcgagtgttgaatcagcttgcagtgttagataaaacatcgatgctttggtttcagtacagcacggaataa

SEQ ID NO: 14172 - DNA, 528 bp, unidentified
  source 1..528: mol_type = other DNA
  misc_feature 1..528: note = Synthetic
atggaaaagcttaccgacctcaattatacattgagtgtaatcactctaatgaacaatacattgcacacaatacttgaggatccaggaatggcgtattttccttatatagcatctgtcttaacagttttgtttgcgctacataaagcatccattccaacaatgaaaattgcattgaaaacgtcaaaatgttcatataaagtggtgaaatattgtattgtaacaatttttaatacgttgttaaaattggcaggttataaagagcagataactactaaagatgagatagaaaagcaaatggacagagtagtcaaagaaatgagacgccagctagaaatgattgacaaattgactacacgtgaaattgaacaagtagagttgcttaaacgcatttacgataaattgacggtgcaaacgacaggcgaaatagatatgacaaaagagatcaatcaaaaaaacgtgagaacgctagaagaatgggaaagtggaaaaaatccttatgaaccaagagaagtgactgcagcaatgtaa

SEQ ID NO: 14173 - DNA, 1128 bp, unidentified
  source 1..1128: mol_type = other DNA
  misc_feature 1..1128: note = Synthetic
ttgtattctaacgtgagtgatctaattcaacaatttaatcaaatgataattactatgaatggaaatgaatttcaaactggaggaatcggtaatttgccaattagaaactggaattttaatttcgggttacttggaacaactttgctgaacttagacgctaattatgttgaaacggcaagaaatacaattgattatttcgtggattttgtagacaatgtatgcatggatgagatggttagagaatcacaaaggaacggaattgcacctcaatcagactcgctaagaaagctgtcagccattaaattcaaaagaataaattttgataattcgtcggaatacatagaaaactggaatttgcaaaatagaagacagaggacaggtttcacttttcataaaccaaacatttttccttattcagcatcatttacactaaatagatcacaacccgctcatgataatttgatgggcacaatgtggttaaacgcaggatcggaaattcaagtcgctggatttgactactcatgtgctattaacgcaccagccaatatacaacaatttgagcatattgtgccactccgaagagtgttaactacagctacgataactcttctaccagacgcggaaaggtttagttttccaagagtgatcaattcagctgacggggcaactacatggtttttcaacccagtgattctcaggccgaataacgttgaagtggagtttctattgaatggacagataataaacacttatcaagcaagatttggaactatcgtagctagaaattttgatactattagactatcattccagttaatgagaccaccaaacatgacaccagcagtagcagtactattcccgaatgcacagccattcgaacatcatgcaacagtgggattgacacttagaattgagtctgcagtttgtgagtctgtactcgccgatgcaagtgaaactctattagcaaatgtaacatccgttaggcaagagtacgcaataccagttggaccagtctttccaccaggtatgaactggactgatttaatcaccaattattcaccgtctagggaggacaatttgcaacgcgtatttacagtggcttccattagaagcatgctcattaaatga

SEQ ID NO: 14174 - DNA, 177 bp, unidentified
  source 1..177: mol_type = other DNA
  misc_feature 1..177: note = Synthetic
atgggcacgactgcagagcaaatgtacataattacagccacaaacaacagcttgacccaggaggacatgagaaaacggtcgctctttgaagcgcgcatgtttctcggtctttttaactttcgccaggcggcgctgcggcgggagagccaatctgatgccactgcctatcgcggttga

SEQ ID NO: 14175 - DNA, 177 bp, unidentified; identical to SEQ ID NO: 14174
  source 1..177: mol_type = other DNA
  misc_feature 1..177: note = Synthetic

SEQ ID NO: 14176 - DNA, 132 bp, unidentified; identical to SEQ ID NO: 6582
  misc_feature 1..132: note = Synthetic
  source 1..132: mol_type = other DNA

SEQ ID NO: 14177 - DNA, 132 bp, unidentified; identical to SEQ ID NO: 6582
  misc_feature 1..132: note = Synthetic
  source 1..132: mol_type = other DNA

SEQ ID NO: 14178 - DNA, 21 bp, unidentified
  misc_feature 1..21: note = Synthetic
  source 1..21: mol_type = other DNA
atgaatattaaacaattatag

SEQ ID NO: 14179 - DNA, 1389 bp, unidentified
  source 1..1389: mol_type = other DNA
  misc_feature 1..1389: note = Synthetic
atggccaaccgtcagaaccaagcaggcagctccattaccccctacttgcgggagatgagccccgagcgcgagcaggaggcgcctcagctccctcccaagaagaaggctcgcaaggcgacacccgcgccgccgccatccccggagattgtctccgacagcgagggcgaaggcaccgtggtggaggtgggcttcagctaccctccggtgcgcagagtacgtcgcgcggacggctccgtggagtttcaaagaatgaccatgaaggacgtcggggccggcgagggcccctctaccgccgtgttggtgaagaaccccgacagcaaaccactggtgacagcgtgggagaagggtatggaaaccatgatgatgttaatggagaagttccacgtagacaacgacagcagagcggcttttaagtttctgcccgaccagggagcggtgtaccgcaagatctgtcaaacttggttgaacgaggagcaccgcggcctgccgctaaccttcaccaaccagaagaccttcaccgagctgatgggcagattccttatggcttacatggaagcctacgcgggggtaaaacacaagagctgggagcccaccggatgcgccgtatgggagcatcgcagtacccagcaggagggcgtcctgttttgcttccacggagtggagatggtctgcaaggagcacgtgttggaaatggatgtaaccagcgagaacggacagcgggcgctgaaggagcaccccactagagccaaggtggtccagaaccgttggggccgcaacgtggttcagctgaagaacgaagacgcccgctgctgcgcggaggacgtcaactgcggtcataacgtattctctagcaagtcctgcgggctattctacaccgagggcggcaaagcccagatggccttccgtcaaatggaggagttcctggcggcgagttaccctatcatgcaacgcgggcagcgacgcatcctgatccctctgcgctgcgactgcctcaacaagcgcgacctagtaccccagattgggcggcagatgtgcaagctgaccccgtttgccctgagcaacgccgaggatctggatgcgtcggaggtgaccgacccgacggccctggccagtatccacaaccccggcgtgctggtgttccagtgtgccaaccccgtgttccgcaacagccgcgggagctccggccctaactgcgacttcaagatatcggcgcccgacgtcatgggagccctgcagctggtgcggcagttttggaagcagaacctagaagacgtgcccctgccgcggctggtgatccccgagtttcgttggagcgcccgtttccagtatcgcaacgtgtccctccccagcgggcacgaggacccctccctcgaacccttcgatttttaa

SEQ ID NO: 14180 - DNA, 39 bp, unidentified; identical to SEQ ID NO: 6588
  source 1..39: mol_type = other DNA
  misc_feature 1..39: note = Synthetic

SEQ ID NO: 14181 - DNA, 93 bp, unidentified; identical to SEQ ID NO: 6589
  source 1..93: mol_type = other DNA
  misc_feature 1..93: note = Synthetic

SEQ ID NO: 14182 - DNA, 777 bp, unidentified
  misc_feature 1..777: note = Synthetic
  source 1..777: mol_type = other DNA
aagaaacttctgagtatggcagaactgtcaacacgttacaacttaccaacaaatattacagagaagagcataaatcttgatctcaattctactgcacggtgggtaaaagagcccagtgttgggggctggacagtgaaatgggggaattttatctttcacatcccaaataccggaatgacattgttgcatcatttaaaatctaattttgttgttccagaatggcaacaaacaaggagtctcttctcccatctctttaaaaacccaaaatcaaccatcatggagcctttcttggctttgaggatcttacttggcgttgctttgaaggatcaagaattgcagcaatcattgattcctggatttagatccattgtgcatatgctttcagaatggctgcttttagaagttacgtcagctatccatatcagtcctaacctgttggggatctatttgacctcagacatgtttaaaatcctaatggcaggtgtgaaaaactttttcaataagctgtttaccctccatgttgtaaatgatcatggaaaacctagcagtattgaaataaaattaaccggacaacagatcataatcactcgagttaacatggggttcttagtagaagttaggaggattgacattgaaccttgctgcggcgagactgtcctctcagaatcagttgtgtttgggctagtagctgaagcagtcctaagggaacacagccagattgagagaggtcaacctcttaatttgacacaatacatgaacagcaaaattgctatttag

SEQ ID NO: 14183 - DNA, 138 bp, unidentified
  source 1..138: mol_type = other DNA
  misc_feature 1..138: note = Synthetic
attcccagccactccagcaacaccgcactggagaggcctctggctgttcagctcgcgaggaaaaggacatcgtcggaggccaggcagaagcagaagcaccccaagaaagtgaagcaggcctttaaccccctcatttaa

SEQ ID NO: 14184 - DNA, 138 bp, unidentified; identical to SEQ ID NO: 14183
  misc_feature 1..138: note = Synthetic
  source 1..138: mol_type = other DNA

SEQ ID NO: 14185 - DNA, 138 bp, unidentified; identical to SEQ ID NO: 14183
  source 1..138: mol_type = other DNA
  misc_feature 1..138: note = Synthetic

SEQ ID NO: 14186 - DNA, 1806 bp, unidentified
  source 1..1806: mol_type = other DNA
  misc_feature 1..1806: note = Synthetic
atgtcaaattcctcatgttcttgtccctccgcacccactatcttcatattgttgcagatgaaacgcgccagaccgtctgaagacaccttcaaccccgtgtatccatatgacacagaaaccgggcctccaactgtgccctttcttacccctccatttgtttcacccaatggtttccaagaaagtccccctggagttctctctctacgcgtctccgaacctttggacacctcccacggcatgcttgcgcttaaaatgggcagcggtcttaccctagacaaggccggaaacctcacctcccaaaatgtaaccactgttactcagccacttaaaaaaacaaagtcaaacataagtttggacacctccgcaccacttacaattacctcaggcgccctaacagtggcaaccaccgctcctctgatagttactagcggcgctcttagcgtacagtcacaagccccactgaccgtgcaagactccaaactaagcattgctactaaagggcccattacagtgtcagatggaaagctagccctgcaaacatcagcccccctctctggcagtgacagcgacacccttactgtaactgcatcacccccgctaactactgccacgggtagcttgggcattaacatggaagatcctatttatgtaaataatggaaaaataggaattaaaataagcggtcctttgcaagtagcacaaaactccgatacactaacagtagttactggaccaggtgtcaccgttgaacaaaactcccttagaaccaaagttgcaggagctattggttatgattcatcaaacaacatggaaattaaaacgggcggtggcatgcgtataaataacaacttgttaattctagatgtggattacccatttgatgctcaaacaaaactacgtcttaaactggggcagggacccctgtatattaatgcatctcataacttggacataaactataacagaggcctatacctttttaatgcatcaaacaatactaaaaaactggaagttagcataaaaaaatccagtggactaaactttgataatactgccatagctataaatgcaggaaagggtctggagtttgatacaaacacatctgagtctccagatatcaacccaataaaaactaaaattggctctggcattgattacaatgaaaacggtgccatgattactaaacttggagcgggtttaagctttgacaactcaggggccattacaataggaaacaaaaatgatgacaaacttaccctgtggacaaccccagacccatctcctaactgcagaattcattcagataatgactgcaaatttactttggttcttacaaaatgtgggagtcaagtactagctactgtagctgctttggctgtatctggagatctttcatccatgacaggcaccgttgcaagtgttagtatattccttagatttgaccaaaacggtgttctaatggagaactcctcacttaaaaaacattactggaactttagaaatgggaactcaactaatgcaaatccatacacaaatgcagttggatttatgcctaaccttctagcctatccaaaaacccaaagtcaaactgctaaaaataacattgtcagtcaagtttacttgcatggtgataaaactaaacctatgatacttaccattacacttaatggcactagtgaatccacagaaactagcgaggtaagcacttactctatgtcttttacatggtcctgggaaagtggaaaatacaccactgaaacttttgctaccaactcttacaccttctcctacattgcccaggaataa

SEQ ID NO: 14187 - DNA, 66 bp, unidentified; identical to SEQ ID NO: 6599
  misc_feature 1..66: note = Synthetic
  source 1..66: mol_type = other DNA

SEQ ID NO: 14188 - DNA, 198 bp, unidentified
  source 1..198: mol_type = other DNA
  misc_feature 1..198: note = Synthetic
ctgaagacaccttcaaccccgtgtatccatatgacacagaaaccgggcctccaactgtgccctttcttacccctccatttgtttcacccaatggtttccaagaaagtccccctggagttctctctctacgcgtctccgaacctttggacacctcccacggcatgcttgcgcttaaaatgggcagcggtcttaccctag

SEQ ID NO: 14189 - DNA, 126 bp, unidentified; identical to SEQ ID NO: 6604
  source 1..126: mol_type = other DNA
  misc_feature 1..126: note = Synthetic

SEQ ID NO: 14190 - DNA, 186 bp, unidentified
  misc_feature 1..186: note = Synthetic
  source 1..186: mol_type = other DNA
atgtggtggggtccaacgttgatggtcgtcctgtcgcccctgccaactcgacaacccttacctacgccactattggatcgtcggtggataccgctgcagctgctgccgcgtctgctgctgcctctactgctcgtggcatggcagcagattttggactgtacaatcaactggccgcgtctcggttaa

SEQ ID NO: 14191 - DNA, 699 bp, unidentified
  source 1..699: mol_type = other DNA
  misc_feature 1..699: note = Synthetic
ttgctgcctcgccggctccccgcaccgaccatgacaatgcgggatgatgttcctttgttggatcgcgagctggtagacgaggccgcgtgtggcggggaggacggagaactgccgctcgatgaacagttttcgctgtcctcgtacggcacgtctgatttttttgtcagttcggcctactcgcgtcttccgccccacacccagccggtcttttccaagcgggtggtgatgtttgcttggtcgttcctggtcctcaagccgctggagctggtggccgcgggcatgtattacgggtggaccggacgggcggtggcgccggcatgtattatagccgccgtcctcgcctactatgtcacgtggctggcacgggcgctcctcctgtacgtgaacatcaaacgggatcgcctgccgttgtcgccacccgtgttttgggggttgtgcgtgatcatgggcggcgcggccctgtgcgccctggtggcggccgcccatgagacgttcagtcccgacgggcttttccattggatcaccgccagccagctgctgccccgcacggatcccctccgcgcccgttctctgggaatcgcctgcgcggccggcgccgccatgtgggtggcggcggcggactgctttgccgcctttaccaacttttttctagcacgcttttggaccagggccatcttgaaggcacccgtcgcgttctaa

SEQ ID NO: 14192 - DNA, 234 bp, unidentified; identical to SEQ ID NO: 14058
  source 1..234: mol_type = other DNA
  misc_feature 1..234: note = Synthetic

SEQ ID NO: 14193 - DNA, 45 bp, unidentified; identical to SEQ ID NO: 6611
  source 1..45: mol_type = other DNA
  misc_feature 1..45: note = Synthetic

SEQ ID NO: 14194 - DNA, 8574 bp, unidentified
  misc_feature 1..8574: note = Synthetic
  source 1..8574: mol_type = other DNA
atccttcgggtgagggcgggtggcatttcctttttctataccatcatggcagtccttctgctccttctcgtggttgaggccggggccattctggccccggccacccacgcttgtcgagcgaatgggcaatatttcctcacaaattgttgtgccccggaggacatcgggttctgcctggagggtggatgcctggtggccctggggtgcacgatttgcactgaccaatgctggccactgtatcaggcgggtttggctgtgcggcctggcaagtccgcggcccaactggtgggggagctgggtagcctatacgggcccctgtcggtctcggcctatgtggctgggatcctgggcctgggtgaggtgtactcgggtgtcctaacggtgggagtcgcgttgacgcgccgggtctacccggtgcctaacctgacgtgtgcagtcgcgtgtgagctaaagtgggaaagtgagttttggagatggactgaacagctggcctccaactactggattctggaatacctctggaaggtcccatttgatttctggagaggcgtgataagcctgacccccttgttggtttgcgtggccgcattgctgctgcttgagcaacggattgtcatggtcttcctgttggtgacgatggccgggatgtcgcaaggcgcccctgcctccgttttggggtcacgcccctttgactacgggttgacttggcagacctgctcttgcagggccaacggttcgcgtttttcgactggggagaaggtgtgggaccgtgggaacgttacgcttcagtgtgactgccctaacggcccctgggtgtggttgccagccttttgccaagcaatcggctggggtgaccccatcacttattggagccacgggcaaaatcagtggcccctttcatgcccccagtatgtctatgggtctgctacagtcacttgcgtgtggggttccgcttcttggtttgcctccaccagtggtcgcgactcgaagatagatgtgtggagtttagtgccagttggctctgccacctgcaccatagccgcacttggatcatcggatcgcgacacggtgcctgggctctccgagtggggaatcccgtgcgtgacgtgtgttctggaccgtcggcctgcctcctgcggcacctgtgtgagggactgctggcccgagaccgggtcggttaggttcccattccatcggtgcggcgtggggcctcggctgacaaaggacttggaagctgtgcccttcgtcaacaggacaactcccttcaccattagggggcccctgggcaaccagggccgaggcaacccggtgcggtcgcccttgggttttgggtcctacgccatgaccaggatccgagataccctacatctggtggagtgtcccacaccagccattgagcctcccaccgggacgtttgggttcttccccgggacgccgcctctcaacaactgcatgctcttgggcacggaagtgtccgaggcacttgggggggctggcctcacgggggggttctatgaacccctggtgcgcaggtgttcgaagctgatgggaagccgaaatccggtttgtccggggtttgcatggctctcttcgggcaggcctgatgggtttatacatgtccagggtcacttgcaggaggtggatgcaggcaacttcatcccgcccccgcgctggttgctcttggactttgtatttgtcctgttatacctgatgaagctggctgaggcacggttggtcccgctgatcttgctgctgctatggtggtgggtgaaccagctggcagtcctagggctgccggctgtggaagccgccgtggcaggtgaggtcttcgcgggccctgccctgtcctggtgtctgggactcccggtcgtcagtatgatattgggtttggcaaacctggtgctgtactttagatggttgggaccccaacgcctgatgttcctcgtgttgtggaagcttgctcggggagctttcccgctggccctcttgatggggatttcggcgacccgcgggcgcacctcagtgctcggggccgagttctgcttcgatgctacattcgaggtggacacttcggtgttgggctgggtggtggccagtgtggtagcttgggccattgcgctcctgagctcgatgagcgcaggggggtggaggcacaaagccgtgatctataggacgtggtgtaaggggtaccaggcaatccgtcaaagggtggtgaggagccccctcggggaggggcggcctgccaaacccctgacctttgcctggtgcttggcctcgtacatctggccagatgctgtgatgatggtggtggttgccttggtccttctctttggcctgttcgacgcgttggattgggccttggaggagatcttggtgtcccggccctcgttgcggcgtttggctcgggtggttgagtgctgtgtgatggcgggtgagaaggccacaaccgtccggctggtctccaagatgtgtgcgagaggagcttatttgttcgatcatatgggctctttttcgcgtgctgtcaaggagcgcctgttggaatgggacgcagctcttgaacctctgtcattcactaggacggactgtcgcatcatacgggatgccgcgaggactttgtcctgcgggcagtgcgtcatgggtttacccgtggttgcgcgccgtggtgatgaggttctcatcggcgtcttccaggatgtgaatcatttgcctcccgggtttgttccgaccgcgcctgttgtcatccgacggtgcggaaagggcttcttgggggtcacaaaggctgccttgacaggtcgggatcctgacttacatccagggaacgtcatggtgttggggacggctacgtcgcgaagcatgggaacatgcttgaacggcctgctgttcacgaccttccatggggcttcatcccgaaccatcgccacacccgtgggggcccttaatcccagatggtggtcagccagtgatgatgtcacggtgtatccactcccggatggggctacttcgttaacaccttgtacttgccaggctgagtcctgttgggtcatcagatccgacggggccctatgccatggcttgagcaagggggacaaggtggagctggatgtggccatggaggtctctgacttccgtggctcgtctggctcaccggtcctatgtgacgaagggcacgcagtaggaatgctcgtgtctgtgcttcactccggtggtagggtcaccgcggcacggttcactaggccgtggacccaagtgccaacagatgccaaaaccactactgaaccccctccggtgccggccaaaggagttttcaaagaggccccgttgtttatgcctacgggagcgggaaagagcactcgcgtcccgttggagtacgataacatggggcacaaggtcttaatcttgaacccctcagtggccactgtgcgggccatgggcccgtacatggagcggctggcgggtaaacatccaagtatatactgtgggcatgatacaactgctttcacaaggatcactgactcccccctgacgtattcaacctatgggaggtttttggccaaccctaggcagatgctacggggcgtttcggtggtcatttgtgatgagtgccacagtcatgactcaaccgtgctgttaggcattgggagagtccgggagctggcgcgtgggtgcggggtgcaactagtgctctacgccaccgctacacctcccggatcccctatgacgcagcacccttccataattgagacaaaattggacgtgggcgagattcccttttatgggcatggaatacccctcgagcggatgcgaaccggaaggcacctcgtgttctgccattctaaggctgagtgcgagcgccttgctggccagttctccgctaggggggtcaatgccattgcctattataggggtaaagacagttctatcatcaaggatggggacctggtggtctgtgctacagacgcgctttccactgggtacactggaaatttcgactccgtcaccgactgtggattagtggtggaggaggtcgttgaggtgacccttgatcccaccattaccatctccctgcggacagtgcctgcgtcggctgaactgtcgatgcaaagacgaggacgcacgggtaggggcaggtctggacgctactactacgcgggggtgggcaaagcccctgcgggtgtggtgcgctcaggtcctgtctggtcggcggtggaagctggagtgacctggtacggaatggaacctgacttgacagctaacctactgagactttacgacgactgcccttacaccgcagccgtcgcggctgatatcggagaagccgcggtgttcttctctgggctcgccccattgaggatgcaccctgatgtcagctgggcaaaagttcgcggcgtcaactggcccctcttggtgggtgttcagcggaccatgtgtcgggaaacactgtctcccggcccatcggatgacccccaatgggcaggtctgaagggcccaaatcctgtcccactcctgctgaggtggggcaatgatttaccatctaaagtggccggccaccacatagtggacgacctggtccggagactcggtgtggcggagggttacgtccgctgcgacgctgggccgatcttgatgatcggtctagctatcgcggggggaatgatctacgcgtcatacaccgggtcgctagtggtggtgacagactgggatgtgaaggggggtggcgcccccctttatcggcatggagaccaggccacgcctcagccggtggtgcaggttcctccggtagaccatcggccggggggtgaatcagcaccatcggatgccaagacagtgacagatgcggtggcagccatccaggtggactgcgattggactatcatgactctgtcgatcggagaagtgttgtccttggctcaggctaagacggccgaggcctacacagcaaccgccaagtggctcgctggctgctatacggggacgcgggccgttcccactgtatccattgttgacaagctcttcgccggagggtgggcggctgtggtgggccattgccacagcgtgattgctgcggcggtggcggcctacggggcttcaaggagcccgccgttggcagccgcggcttcctacctgatggggttgggcgttggaggcaacgctcagacgcgcctggcgtctgccctcctattgggggctgctggaaccgccttgggcactcctgtcgtgggcttgaccatggcaggtgcgttcatggggggggccagtgtctccccctccttggtcaccattttattgggggccgtcggaggttgggagggtgttgtcaacgcggcgagcctagtctttgacttcatggcggggaaactttcatcagaagatctgtggtatgccatcccggtactgaccagcccgggggcgggccttgcggggatcgctctcgggttggttttgtattcagctaacaactctggcactaccacttggttgaaccgtctgctgactacgttaccaaggtcttcatgtatcccggacagttactttcagcaagttgactattgcgacaaggtctcagccgtgctccggcgcctgagcctcacccgcacagtggttgccctggtcaacagggagcctaaggtggatgaggtacaggtggggtatgtctgggacctgtgggagtggatcatgcgccaagtgcgcgtggtcatggccagactcagggccctctgccccgtggtgtcactacccttgtggcattgcggggaggggtggtccggggaatggttgcttgacggtcatgttgagagtcgctgcctctgtggctgcgtgatcactggtgacgttctgaatgggcaactcaaagaaccagtttactctaccaagctgtgccggcactattggatggggactgtccctgtgaacatgctgggttacggtgaaacgtcgcctctcctggcctccgacaccccgaaggttgtgcccttcgggacgtctggctgggctgaggtggtggtgaccactacccacgtggtaatcaggaggacctccgcctataagctgctgcgccagcaaatcctatcggctgctgtagctgagccctactacgtcgacggcattccggtctcatgggacgcggacgctcgtgcgcccgccatggtctatggccctgggcaaagtgttaccattgacggggagcgctacaccttgcctcatcaactgaggctcaggaatgtggcaccctctgaggtttcatccgaggtgtccattgacattgggacggagactgaagactcagaactgactgaggccgatctgccgccggcggctgctgctctccaagcgatcgagaatgctgcgaggattcttgaaccgcacattgatgtcatcatggaggactgcagtacaccctctctttgtggtagtagccgagagatgcctgtatggggagaagacatcccccgtactccatcgccagcacttatctcggttactgagagcagctcagatgagaagaccccgtcggtgtcctcctcgcaggaggataccccgtcctctgactcattcgaggtcatccaagagtccgagacagccgaaggggaggaaagtgtcttcaacgtggctctttccgtattaaaagccttatttccacagagcgacgcgaccaggaagcttaccgtcaagatgtcgtgctgcgttgaaaagagcgtcacgcgctttttctcattggggttgacggtggctgatgttgctagcctgtgtgagatggaaatccagaaccatacagcctattgtgaccaggtgcgcactccgcttgaattgcaggttgggtgcttggtgggcaatgaacttacctttgaatgtgacaagtgtgaggctaggcaagaaaccttggcctccttctcttacatttggtctggagtgccgctgactagggccacgccggccaagcctcccgtggtgaggccggttggctctttgttagtggccgacactactaaggtgtatgttaccaatccagacaatgtgggacggagggtggacaaggtgaccttctggcgtgctcctagggttcatgataagtacctcgtggactctattgagcgcgctaagagggccgctcaagcctgcctaagcatgggttacacttatgaggaagcaataaggactgtaaggccacatgctgccatgggctggggatctaaggtgtcggttaaggacttagccacccccgcggggaagatggccgtccatgaccggcttcaggagatacttgaagggactccggtcccctttactcttactgtgaaaaaggaggtgttcttcaaagaccggaaggaggagaaggccccccgcctcattgtgttcccccccctggacttccggatagctgaaaagctcatcttgggagacccaggccgggtagccaaggcggtgttggggggggcctacgccttccagtacaccccaaatcagcgagttaaggagatgctcaagctatgggagtctaagaagaccccttgcgccatctgtgtggacgccacctgcttcgacagtagcataactgaagaggacgtggctttggagacagagctatacgctctggcctctgaccatccagaatgggtgcgggcacttgggaaatactatgcctcaggcaccatggtcaccccggaaggggtgcccgtcggtgagaggtattgcagatcctcgggtgtcctaacaactagcgcgagcaactgcttgacctgctacatcaaggtgaaagctgcctgtgagagagtggggctgaaaaatgtctctcttctcatagccggcgatgactgcttgatcatatgtgagcggccagtgtgcgacccaagcgacgctttgggcagagccctagcgagctatgggtacgcgtgcgagccctcatatcatgcatcattggacacggcccccttctgctccacttggcttgctgagtgcaatgcagatgggaagcgccatttcttcctgaccacggacttccggaggccgctcgctcgcatgtcgagtgagtatagtgacccgatggcttcggcgatcggttacatcctcctttatccttggcaccccatcacacggtgggtcatcatccctcatgtgctaacgtgcgcattcaggggtggaggcacaccgtctgatccggtttggtgccaggtgcatggtaactactacaagtttccactggacaaactgcctaacatcatcgtggccctccacggaccagcagcgttgagggttaccgcagacacaactaaaacaaagatggaggctggtaaggttctgagcgacctcaagctccctggcttagcagtccaccgaaagaaggccggggcgttgcgaacacgcatgctccgctcgcgcggttgggctgagttggctaggggcttgttgtggcatccaggcctacggcttcctccccctgagattgctggtatcccggggggtttccctctctcccccccctatatgggggtggtacatcaattggatttcacaagccagaggagtcgctggcggtggttggggttcttagccctgctcatcgtagccctcttcgggtga

SEQ ID NO: 14195 - DNA, 135 bp, unidentified
  misc_feature 1..135: note = Synthetic
  source 1..135: mol_type = other DNA
ttgggacgtgccagcatttcctcgccgcgaatcgctacctcgaaacccgggacattatgccgatcgactggtcggtataagatgccgacatccggggtcttgatttacgagggggcaattaataaagactgttga

SEQ ID NO: 14196 - DNA, 1440 bp, unidentified
  source 1..1440: mol_type = other DNA
  misc_feature 1..1440: note = Synthetic
atggttccttctcagagactctcccgaactagcagcatttcctccaacgaggatcccgcagagagccacattctggaactcgaagcggtctcagacaccaacacagactgcgatctggaccctatggagggcagcgaagaacactccacagatggagagatttcatcctcagaggaggaggatgaagatccaactccggcccacgccatacctgcacggccctccagcgtggtcataacccctacctcggcatcgtttgtgattcccagaaagaagtgggacctacaggacaagacagtcacattgcatcgctcacccctgtgcagggacgaggacgagaaggaggagactggcaactcctcttacaccagaggccacaaaaggcgacgcggagaggtccatggctgcaccgatgaaagttatggcaagcgccgacacctgcccccgggagcaagagcgcccagagccccaagggcccccagggtgcctagagcaccgaggtctccaagagctccccgaagcaacagagcaaccagaggtccccggtcagaatctcgaggggccggcaggagcacaaggaagcaggcgaggcaagaacgcagccagaggcccctgccgaacaaaccgtggtttgacatgagtctggttaagcctgtctccaagattacatttgtcaccttgcccagccccctggcctctctgaccctagagcccatccaagacccgttcctacagtcgatgctggcggtggccgcccatccagagattggagcctggcagaaagtgcaacccagacacgagctgcgcaggagctacaagacactacgtgagtttttcaccaagtcaaccaacaaggacacatggctggatgcacgcatgcaggcgatccagaacgcggggctctgcaccctggtggccatgctagaagagaccatcttttggctccaggagatcacctaccacggcgacctgcccctagctcccgcggaagacatcctcctggcctgcgccatgagtcttagcaaggtgatcctgaccaagctcaaagagctggcaccctgcttccttcctaacacgcgagactacaactttgtgaagcaactcttctacatcacctgtgccacggcccgtcaaaacaaggtggtggagaccctgagcagctcatatgtgaagcagcccctctgtctcttggcagcatatgcggcagtagccccagcctacattaacgccaactgcagacggagacacgatgaagttgaattcctgggccactacatcaagaattacaaccctggcacgctaagctcccttttgacagaggccgtggagactcacacacgtgactgccgaagtgcatcatgcagccgacttgtcagggccattctctctccgggcactgggtcactaggactgttttttgttcctggattaaatcaataa

SEQ ID NO: 14197 - DNA, 261 bp, unidentified
  source 1..261: mol_type = other DNA
  misc_feature 1..261: note = Synthetic
ctgtccgctgtgtggaccatgacgcttgacctgggactagattgcaccggcaaagcccaggcgattcccatgcgacaggagcaccagctggcgtttcagaagcagtgctatttatataaagccaaccaaaaggcagagtcgttagcgaactgctccgataagctaaactgccccatgttaaagtctctcgttagaaagctactagagcgagactttttcaaccatggaggccacccccacacccgcggacttgttttctga

SEQ ID NO: 14198 - DNA, 261 bp, unidentified; identical to SEQ ID NO: 14197
  misc_feature 1..261: note = Synthetic
  source 1..261: mol_type = other DNA

SEQ ID NO: 14199 - DNA, 294 bp, unidentified
  misc_feature 1..294: note = Synthetic
  source 1..294: mol_type = other DNA
atgagtcttctaaccgaggtcgaaacgcttaccagaaacggatgggagtgcaaatgcagagattcaagtgatcctctcgttgttgcagcaagtatcattgggatattgcacttgatattgtggattcttgatcgtcttttcttcaaatgcatttatcgtcgctttaaatacggtttgaaaagagggccttctacggaaggagtgcctgagtctatgagggaagagtatcggcaggaacagcagaatgctgtggatgttgacgatggtcattttgtcaacatagagctggagtaa

SEQ ID NO: 14200 - DNA, 759 bp, unidentified
  misc_feature 1..759: note = Synthetic
  source 1..759: mol_type = other DNA
atgagtcttctaaccgaggtcgaaacgtacgttctctctatcatcccatcaggccccctcaaagccgagatcgcgcagagacttgaggatgtttttgcagggaagaacacagatcttgaggctctcatggaatggctaaagacaagaccaatcctgtcacctctgactaaggggattttagggtttgtgttcacgctcaccgtgcccagtgagcgaggactgcagcgtagacgatttgtccaaaatgccctaaatgggaatggagacccaaacaacatggacagggcagttaaactatacaagaagctgaagagggaaatgacattccatggagcaaaggaagttgcactcagttactcaactggtgcgcttgccagttgcatgggtctcatatacaaccggatgggaacagtgaccacagaagtggctcttggcctagtatgtgccacttgtgaacagattgctgatgcccaacatcggtcccacaggcagatggcgactaccaccaacccactaatcaggcatgagaacagaatggtactagccagcactacggctaaggccatggagcagatggctggatcaagtgagcaggcagcagaagccatggaagtcgcaagtcaggctaggcaaatggtgcaggctatgaggacaattgggactcaccctagttccagtgcaggtctaaaagatgatcttattgaaaatttgcaggcttaccagaaacggatgggagtgcaaatgcagagattcaagtga

SEQ ID NO: 14201 - DNA, 51 bp, unidentified; identical to SEQ ID NO: 6614
  misc_feature 1..51: note = Synthetic
  source 1..51: mol_type = other DNA

SEQ ID NO: 14202 - DNA, 57 bp, unidentified; identical to SEQ ID NO: 6628
  misc_feature 1..57: note = Synthetic
  source 1..57: mol_type = other DNA

SEQ ID NO: 14203 - DNA, 207 bp, unidentified
  source 1..207: mol_type = other DNA
  misc_feature 1..207: note = Synthetic
atagccattcgcaggtccagagagacgcgcccgacggcccatccggagtccccgctaaccttcggcataaaagccaccgcgcgcctgttgaccaggttcagttgcacgactccgcccccgcgagtagcgacggccgtgtgccagtcgccatcgtacccccgacccaagctgtccggctggacaaggatcgccccggatccccactga

SEQ ID NO: 14204 - DNA, 39 bp, unidentified; identical to SEQ ID NO: 6633
  misc_feature 1..39: note = Synthetic
  source 1..39: mol_type = other DNA

SEQ ID NO: 14205 - DNA, 39 bp, unidentified; identical to SEQ ID NO: 6634
  source 1..39: mol_type = other DNA
  misc_feature 1..39: note = Synthetic

SEQ ID NO: 14206 - DNA, 39 bp, unidentified; identical to SEQ ID NO: 6634
  source 1..39: mol_type = other DNA
  misc_feature 1..39: note = Synthetic

SEQ ID NO: 14207 - DNA, 1440 bp, unidentified
  source 1..1440: mol_type = other DNA
  misc_feature 1..1440: note = Synthetic
atggttccttctcagagactctcccgaactagcagcatttcctccaacgaggatcccgcagagagccacattctggaactcgaagcggtctcagacaccaacacagactgcgatatggaccctatggacggcagcgaagaacactccacagatggagagatttcatcctcagaggaggaggatgaagatccaactccggcccacgccatacctgcacagccctccagcgtggtcataacccctacctcggcatcgtttgtgattcccagaaagaagtgggacctacaggacaagacggtcacgctgcatcgctcacccctgtgcagggacgaggacgagaaggaggagactggcaactcctcttacaccagaggccacaaaaggcgacgcggagaggtccatggctgcaccgatgaaagttatggcaagcgccgacacctgcccccgggagcaagagcgcccagagccccaagggcccccagggtgcctagagcaccgaggtctccaagagctccccgaagcaacagagcaaccagaggtccccggtcagaatctcgaggggccggcaggagcacaaggaagcaggcgaggcaagaacgcagccagaggcccctgcccaacaaaccgtggtttgacatgagtctggttaagcctgtctccaagattacatttgtcaccttgcccagccccctggcctctctgaccctagagcccatccaagacccgttcctacagtcgatgctggcggtggccgcccatccagagattggagcctggcagaaagtgcaacccagacacgagctgcgcaggagctacaagacactacgtgagtttttcaccaagtcaaccaacaaggacacatggctggatgcacgcatgcaggcgatccagaacgcggggctctgcaccctggtggccatgctagaagagaccatcttttggctccaggagatcacctaccacggcgacctgcccctagctcccgcggaagacatcctcctggcctgcgccatgagtcttagcaaggtgatcctgaccaagctcaaagagctggcaccctgcttccttcctaacacgcgagactacaactttgtgaagcaactcttctacatcacctgtgccacggcccgtcaaaacaaggtggtggagaccctgagcagctcatatgtgaagcagcccctctgtctcttggcagcatatgcggcagtagccccagcctacattaacgccaactgcagacggagacacgatgaagttgaattcctgggccactacatcaagaattacaaccctggcacgctaagctcccttttgacagaggccgtggagactcacacacgtgactgccgaagtgcatcatgcagccgacttgtcagggccattctctctccggccactgggtcactaggactgttttttgttcctggattaaatcaataa

SEQ ID NO: 14208 - DNA, 1440 bp, unidentified
  source 1..1440: mol_type = other DNA
  misc_feature 1..1440: note = Synthetic
atggttccttctcagagactctcccgaactagcagcatttcctccaacgaggatcccgcagagagccacattctggaactcgaagcggtctcagacaccaacacagactgcgatatggaccctatggagggcagcgaagaacactccacagatggagagatttcatcctcagaggaggaggatgaagatccaactccggcccacaccatacctgcacggccctccagcgtggtcataacccctacctcggcatcgtttgtgattcccagaaagaagtgggacctacaggacaagacagtcacattgcatcgctcacccctgtgcagggacgaggacgagaaggaggagactggcaactcctcttacaccagaggccacaaaaggcgacgcggagaggtccatggctgcaccgatgaaagttatggcaagcgccgacacctgcccccgggagcaagagcgcccagagccccaagggcccccagggtgcctagagcaccgaggtctccaagagctccccgaagcaacagagcaaccagaggtccccggtcagaatctcgaggggccggcaggagcacaaggaagcaggcgaggcaagaacgcagccagaggcccctgcccaacaaaccgtggtttgacatgagtctggttaagcctgtctccaagattacatttgtcaccttgcccagccccctggcctctctgaccctagagcccatccaagacccgttcctacagtcgatgctggcggtggccgcccatccagagattggagcctggcagaaagtgcaacccagacacgagctgcgcaggagctacaagacactacgtgagtttttcaccaagtcaaccaacaaggacacatggctggatgcacgcatgcaggcgatccagaacgcggggctctgcaccctggtggccatgctagaagagaccatcttttggctccaggagatcacctaccacggcgacctgcccctagctcccgcggaagacatcctcctggcctgcgccatgagtcttagcaaggtgatcctgaccaagctcaaagagctggcaccctgcttccttcctaacacgcgagactacaactttgtgaagcaactcttctacatcacctgtgccacggcccgtcaaaacaaggtggtggagaccctgagcagctcatatgtgaagcagcccctctgtctcttggcagcatatgcggcagtagccccagcctacattaacgccaactgcagacggagacacgatgaagttgaattcctgggccactacatcaagaattacaaccctggcacgctaagctcccttttgacagaggccgtggagactcacacacgtgactgccgaagtgcatcatgcagccgacttgtcagggccattctctctccgggcactgggtcactaggactgttttttgttcctggattaaatcaataa

SEQ ID NO: 14209 - DNA, 69 bp, unidentified; identical to SEQ ID NO: 6637
  misc_feature 1..69: note = Synthetic
  source 1..69: mol_type = other DNA

SEQ ID NO: 14210 - DNA, 921 bp, unidentified
  misc_feature 1..921: note = Synthetic
  source 1..921: mol_type = other DNA
atcatccagggttgcagctgggagagaatggtgtcgatcaaagtgtctttagctgatttcattgttaagactgaggaaggttggattccatctgataactgtcctgctttagatagatttaaaactaaaactgaaaaggagctgttggattcaataaaaaaagaaggagcagatagagcatcaattcgaaaacaattgtttttaacatctatatcaaataaaagacttactcaacttggaggtgtgcctgtgcgagatattcgcacatccacgactattccatcttcaactagaaatttaatcactgattggttgttaaatatatttaatgatgaagagtcaggtgaagaggttgaaagtgctattgcaagcaagtatcctgatatattttgttctgctgataaaattagtcgagttgcacagagacttgaaaatagaagagatagagtacatgaagatgggtttagaattttatcagcaacaatgctagctatagattctgatattgctactgagggtaaatgtgaaatagtaagagcgactgaagatgctattattgctaaatttgaaccagtttcagaacatctatgtataggaaatccaagaggtgttttctataaagcttttccaataaaaaaagaacagccaatggtctatggagttaaggctttgttaggtatatctaatagagactttatcatgaaccatggtcatggtcatttaagaactgttccatattctgaaattaataacgcagttagatcttttgcaaaaaagaatgaagctgagatcaaaagaattcgttccgattcattgtcacccaatgcaggtgaaaaatttattaacatgtgcgatatgttgttacaaaaagagaaaattgagactgtcatagctaaaataatgaaaagcgataaaaattag

SEQ ID NO: 14211 - DNA, 2526 bp, unidentified
  source 1..2526: mol_type = other DNA
  misc_feature 1..2526: note = Synthetic
atgtttgcgctagttttagcggtggtaattcttcctctttggaccacggctaataaatcttacgtaacaccaacccctgcgactcgctctatcggacatatgtctgctcttctacgagaatattccgaccgtaatatgtctctgaaattagaagccttttatcctactggtttcgatgaagaactcattaaatcacttcactggggaaatgatagaaaacacgttttcttggttattgttaaggttaaccctacaacacacgaaggagacgtcgggctggttatatttccaaaatacttgttatcgccataccatttcaaagcagaacatcgagcaccgtttcctgctggacgttttggatttcttagtcaccctgtgacacccgacgtgagcttctttgacagttcgtttgcgccgtatttaactacgcaacatcttgttgcgtttactacgttcccaccaaacccccttgtatggcatttggaaagagctgagaccgcagcaactgcagaaaggccgtttggggtaagtcttttacccgctcgcccaacagtccccaagaatactattctggaacataaagcgcattttgctacatgggatgcccttgcccgacatacttttttttctgccgaagcaattatcaccaactcaacgttgagaatacacgttcccctttttgggtcggtatggccaattcgatactgggccaccggttcggtgcttctcacaagcgactcgggtcgtgtggaagtaaatattggtgtaggatttatgagctcgctcatttctttatcctctggaccaccgatagaattaattgttgtaccacatacagtaaaactgaacgcggttacaagcgacaccacatggttccagctaaatccaccgggtccggatccggggccatcttatcgagtttatttacttggacgtgggttggatatgaatttttcaaagcatgctacggtcgatatatgcgcatatcccgaagagagtttggattaccgctatcatttatccatggcccacacggaggctctgcggatgacaacgaaggcggatcaacatgacataaacgaggaaagctattaccatatcgccgcaagaatagccacatcaatttttgcgttgtcggaaatgggccgtaccacagaatattttctgttagatgagatcgtagatgttcagtatcaattaaaattccttaattacattttaatgcggataggagcaggagctcatcccaacactatatccggaacctcggatctgatctttgccgatccatcgcagcttcatgacgaactttcacttctttttggtcaggtaaaacccgcaaatgtcgattattttatttcatatgatgaagcccgtgatcaactaaagaccgcatacgcgctttcccgtggtcaagaccatgtgaatgcactttctctcgccaggcgtgttataatgagcatatacaaggggctgcttgtgaagcaaaatttaaatgctacagagaggcaggctttattttttgcctcaatgattttattaaatttccgcgaaggactagaaaattcatctcgggtattagacggtcgcacaactttgcttttaatgacatccatgtgtacggcagctcacgccacgcaagcagcacttaacatacaagaaggcctggcatacttaaatccttcaaaacacatgtttacaataccaaacgtatacagtccttgtatgggttcccttcgtacagacctcacggaagagattcatgttatgaatctcctgtcggcaataccaacacgcccaggacttaacgaggtattgcatacccaactagacgaatctgaaatattcgacgcggcatttaaaaccatgatgatttttaccacatggactgccaaagatttgcatatactccacacccatgtaccagaagtatttacgtgtcaagatgcagccgcgcgtaacggagaatatgtgctcattcttccagctgtccagggacacagttatgtgattacacgaaacaaacctcaaaggggtttggtatattccctggcagatgtggatgtatataaccccatatccgttgtttatttaagcagggatacttgcgtgtctgaacatggtgtcatagagacggtcgcactgccccatccggacaatttaaaagaatgtttgtattgcggaagtgtttttcttaggtatctaaccacgggggcgattatggatataattattattgacagcaaagatacagaacgacaactagccgctatgggaaactccacaattccacccttcaatccagacatgcacggggatgactctaaggctgtgttgttgtttccaaacggaactgtggtaacgcttctaggattcgaacgacgacaagccatacgaatgtcgggacaataccttggggcctctttaggaggggcgtttctggcggtagtggggtttggtattatcggatggatgttatgtggaaattcccgccttcgagaatataataaaatacctctgacataa

SEQ ID NO: 14212 - DNA, 528 bp, unidentified
  misc_feature 1..528: note = Synthetic
  source 1..528: mol_type = other DNA
ctgggtagaaatcaaaatctttatatgctgggtcagacattgtggggaggaactatgaaggggctcttgctgattatcctttccctggtggggggtgtgctgtcatgccacgaacagccacgatgtaacatcaccacaggcaatgagaggagtgtcatatgcacagtagtcatcaaatgcgagcatgaatgccctctcaacatcacattcaaaaaccgtaccatggggaatgcatgggtgggcgactgggaaccaggagatgagcagaactacacggtcactgtccatggtagcgatggaaatcacactttcggtttcaaattcatttttgaagtcatgtgtgatatcacactgcatgtggctagacttcatggcttgtggccccctaccaaggaaaacatggttgggttttctttggcttttgtgatcatggcctgctttatgtcaggtctgctggtaggagctctagtgtggttcctgaaacgcaagcccaggtatggaaatgaggagaaggaaaaattgctataa

SEQ ID NO: 14213 - DNA, 48 bp, unidentified; identical to SEQ ID NO: 6646
  misc_feature 1..48: note = Synthetic
  source 1..48: mol_type = other DNA

SEQ ID NO: 14214 - DNA, 24 bp, unidentified
  misc_feature 1..24: note = Synthetic
  source 1..24: mol_type = other DNA
atgtattgtctaaagccgttatag

SEQ ID NO: 14215 - DNA, 33 bp, unidentified; identical to SEQ ID NO: 6648
  misc_feature 1..33: note = Synthetic
  source 1..33: mol_type = other DNA

SEQ ID NO: 14216 - DNA, 24 bp, unidentified
  misc_feature 1..24: note = Synthetic
  source 1..24: mol_type = other DNA
atggagctgcctgcttggttctga

SEQ ID NO: 14217 - DNA, 315 bp, unidentified
  misc_feature 1..315: note = Synthetic
  source 1..315: mol_type = other DNA
atgggggttatggcggacccaccgcaccaccatactccgattcgaccacatatgcaaccaaatcacccccagaggggaggttccatttttacgaggaggaggagtataatagagtctttgtgtttaaaacccggggtcggtgtggtgttcggtcataagctgcattgcgaacgactagtcgccgtttttcgtgtgcatcgcgtatcacggcatggggcgtttgacctccggcgtcgggacggcggccctgctagttgtcgcggtgggactccgcgtcgtctgcgccaaatacgccttagcagacccctcgcttaa

SEQ ID NO: 14218 - DNA, 738 bp, unidentified
  source 1..738: mol_type = other DNA
  misc_feature 1..738: note = Synthetic
attaggggatataagcagagcgcataccggtcggcagtaggtatgtcatccggcggtctcggggattgcagcgcctgtgagacccgagccgctgggggcagtgaattgccgcttaggcaagaggggcaacttgggcccagcggagccggatccacgggcaagacactaaatgcagaccccccgctctcgccgacaagcaacaactactcggtcagaactattaacggcatacgagcatccaacaagttcgtgtccgccagcagaaacgacctcgatagagatccaaattggtatcgggtcaactataattactctatcgctacctggctacgccagtgtgcgcgttctcacgacgagatctgcacctgcggacgatggaggagtcactggttccaggaggctagcggactcgtcacacaggagacccagacggaccagctcgccagagatctacgtcggcttcagcgcaaaggagaggcggcaaaaagaaaacttgattaccttaagagaagagggaccccccataaaaaaactaagactgtgacatggcaagattacgacgacgacgacctcgtggacgctttggcttctaccacagaggacgatggcactggagacacagactgcgacgaagacgctattcccggaggggtaaatttcgatatgcgcgtagaagatcctttgatcgccgcgttaagaggaggatcttcaacccacacccgggctcctatgtggtaa

SEQ ID NO: 14219 - DNA, 15 bp, unidentified
  source 1..15: mol_type = other DNA
  misc_feature 1..15: note = Synthetic
atgtcagccacctag

SEQ ID NO: 14220 - DNA, 15 bp, unidentified
  misc_feature 1..15: note = Synthetic
  source 1..15: mol_type = other DNA
atgtcagccacctag

SEQ ID NO: 14221 - DNA, 861 bp, unidentified
  misc_feature 1..861: note = Synthetic
  source 1..861: mol_type = other DNA
atgcccagaatgaaggacatacctactaagagttccccgggaacggacaattctgagaaagatgaagctgtcattgaggaagatctaagcctcaacgggcaaccattttttacggacaatactgacggtggggaaaacgaagtctcttggacaagctcgctgttgtcaacctacgtaggttgccagcccccggccataccggtctgtgaaacggtcattgaccttacagcgccttcccaaagtggcgcgcccggtgacgaacatctgccatgctcactgaatgcagaaactaaattccacatccccgatccttcctggacgctctctcacacaccaccaagaggaccacacatttcgcaacagcttccaactcgcagatccaagaggcgactacatagaaagtttgaagaggaacgcttatgcactaaggccaaacagggcgcaggtcgccccgtgcctgcgtctgtagttaaggtagggaacatcaccccccattatggggaagaactgacaaggggtgacgccgtcccagccgcccctataacacccccctacccgcgcgttcaacgcccagcacagcccacacatgtcctgttttctcctgtttttgtctctttaaaggccgaagtatgtgatcagtcacattctcccacgcgaaagcaaggcagatacggccgcgtgtcatcgaaagcatacacaagacagctgcagcaggcattagaagaaaaggatgcacaactatgtttcctagcggcgagattggaggcacataaggaacagattattttccttcgcgacatgctgatgcgaatgtgccagcagccagcgtcgccaacggacgcgccactcccaccatgttga

SEQ ID NO: 14222 - DNA, 861 bp, unidentified
  source 1..861: mol_type = other DNA
  misc_feature 1..861: note = Synthetic
atgcccagaatgaaggacatacctactaagagttccccgggaacggacaattctgagaaagatgaagctgtcattgaggaagatctaagcctcaacgggcaaccattttttacggacaatactgacggtggggaaaacgaagtctcttggacaagctcgctgttgtcaacctacgtaggttgccagcccccggccataccggtctgtgaaacggtcattgaccttacagcgccttcccaaagtggcgcgcccggtgacgaacatctgccatgctcactgaatgcagaaactaaattccacatccccgatccttcctggacgctctctcacacaccaccaagaggaccacacatttcgcaacagcttccaactcgcagatccaagaggcgactacatagaaagtttgaagaggaacgcttatgcactaaggccaaacagagcgcaggtcgccccgtgcctgcgtctgtagttaaggtagggaacatcaccccccattatggggaagaactgacaaggggtgacgccgtcccagccgcccctataacacccccctccccgcgcgttcaacgcccagcacagcccacacatgtcctgttttctcctgtttttgtctctttaaaggccgaagtatgtgatcagtcacattctcccacgcgaaagcaaggcagatacggccgcgtgtcatcgaaagcatacacaagacagctgcagcaggcattagaagaaaaggatgcacaactatgtttcctagcggcgagattggaggcacataaggaacagattattttccttcgcgacatgctgatgcgaatgtgccagcagccagcgtcgccaacggacgcgccactcccaccatgttga

SEQ ID NO: 14223 - DNA, 3651 bp, unidentified
  source 1..3651: mol_type = other DNA
  misc_feature 1..3651: note = Synthetic
atttctgattggtttgttattgtaggtgtggctaaacatacagataaaactatggaaagaagtggagctacttcacctatgttgattgttggacaaccatctgaaaccatggcatcgaatgacgaaagacatattgaatatcacccagataccaccgtggaagagaccatcagagacatattgcaagacagtttaaaatgcaacccttcctttgataatactctcttccaagaattggattcttttgatttccttgactcaatatcatctaatgatattgcaacggcaaatgcttcctattccacaaatgttgaagaaggagcttcctcggatattaaactggcagcagctcagtccattagtgcctgcatccaaggtattcttaaatccgtgaatgctgccatggatcaggaaaaagcagacattgaagattgtttaattaaccacgctggaattttaacgaatgacagacacatgcttacagatcttgctttagaacaattatctcagatgctaaatgttaatttaattagtggtgcttcctctggatttatatctttttatgaagatatcttatctggagaacaattagaattttttctttggtgtgaatcaagatacactgtatatgcctgtgataaatttgatgaaattgttaaaaaagtgattgcagattgtagagaatatttatcagatttgagaaataatatggatagagaatttatcaaatgtataaaaaagatcataagtatgggcaactttataagcagtaatgagaaacttaacagatgtgcaacaatgttattaatgatgggaaaaaacagagacataacagatataaacatttccaatcaggcattctacataaaaacaaataagattaaaaaagatttgttggaatgtaaatttgaaataattgaaaaaaacagcagaatagctcaaactatgaaagactttgcaatcaaacagatgaatcagatgttcatgtcaatgtgtgacgaaacattccttaaaatacatttcaattgtataaatttaatagaggcagcaaaaaacctaggagctgctgtactgcagtgtattgtaatatgctctaaagaattttcatgcaaaaaattcagggcaaatagaaaagaatttaagatcacacttatgcatatgattaatgatgcttgtgatcaaatagaaaagctatatgatgtcacaggagaagttacagtgttaaattcaatatccattagaaatggatatgtcacaggaaatggacatcactcttccactttgcttgagtcacacttatataattctgactcgactccaccagaaattgaagattttaatgattatggaaagtattctgaggaatgttctgaaacatctgaacaatcctaccaaagtgtacatcagaatgtcagtcctacacagtgtgtttcaaagtctgaacagtacaatgttcaatcaaatttttcagacatatgccaaaccattaaaacaactctggctgtttcacaagcatcagatgaatcacactctaaaaacacaactggaaaaaatcctgaagtttgtaccagagaatataaattagatttctttgaagagatagatacacagaatcttgccaaaaaggttgtttcaaaagactcacctgactgtctcatgtatccagctgaaacaaatcctggaatgagtactgaagaaagtgaggtaaatgtttctgaaggaacagacacacaggatttttccaggaatactatttgcagattcttatctgataatcctataatctcagttgagaaaaattctgaagtgaatgctataaaaaatgagacggggctttccgaagcagcagccacacaggattttttcaaagaggctactatgaaaagctgcagggatactaaagcagatcaaattctaacaggacagagaaagactattaaaaacaaacagaaagtcagtaagaacaatgaagcctttaacatgagtttgtataaccttaaaagaaatgaggaaacttatcaagataagaactctttgaacttttcaaatgaatttcctcatacaaccttttccaggagagataaaaaaacagataaccaagctggaatactcatggaaaggtcagtaactgaggaaatttgcgtcaataactctttgacattttcaaatgaatttcctcctaccttttccagaacagataaaaaaacaaatagcccagctggaatactcatggaaaggtcaatatttaataaggacacccaagataaagaacagtactttgaactttttaccatgacaaatcatacattagataatcagaacaaaggtcacaatctgtctgaagacaaaacagatgttaaaattaaaacagataagtctttatcagggcaagaagaaatgattaaaaataaacagagtgttagtcagggcaataaaacctccaatgtaaattttcataaccttaacagaaatgaaaacaaatataaagatggaaaagatttaattattccagataaatttcctaatgaaaccttttacatcagagataagaaaaaggatatttcaactaatagagctgtagaaagatcaacagctgatgttgacacagaaagtgatgtggaaaaagtggccgctgaaggattgattttattggagcagaattccaataataacagtagagatacagataatacaaatctggtgatttctgagatggaaacatatggttatgatacagataaatcaaccatatatgaaagtgagagctccagcactgatacaaattctacattcagtagtgtcagtctaacatccttcagtgactcacagactacagcacatgatttcagtgctgttaaaaaaaaacaattaaagagaaaaagtgaaagcaagttgaaaactagcaaagcaaaaaaaaaaaaactaattgttaaagagggctgcaataatatggagttaaattcttgcactgatacagacaatgaaaacatgagtaattttaatacagagatgtctacagattctattccttacagatcaaaactaattaacaattctgataactgtgaaaacaatggattccctagtgttgttttcacaattcctatcagatccatacggggggtgacaagaggtgtcagagttaaaattgttcctaaaaaaaactgcctgtggtttttacgtaagactcataaagttaacattccagacacaggcatgaaaaaagatgaaaataaagaactgaccaaacaagcaagttattgttttaataatcattttattccaataagaagtaatgatgaagaatataggcgggaaaatgtctcatatatatttccaaaactccaagaaaattttattgaggttgacagcatttcagagactaaaaccatggtaacaaatattatcatggataattttatggaaatcacagaaatgattaaaaatggtattaatagacattatgaagaattaaaaaagagatatgcaaataaaaatgtaagtgagatgaactcatttattttagaacagagtgttgacactcaaaattatgggaaagaaaacacagattctgatcaaacttatgttgactttcttgaaggttatccacagggatatgatccatttttggaaaatgctcaaatctattaa

SEQ ID NO: 14224 - DNA, 4302 bp, unidentified
  misc_feature 1..4302: note = Synthetic
  source 1..4302: mol_type = other DNA
ctgagagaagacatgactgcaattatcttcctagctctagtagcattgtctattcaagcacctatgtccaatagatgctttgaaggtggagttttggtagaagagaaagttatgaatcatggcattgctgaattatgcataaaggatgacattagtatgattaaaactacatcaacacaaaaacgaaacagcagcacttttaataatgttattatgagaaaaatgttgattcccaactaccaagattgtaatcctgttgaggtttctaatggcccaataatgatttttaaaccagatagagaattaatgctggtgcctaaaacatatgcatgccgtgtagactgctctatttcattagatagagatgaggcttcaataatacttcattcagataagcttaataattttgaagtgatggggacaacaactgctacaagatggtttcaaggaagtacaacatattctctagaacacacgtgcgaacatatacaagtcacatgcgggtcaaaaagtttaagcttccatgcttgttttaaataccatatggcttgtatcaggctgcttaacagaagttacatgccagggttcatgatacaatctgtctgccaaaataaagaaattattctcatgacgtgtctagtcttaataatatttggattgttgtacataatgacaatgtcttatatctgttatattttaatgcctatctttataccaattgcatatttttatggatgggtttataacaaatcatgtaaaaagtgctcatattgtggtttagcataccatccattcactaaatgtgggaagaattgcgtttgtgggtccatgtttgagaactcggagagaatgaaaatgcatagagtatcagggctctgcaaaggctataaatccttacgggctgctagaatcctctgtaaaagtagaggctcagcattggttctagcagtcttattggcaacgctgcttctttcttttatccagcctctagaagcaataaagctaacgtataacaatcaagttattgaaatatcagaactgtcccaggagttagatattatctttaataatttgcaatcgagtaggtctatcattatcggccaaatcactgtttgcattgctatgattttactattaactacataccttataatttgcaaacgaatagaagatcatttagtaaatagaattatctattactgtccagaatgtgaaatgacacaccctaaaaatggcttaaaaaaatatttctctgggaatttcacgaatatgtgcaacagctgtatgtgcggatgcacttataatcagaatgatttgaatgatggctatactatccctatgacccataaattaacaataggttgctatgcaccagggagatattatacgaatagaaaaatggggaatatgttgatttatgtggttatatttctgctgactatattaacatctatatctgttgctattgcaaatgaggataaatgtattaaaagtgacacatttaaaactcaagaccctatcacttgctcagcctggataaaagtatcatcatgttcagaagctagtgggttacagagtttattgtcatatttaaagttgccgaagcaagagactgacatagtcagggcaatgcagggaagcttagactcaattttaacaaaatcagagaatagtgatatcccattgcagtcttatatcttagagtcacttgctgtcaaattgcattgctcataccttgctaatgctgccactgatgggggtggtataaatacaataattaaatcacaatatacagagaagcaattagagatttgcattgcaggaaaagcagcaaagttatgtgcatgtcttacagggaaaggtaattgtgaccataccagcacagatgaagtttctgaatattataaagtacatcaggaaatatttaaatcagattttagcaggatgattcaaacaattgcaaaatattttcctggagtatttgcaaaagaattattaattgctgttaaagagacgaattatacaaaagtcaagagcataatcaaagctcttgacaacaaaataaccaatgctaaagcaattaaaagcatatttaaaataattgatgtagctctcacagaaagtactatacaaaaaataccagcacccgtaccatcaacaaaagacattaaaacatttgacacaaattggttagcagaaagtatcttcaaagatatggttacttccacaccaataaaaatctgtgtggccgggaagatatacaaatgtatctatcctatgagtcttcgattcacatattattactcctgctccgaagcaaataaattttaccaaactggagacgatcctatatcaaaattatacacaaataatgccaatttatgtgcagcagatgccttctgtgaaaagaatttttctatagtggaagacacaaacaaagatgctttaatgaccttgaagtgcgaacaggttactattaacatcaatgatatgcagagtgcagcccctatcaataaatgtcgggttatttccatacagcattgcattgtgtctggaacaaacaatagaactgtagcagaatgtgctaatggctacttttatgaattcacaggagacttgcatcagagccccaaagatgatgtaggagtatattgttttgacaaagtttgtaaaacaaacagataccctcaccaccctagcaacctagtaggatgcacatcacacaatgcagaaatgttgaataggaaactaaaagagataaactatgccaaccttgaacaattaaagcatagtctgcaagaatcaattaagactgacttgattgagcacaattatatattaactaaaaacctcccaagattaaatccaacttttaagcctgtctctattcagggtgttgaaacagatagtgggatacaaagttcttatatagagactaatttaatggttaaaacaggaatttcactaggattgcacctgactaccaaatctggagaacctctctttgatataattgtatttgtcaaaactgctcattacgaagctgtctatgatgaaatatatcagactggtcctacaattggtatcaacatccagcatgatgaacaatgcactggtaaatgtccaacaaatcttatgaagcacggatggctctcttttgctaaggaacataccagccaatggggctgtgaagaattcggatgtcttgctataaatgaaggctgcatctttgggcattgtaaagatataataaagccagagatgacagtgttaaaaaaggcgcaggaggagagccccgtaattaaaatatgtatttctttgccccaggaaacattttgtcaaccaatcaatgcctttacagcaataataacagataaaatagaaacacaattcatatcgaatgaagctggaaaaataccaacgctactaggctacaaatcgaataagatatttacaggtatgataaatgacttaggtactttctctaaaatgtgtggtagtgttcagtctgtatctggaaatgtcttgggagcaggtacaccacgatttgattacatatgtcatgcagctcaaaggaaagatgtgacagttagtagatgttttgacaatttttatgactcatgccaaagattagaagttagtgacaatatggtatatgataacagcataaagagagtttcattactcaataaaaatatgggagaaatgaggataaaaataaaattaggagacattaattacaaattattcgaaaaaatgccttcttttgatttcaaggggtcgtgtgttggctgcatcaaatgtatgaaaggcgttgactgcgaatttgacatacattcaacagcagagtcagtatgcatgctaacttccaactgcaatttttatcacaacaatttgaaaatagatccaaatgtccaaaaatatgggatgaaggggaaatgctcagaggaaaaagtctggatagacctttgtggtaataaaattgaaatacaaatatcagttgtccaatcacatgaaacaattgaagttggcaatagtgaccaaacatatttcgtaaaagagaaagattatagatgcgggacttggctttgcaaagtaagtgagcaaggaatatcatcaatatttgcaccattctttgccatatttggagattatgcaaaaatagcattttattgcatcttgggaataatatgcctagctttattgatttatttgatgctgcctatgtgtgggaaaataagagatattttaaagaagaatgaaatagagtatattaaggaatttagagggaaaaaactataa

SEQ ID NO: 14225 - DNA, 168 bp, unidentified; identical to SEQ ID NO: 6666
  source 1..168: mol_type = other DNA
  misc_feature 1..168: note = Synthetic

SEQ ID NO: 14226 - DNA, 1479 bp, unidentified
  misc_feature 1..1479: note = Synthetic
  source 1..1479: mol_type = other DNA
atgagctcgttgaacagcaccgtacgccggtgcaggcgtttttcgccgcattttttcaggatcttggggtgtgcctcgagatccacgtcgggcttttgcgtgagatggcgcagaaagttgaccagggctaccacatcgcgccgctgtagaccgataaactgcaaactcatgctggcttttctccagaacccggaagcgtcgtcgccccggactgcgcccgcggtctgctattcgtccacgatggacaccatcatccacaacaccacgaaccgcagtaccgatactccgcatgtcaacatcacctgtaacataacggagccgctatccgccatccgtaccacagaagccgtgatcaacacgttcatcattttcgtaggcggcccgctcaatgccatagtgttgatcacgcagctgctcacgaatcgcgtattgggctattcaacccccaccatctacatgaccaacctctattccaccaacttcctcacgctcaccgtactgccatttatcgtgctgagcaaccagtggctactacccgctagcgtggcttcgtgcaaattcttgtcggtgatttactactcgagctgcacagtaggctttgccaccgtagccctgatcgccgccgaccgataccgcgttcttcataagcgtacctacgcgcggcagtcgtaccgctccacctatataattttgctattgacctggtttgccgggctgatcttttccatgcccgcggctgtctacactacagtagtgatacataatggtacaaatggacaaagtagcaatggacacgctacctgcgtattgtacttcatagccgacgaggtgtacacggtactactctcgtggaaagtgctgctgacgctagtgtggggcgccgcgcccgttatcatgatgacgtggttttacgccttcttctactcaaccgtacagcgtgcgtctcaaaaacaaaggagtcgcactttaaccttcgtcagcgtgttactcatctccttcgtggcgctacagacgccttacgtgtccatcatgattttcaacagttacgccacggccgcatggcccatggactgcgaacacctgacactgcgacgcaccattggcacgctgtcacgcctggtaccccacctacactgcctcatcaatcccattctgtacgcgctgctgggtcatgactttctgcagcgcatgcggcagtgtttccgcggccagttgctggaccgccgcgctttcctgagatcgcagcagaatcagcgagctacagcggagacaaatctagcggctggcaacaattcacaatcagttgctacgtcattagacaccagtagcaaaaactgcaatcagcacgccaaacgcagcgtgtctttcaattttcccagcggtacgtggaaaggcggccagaaaaccgcgtccaacgacacatccacaaaaatcccccatcgactctcacaatcgcatcataacctcagcggggtatga

SEQ ID NO: 14227 - DNA, 39 bp, unidentified; identical to SEQ ID NO: 6670
  misc_feature 1..39: note = Synthetic
  source 1..39: mol_type = other DNA

SEQ ID NO: 14228 - DNA, 1044 bp, unidentified
  source 1..1044: mol_type = other DNA
  misc_feature 1..1044: note = Synthetic
atggccctggacgcgctagcttcaatcttggagactgtattgcgcaaatgcggtatcaatgaaatttctagaataacaaccaagtttgaagaagcactcgatgattgcgggatgaaggtggacgactggagagaggcatattataaagagcgatttccaaagagaatgacagcaacgaccatggcatctcaaatcatgaattttgaaattgaaaatctgcaactgaggaataaagcctgggctgaaggtgcagatcgcaaattcagattgttgtctagttttgaaattggaaataaagatgggcatactattctagttccaaagacgagaaatgctgaaatactcctagttaactctacatcagatttaaaacttaactcttttccatcagaggcagttactagattggttgaagagaatgaacaattgcgtaaacaaattaaacatttaagagaacaacaaacttctaaaccaactgcaattttatgtgaagctttggaagacatgactgagaaaatgaaattggtcgaaagagaaaaagaaacggttaataaaatgtttctcgagtgtagcagaattaatcagaggttaaaaaaacagattcagatgtgtgaagaagaagctactgatagactggctttggtgaactctcatcatagagaggagactttaatcatgaaacgagaaatttacagattgcaaatggagaacgtgacattaaaagaacaaattgactccataggaaaagaactggatcatagcaataaaattatacgaggactggccaatagagctggactagttgtcgatgaagtagattcaggtaatgagacgtctgaccagtcagatgaatctgatcatgataatcatgaaaatagtgaatcagatttagaagacatgatgaatccaggggaggacgaacggattcctagaggaggcgaaaatcctagaagacaggccagaatgttagaaatgagagaagaaatggaacgatttcatgaagacatggaaattttaaacctaaactttgatctagacatgtag

SEQ ID NO: 14229 - DNA, 18 bp, unidentified
  misc_feature 1..18: note = Synthetic
  source 1..18: mol_type = other DNA
atgccaacaaccttctaa

SEQ ID NO: 14230 - DNA, 1374 bp, unidentified
  source 1..1374: mol_type = other DNA
  misc_feature 1..1374: note = Synthetic
attccctcgaatccctaccaggaacaactgtcagacactccattaattccactaacaatctttgttggggaaaacacgggggtgcccccaccactcccaccaccccccccaccaccacccccaccacccccaccacccccaccacccccaccacccccaccacctccaccaccttcaccaccacccccgcccccaccacccccaccacctcagcgcagggatgcctggacacaagagccatcacctcttgatagggatccgctaggatatgacgtcgggcatggacctctagcatctgctatgcgaatgctttggatggctaattatattgtaagacaatcacggggtgaccggggccttattttgccacaaggcccacaaacagcccctcaggccaggttggtccagccacatgtcccccctctacgcccgacagcacccaccattttgtcacctctgtcacaaccgaggcttacccctccacaaccactcatgatgccaccaaggcctacccctcctacccctctgccacctgcaacactaacggtgccaccaaggcctacccgtcctaccactctgccacccacaccactactcacggtactacaaaggcctaccgaacttcaacccacaccatcaccaccacgcatgcatctccctgtcttgcatgtgccagaccaatcaatgcaccctcttactcatcaaagcaccccaaatgatccagatagtccagaaccacggtccccgactgtattttataacattccacctatgccattacccccctcacaattgccaccaccagcagcaccagcacagccacctccaggggtcatcaacgaccaacaattacatcatctaccctcggggccaccatggtggccacccatctgcgaccccccgcaaccctctaagactcaaggccagagccggggacagagcagggggaggggcaggggcaggggcaggggcaggggcaagggcaagtccagggacaagcaacgcaagcccggtggaccttggagaccagagccaaacacctccagtcctagcatgcctgaactaagtccagtcctcggtcttcatcagggacaaggggctggggactcaccaactcctggcccatccaatgccgcccccgtttgtagaaattcacacacggcaacccctaacgtttcaccaatacatgaaccggagtcccataatagcccagaggctcccattctcttccccgatgattggtatcctccatctatagaccccgcagacttagacgaaagttgggattacatttttgagacaacagaatctcctagctcagatgaagattatgtggagggacccagtaaaagacctcgcccctccatccagtaa

SEQ ID NO: 14231 - DNA, 18 bp, unidentified
  source 1..18: mol_type = other DNA
  misc_feature 1..18: note = Synthetic
atgccaacaaccttctaa

SEQ ID NO: 14232 - DNA, 1392 bp, unidentified
  source 1..1392: mol_type = other DNA
  misc_feature 1..1392: note = Synthetic
ttgtgttttgctttatctgctgccatcatgcctacatactatcttgcgttacatgggggacagtcatataatctaattgttgacactgatatgtctggaaacccgtcactctccgtaattcccacgaatccttaccaggaacaactatcaaataatccattaattcaactacaaatcgttgtcggggaaaacactggggcacccgcaccgccccaaccaccccccccaccccctccacctcctccacctgagcgcagggatgcctggacacaagagcccttaccactggatatgaatcccctgggcagtgacgccagtcaaggccctctggcatcttccataagaatgctttgcatggctcaataccttcttagaaacgcacggggccaacaaggccttcttaggccactaggaccacaaacacgctctcaggtcaccttggaacgtcaacctgtccacaaccctcgccaggaggcacccatcattttgttacagagtcccgcgcccccccgattcacaccagtgcccatggtagccttaggacatactcttcaacccacaccaccaccaaggcctactcttcctcaacccagaataccactgataataccaccaaggcatactaatcaaccagccacaacaccacccacggcgccacaaaggctcacactagggcatcaactaagtctaccaccgcatcctcccccgcatcagagcaccccacattgtagttctgatagtacaggactccctccacctcccacatcttacagcattccttctatgacattatcccccgaaccattgccgccaccagcagcaccagcacacccccttccaggtgtcatttatgaccaacaagcacttcctccaactccagggccaccatggtggccacctgtccgcgaccccacgccaaccactcagactccaccaacaaatacgaaacagggcccggaccagggccagggaaggggcaggtggcggggcaggggcagaagcaagggcaggggcagaatgcacaaacttcctgaaccacggagaccagggccagacacttccagtcctagtatgcctcaattaagtccggttgtcagtcttcatcagggacaggggcctgagaactcaccaacccccggcccgtctacggccggccccgtctgtagagtgacaccttcagcaacccctgacatttcaccaatacatgaaccagagtcctctgatagtgaagaacccccctttctcttccccagtgattggtatcctccaacgttagaacctgcagaattagatgaaagttgggagggcatttttgaaacaacagaatctcatagctctgatgaagagaatgtaggggggcctagtaaaagacctcgcacctccactcagtaa

SEQ ID NO: 14233 - DNA, 162 bp, unidentified
  source 1..162: mol_type = other DNA
  misc_feature 1..162: note = Synthetic
aagattgtgggtacaggagaggagctaaaatttgacatcccctttaaagtatggagaaagtatgccgctgaacggggtttagaataccagagttgggaagagggaagtgaggtgctgctgggagaaaatttcaacagagaccttattgctgatttcaagtaa

SEQ ID NO: 14234 - DNA, 42 bp, unidentified; identical to SEQ ID NO: 6680
  misc_feature 1..42: note = Synthetic
  source 1..42: mol_type = other DNA

SEQ ID NO: 14235 - DNA, 72 bp, unidentified; identical to SEQ ID NO: 6681
  source 1..72: mol_type = other DNA
  misc_feature 1..72: note = Synthetic

SEQ ID NO: 14236 - DNA, 675 bp, unidentified
  misc_feature 1..675: note = Synthetic
  source 1..675: mol_type = other DNA
atggctttctcggcgtctttatttaaacccgtccagctagtcccagtttctcctgcatttcatcgcattgagtctactgactctattgttttcacatacattcctgctagcggctatgtagctgctttagctgtcaatgtgtgtctcattcccctattattactgctacgtcaagatacttgtcgtcgcagcattatcagaactatggttctctatttccttgttctgtataactttttattagccattgtactagtcaatggtgtacattatccaactggaagttgcctgatagccttcttagttatcctcataatactttggtttgtagatagaattcgtttctgtctcatgctgaattcctacattccactgtttgacatgcgttctcactttattcgtgttagtacagtttcttctcatggtatggtccctgtcatacacaccaaaccattatttattagaaacttcgatcagcgttgcagctgttctcgttgtttttatttgcactcttccacttatatagagtgcacttatattagccgttttagtaagattagcctagtttctgtaactgacttctccttaaacggcaatgtttccactgttttcgtgcctgcaacgcgcgattcagttcctcttcacataatcgccccgagctcgcttatcgtttaa

SEQ ID NO: 14237 - DNA, 675 bp, unidentified
  misc_feature 1..675: note = Synthetic
  source 1..675: mol_type = other DNA
atggctttctcggcgtctttatttaaacccgtccagctagtcccagtttctcctgcatttcatcgcattgagtctactgactctattgttttcacatacattcctgctagcggctatgtagctgctttagctgtcaatgtgtgtctcattcccctattattactgctacgtcaagatacttgtcgtcgcagcattatcagaactatggttctctatttccttgttctgtataactttttattagccattgtactagtcaatggtgtacattatccaactggaagttgcctgatagccttcttagttatcctcataatactttggtttgtagatagaattcgtttctgtctcatgctgaattcctacattccactgtttgacatgcgttcccactttattcgtgttagtacagtttcttctcatggtatggtccctgtaatacacaccaaaccattatttattagaaacttcgatcagcgttgcagctgttctcgttgtttttatttgcactcttccacttatatagagtgcacttatattagccgttttagtaagattagcctagtttctgtaactgacttctccttaaacggcaatgtttccactgttttcgtgcctgcaacgcgcgattcagttcctcttcacataatcgccccgagctcgcttatcgtttaa

SEQ ID NO: 14238 - DNA, 18 bp, unidentified
  source 1..18: mol_type = other DNA
  misc_feature 1..18: note = Synthetic
ctggactgggaacagtag

SEQ ID NO: 14239 - DNA, 18 bp, unidentified
  misc_feature 1..18: note = Synthetic
  source 1..18: mol_type = other DNA
ctggactgggaacagtag

SEQ ID NO: 14240 - DNA, 564 bp, unidentified
  misc_feature 1..564: note = Synthetic
  source 1..564: mol_type = other DNA
atgcgccgtgggctaatcttggttacatctgacctcatggaggcttgggagtgtttggaagatttttctgctgtgcgtaacttgctggaacagagctctaacagtacctcttggttttggaggtttctgtggggctcctcccaggcaaagttagtctgcagaattaaggaggattacaagtgggaatttgaagagcttttgaaatcctgtggtgagctgtttgattctttgaatctgggtcaccaggcgcttttccaagagaaggtcatcaagactttggatttttccacaccggggcgcgctgcggctgctgttgcttttttgagttttataaaggataaatggagcgaagaaacccatctgagcggggggtacctgctggattttctggccatgcatctgtggagagcggtggtgagacacaagaatcgcctgctactgttgtcttccgtccgcccggcaataataccgacggaggagcaacagcaggaggaagccaggcggcggcggcggcaggagcagagcccatggaacccgagagccggcctggaccctcgggaatga

SEQ ID NO: 14241 - DNA, 27 bp, unidentified
  misc_feature 1..27: note = Synthetic
  source 1..27: mol_type = other DNA
atgcgcaatattttgggttatacataa

SEQ ID NO: 14242 - DNA, 27 bp, unidentified
  misc_feature 1..27: note = Synthetic
  source 1..27: mol_type = other DNA
atgcgcaatattttgggttatacataa

SEQ ID NO: 14243 - DNA, 915 bp, unidentified
  source 1..915: mol_type = other DNA
  misc_feature 1..915: note = Synthetic
ctggtcaccatgacgcagtcagtttctctttctgatttcatcgttaagactgaagatggatatatgccatcagacagagaatgtgttgcattggatagatatttatccaaagagcagaaggaactaagagaaacttttaaggatggaaaaaatgatagatcagctttaagaattaaaatgtttttatctccttcaccttccagacgattcactcaacatggagttgttccaatgagagaaataaaaacaaatacggatataccaagtacactatggactcttgtgactgattggttactaaatttacttcaagatgaagaaaatcaggaaatgtttgaagattttattagttcaaaatttccggatgttttagcttcggcagacaagctagcccgcttcgcccagcgattggaggatagaaaagatgtgttgcacaagaatttttctaaagccatgaatgcctttggcgcctgtttttgggcaatcaagccgacttttgccactgagggaaaatgtaatgttgtaagagccactgatgattcaatgatactagagtttcagccaataccagaatattttcgttgtggaagatcaaaagctacattttataaattatacccactctcagacgaacaacccgttaatggcatgctcgctctaaaagcagttgctggaaatcagttttttatgtaccatggacatgggcacatcagaacagttccatatcatgaacttgctgatgccatcaaatcattcgctcgtaaagataaagaaacgctcgagagcatttctaaatcaccacttgcagctcaatgtggtagtaaatttctcgatatgctcgatggaattagatcaaaacaaaaaattgaagatgtgattttgaaagcaaaaatttttgaaaagaaaagaagctga

SEQ ID NO: 14244 - DNA, 18 bp, unidentified
  misc_feature 1..18: note = Synthetic
  source 1..18: mol_type = other DNA
atgaataaagacggttaa

SEQ ID NO: 14245 - DNA, 210 bp, unidentified
  source 1..210: mol_type = other DNA
  misc_feature 1..210: note = Synthetic
ctgcttacgctggctgcccgacggcggcgaagaatgcgagcgacgccagtccgtacttatttttccgttttaaatggaagacgtggacgaggccaacctcctgcacctgctggaacgcttggcgggcagcggcgacgacgacttcggcgcaacgctggccgccatccgcgagctaatcagcgccatcaattcaaaggtgctcacccttaa

SEQ ID NO: 14246 - DNA, 18 bp, unidentified
  misc_feature 1..18: note = Synthetic
  source 1..18: mol_type = other DNA
atgccaccaaccttctaa

SEQ ID NO: 14247 - DNA, 1470 bp, unidentified
  source 1..1470: mol_type = other DNA
  misc_feature 1..1470: note = Synthetic
atgcctacattctatcttgcgttacatgggggacaaacatatcatctaattgttgacacggatagtcgtggaaacccgtcactctcagtaattccctcgaatccctaccaggaacaactgtcagacactccattaattccactaacaatctttgttggggaaaacacgggggtgcccccaccacccccaccacccccaccacccccaccacccccaccacctccaccaccttcaccaccttcaccaccttcaccacctccaccacctccaccacctccaccacctccaccacctccaccacctcagcgcagggatgcctggacacaagagccatcacctcttgatagggatccgctaggatatgatgtcgggcatggacctctagcatctgctatgcgaatgctttggatggctaattatattgtaagacaatcacggggtgaccggggccttatgttgccacaaggcccacaaacagccccccaggccgtgttggtacagccacatgtcccccctctacgcccgacagcacccaccattttgtcacctctgtcacgaccgaggcttacccctccacaaccactcacgatgccaccaaggcctactcctcctacccctctgccacctgcaacactacttacggtgccaccaaggcctacccgtcctaccactctgccacccacaccactactcacggtactacaaaggcctaccgaacttcaacccacaccatcaccacaaagcatgcatctccctgtcttgcatgtgccagaccaatcaatgcaccctcttactcatcaaagcaccccaaatgatccagatagtccagaaccacggtccccaaatgtattttataacattccacctatgccattacccccctcacaattgccaccaccagcagcaccagcacagccacctccaggggtcatcaacgaccaacaattacatcatctaccctcggggccaccatggtggccacccatctgcgaccccccgcaaccctctaagactcaaggccagagccggggacagagcagggggaggggcaggggcaggggcaggggcaggggcaagggcaagtccagggacaagcaacgcaagcccggtggaccatggagaccagagccaaacacctccagtcctagcatgcctgaactaagtccagtcctcggtcttcatcagggacaaggggctggggactcaccaactcctggcccatccaatgccgcccccgtttgtagaaattcacacacagcaacccctaacgtttcaccaatacatgaaccggagtcccataatagcccagaggctcccattctcttccccgatgattggtatcctccatctatagaccccgcagacttagacgaaagttgggattacatttttgagacaacagaatctcctagctctgatgaagattatgtggggggacccagtaaaagacctcgcccctccacccagtaa

SEQ ID NO: 14248 - DNA, 2292 bp, unidentified
  misc_feature 1..2292: note = Synthetic
  source 1..2292: mol_type = other DNA
atgtccaagctcattgagttttcagatcttggcgctgagatctcaaatagagaagaccttttcaaactgtctaatgacacatcatcttttaagattataaagccaacagtggctatcaaagattacattggaaccagtacgcattacgtagttttagatagaagagataatgatgaaactgccgatgttcttactacattgtttcctacttcagttatttttaactgtgaggaaggttataagtttggtggttgtagacatctccttaataatactcttcatattagcgatggcatgttcagttacggtgttaatagcatacaaaattggattcctcgtgggtggatcgttgataaatgtgatcgccttgatgatcatgtaggtgattatattatcaaattattggtcgactcttgttcatctcaaaccatccgtgaaatgaataaaatgagaccaggaacatatcccaggatggagcgtgttgaggaagaattcactaactttcttaagaaaatgactactcctcagaaagagattgattttcaatcgtacaactatgctgttcaaagacgacaaataggatatgttgtgagaaaaaccgtgttctcattaattaaatccaacaattggaatgtgaattacattggacctgaattcgaatcatttaaagagatcataaatcttcttacagataaaaattacacagggaaatttattacattcacatttaattcgtcaaaaaaacatagttataaacatcatatcagagaatatttaaacaaaaaagcaggttggaattatgtacatagaatgcgtcataagtatgaaaatgccttctgtcatttaatttataatcatgtagcgaaacagagatcttactcaactatatacgttaacaccctctacaatgttggaaactggacagaggcttaccaatggctcgacataaatgttgtagatcatcttcctgtgattcagaagaattcaataatatttggatacatgttatcgtccaaagagtgttcattttctgtcaacgcagaatcagacttagtagtatactctccttccccatatgatgatgattcaaacgtgtggacagtatcgatcatggggaataagttgggtacaacttacaatgaagacgaccgtatcgctgtaaaaaccaataatttaccaaattatgttttcggtggtgtaccatttaccgctgcggctttgaaattcgattatataaatattgctctatattcactatcaaattctgtaaactccccagaactaatcaaggcaactttatcttatgaccacatttttacattcccatcatactcaaaaggagattggagagatgaaagagcgacaacggatgacatcttcgttacaactgagaaacaactaagatttgaagattggataatcgatgctaaaaatttgtcgcttgagatggatgttgaagttgtttctgaagctgttttcctacaatttggcaaacacagagcttttatatctgatatgtatcagcatttaatttcattcagatttaagcagaaaaacttcttctcagatcagaaattttcacattttggtatacgtcaaccatccatatataatagagatatctatctctcttccaggttgaatgcatacattaatcgtcaattaacattgagtaccgacttatcattaattaagcaaaataattttgaaggattttctggacatttaattgctgttgaaaagtattttcatgcattagtatacacgatgtcaccaatgagatgggccaaacgagcactatccgatgctatctattcaaaaactgattctttttccaacgctatcggtgatcgacattctttacatgattttcgtaatacatatgcatatttgggagatacgatcaaccccatattcaggtccaatttagttaccaacaaatttgctgatgatccgaaattcgctatcacattgtcttgtggagttaatcacattacattacaattgaccactaaaaatccgcagattgcactacaggatattggaaatactattcatggaatggtaattaaaaaactagacaagaatgatttcggcaacattaaggtgattctataccaaacaaaggaaatgattcagtataaaatctgtaatatacttcgttcaatggatattccgtgtcagcaacatcgaccatacattatgcatatgacagtcaaaaccgagcgcaatgtgcccgatgtaatcataattaacaggaatgatttaattatcaaagaaatcaagcgctga

SEQ ID NO: 14249 - DNA, 225 bp, unidentified
  source 1..225: mol_type = other DNA
  misc_feature 1..225: note = Synthetic
atagaagagataatgatgaaactgccgatgttcttactacattgtttcctacttcagttatttttaactgtgaggaaggttataagtttggtggttgtagacatctccttaataatactcttcatattagcgatggcatgttcagttacggtgttaatagcatacaaaattggattcctcgtgggtggatcgttgataaatgtgatcgccttgatgatcatgtag

SEQ ID NO: 14250 - DNA, 513 bp, unidentified
  source 1..513: mol_type = other DNA
  misc_feature 1..513: note = Synthetic
atggcagaagcgtctgagttcaactttaccacaaagagaaagcaaagaataatgagtgatcgaagaacaagagaagacacaaaacaaaaaaagattgaagaaaaatctgatgttgacttggttgattcagcctcagtttattcacaagaatctgccagaagtaactatagtgatgcttacgataagttaaaacgtgaaccaatagttgaagaatcaaatgacgcgaagtataggaattttgaattttctgaagatgaagaagtttacagaccatcaagtaaagcgtcagacaaatcatatagagaaatgaaacgtaaatatgatggtactagcacgtcagattccattttagaaaaattgtcagagttaaatctcgagattgagaagataaaacaaatgaaccaaccagtcacaatcgatgcagcatttaacatgattcttcgaaacgttgataatctaactataaggcagaaacaggctttaataaacgcaattattaactctatgaactag

SEQ ID NO: 14251 - DNA, 12 bp, unidentified
  source 1..12: mol_type = other DNA
  misc_feature 1..12: note = Synthetic
atgcaagcataa

SEQ ID NO: 14252 - DNA, 768 bp, unidentified
  misc_feature 1..768: note = Synthetic
  source 1..768: mol_type = other DNA
atggacgcgccgcgcgagtgccagcgagtgatccttgccaagccgtatctgacggtcgtcctggagcctagcccccggttcccggtgctgctgccaataccaggccacgtgctcaagtgcgtcgacgtggagcctgaggccgcggagaagtgcgcagctttcgtggagatgcaccagccgcgctgcctcgagcgcgtgtgcggagtgcgcgacatgagcacggagcgttacctggtgcgctccacagccaatggcttggcaaacttggagcccgccgacgtctgcacaggaacacttgagtccgagatcgagcccgtctcctatgtcaccatcgagcgcaaatccgcggcagtgacggcgctcatgttgggcatccaccacacgtgccgcgagctactcttccccgcgctgccgctgcccgaggacgaaagcgtgtaccgagcggcgctggtctacgaggggaacgtgggcttgtatgagcacgccgtgcgtcactttgggctacagacaggcacgcgcgcgcgcaccgtgcgtgcgccgcagtgcaccatcaccacgcgcgacggggacgtcctgcgccatgcgcagtctcgtgccgcgctgagtatggacgtgggcggcagccccatgctcatgaagaacccgcacatcgtcaccattagcgtgaggcaagccgcgtgctgcacgcgcccgctcaaatacggaggcgcgtgcgcacacgctggcgcgcgcgagtatgcatgcgcgcgcgcggacgcgggcgcgtag

SEQ ID NO: 14253 - DNA, 1596 bp, unidentified
  source 1..1596: mol_type = other DNA
  misc_feature 1..1596: note = Synthetic
atgcaggtgacttttatttacatcctagttattacatgttacgaaaacgacgtaaacgtttaccatattttttttcagatgtctctttggctgcctagtgaggccactgtctacttgcctcctgtcccagtatctaaggttgtaagcacggatgaatatgttgcacgcacaaacatatattatcatgcaggaacatccagactacttgcagttggacatccctattttcctattaaaaaacctaacaataacaaaatattagttcctaaagtatcaggattacaatacagggtatttagaatacatttacctgaccccaataagtttggttttcctgacacctcattttataatccagatacacagcggctggtttgggcctgtgtaggtgttgaggtaggtcgtggtcagccattaggtgtgggcattagtggccatcctttattaaataaattggatgacacagaaaatgctagtgcttatgcagcaaatgcaggtgtggataatagagaatgtatatctatggattacaaacaaacacaattgtgtttaattggttgcaaaccacctataggggaacactggggcaaaggatccccatgtaccaatgttgcagtaaatccaggtgattgtccaccattagagttaataaacacagttattcaggatggtgatatggttgatactggctttggtgctatggactttactacattacaggctaacaaaagtgaagttccactggatatttgtacatctatttgcaaatatccagattatattaaaatggtgtcagaaccatatggcgacagcttatttttttatttacgaagggaacaaatgtttgttagacatttatttaatagggctggtactgttggtgaaaatgtaccagacgatttatacattaaaggctctgggtctactgcaaatttagccagttcaaattattttcctacacctagtggttctatggttacctctgatgcccaaatattcaataaaccttattggttacaacgagcacagggccacaataatggcatttgttggggtaaccaactatttgttactgttgttgatactacacgcagtacaaatatgtcattatgtgctgccatatctacttcagaaactacatataaaaatactaactttaaggagtacctacgacatggggaggaatatgatttacagtttatttttcaactgtgcaaaataaccttaactgcagacgttatgacatacatacattctatgaattccactattttggaggactggaattttggtctacaacctcccccaggaggcacactagaagatacttataggtttgtaacatcccaggcaattgcttgtcaaaaacatacacctccagcacctaaagaagatccccttaaaaaatacactttttgggaagtaaatttaaaggaaaagttttctgcagacctagatcagtttcctttaggacgcaaatttttactacaagcaggattgaaggccaaaccaaaatttacattaggaaaacgaaaagctacacccaccacctcatctacctctacaactgctaaacgcaaaaaacgtaagctgtaa

SEQ ID NO: 14254 - DNA, 1965 bp, unidentified
  misc_feature 1..1965: note = Synthetic
  source 1..1965: mol_type = other DNA
atacaacagagaagaaacgaacgcacgctggtcgccatggccttgagcatcaacgactgcgcgcgcctcacgggccagaccgtgcccaccatgaactacttcctgccgctgcgcaacatctggaaccgcgtccgcgagttccctcgcgcctccaccaccgccgccggcatcacctggatgtcaaggtacatctacggctaccaccgcaccatgctcgaggacctagcgcccggcgcccccgccaccgagcgatggccgctctaccgccagccgccgccgcacttcctcatcggctaccagtacctggtgcgcacctgcaacgactacatcttcgactcgcgcgcctactcgcgcctcaagtaccacgagctcgcgcggcccggtcaccagactgtcaactggtccgtcatggccaactgctcctacaccattaacaccggagcctaccaccgcttcgtcgactttgacgacttccagaccaccctcacccagatccagcaggccatcctcgccgagcgcgtcgtcgctgacctggcgctcgtccagccgcagcgcgggtttgggctcacgcgtatgcacggccgcgcgggcgaggaggaggtgcccgtggagcggctcatgcaggactactacaaggacctggccaggtgtcaggaccacgcctggggcatggccgaccgtctgcgcatccagcaagccgggcccaaagacctggtgctcctcgccaccatccgccgtctcagaaccgcctatttcaacttcatcaccagcagcatcgcccccgcccacaccccaccgccgccagaagaaaccgtgctcagcctaccttgcgactgcgactggctcgaagccttcgttcaacggttttcagatcccgtggatctagagacgcttaggtccttgcgcggagtccctacggggcaattgataagatgcatcgtcagcgcactctccctgcccaacggggaccccccgggccacctggagatgcgcggcggcgtctttacgctgcgaccccgcgaggacgggcgcgccgtcaccgagaccatgcgacgccggcgcggcgagaccatcgagcgtttcatcgaccgtctgcccgtgcgccgccggcgacgcaggccccctcccccgccaccaccgcctgaggaggaagtagaagagatgttagtggatgaagaggaggaagtggaggaactcccgggagccttcgagcgcgaggtgcgcgccaccatcgccgagctcatccgtcttctggaggaggacttgaccgtatctgcacgcaactcccagtttttcaacttcgccgtggacttttacgaggccatggagcgcttggaagccctgggcgacgtcagcgaaatgccgctccgccgctggattatgtacttctttgtcactgagcacattgccaccacgctcaactacctctaccagcgcctctgcaactacgcggtttttgcgcgccacgtggagctcaacctcgcccaggtggtcatgcgcgcccgcgatcccgagggcgccgtggtttacagccgcgtctggaacgaggcgggcatgaacgccttctcgcagctcatgggccgcatctccaacgacctcgcggccaccgtggagcgcgccggccgcggagaccttcaggaggaggagatcgagcagttcatgaccgagattgcctaccaggacaactcgggcgacgtgcaagagattctgcggcaggccgccgtcaatgataccgagattgattctgtcgaactgtctttcaggttcaaactcacgggtcccgtggccttcacccagaggcgtcagatccaggacgtcaaccgtcgcgtcgtcgctcacgccagtcttctccgggcgcagtaccagaacctgcccgcgcgcggcgccgacgtgcccctgccaccactgcctccgggtcccgagccgcccctaccgcccggcgcgcgtcctcgccgccgcttttaa

SEQ ID NO: 14255 - DNA, 60 bp, unidentified; identical to SEQ ID NO: 6717
  misc_feature 1..60: note = Synthetic
  source 1..60: mol_type = other DNA

SEQ ID NO: 14256 - DNA, 60 bp, unidentified; identical to SEQ ID NO: 6717
  misc_feature 1..60: note = Synthetic
  source 1..60: mol_type = other DNA

SEQ ID NO: 14257 - DNA, 543 bp, unidentified
  misc_feature 1..543: note = Synthetic
  source 1..543: mol_type = other DNA
atgacaccagaaaacgacgaagagcagacatctgtgttctccgctactgtttacggagacaaaattcagggaaagaataaacgcaaacgcgtgattggtctatgtattagaatatctatggttatttcactactatctatgattaccatgtccgcgtttctcatagtgcgccaaaatcaatgcatgtctgctaacgaggctgctattactgactccgctgttgccgttgctgcggcatcatctactcatagaaaggttgcgtctagcactacacaatatgatcacaaagaaagctgtaatggtttatattaccagggttcttgttatatattacattcagactataagtcattcgaggatgctaaagcaaactgcgctgcggaatcatcaacgctacccaataaatccgatgtcttgactacctggctcattgattatgttgaggatacatggggatctgatggtaatccaattacaaaaactacatccgattatcaagattctgatgtatcacaagaagttagaaagtatttttgtacataa

SEQ ID NO: 14258 - DNA, 21 bp, unidentified
  source 1..21: mol_type = other DNA
  misc_feature 1..21: note = Synthetic
atggtctcacaaaaatattaa

SEQ ID NO: 14259 - DNA, 21 bp, unidentified
  misc_feature 1..21: note = Synthetic
  source 1..21: mol_type = other DNA
atggtctcacaaaaatattaa

SEQ ID NO: 14260 - DNA, 1410 bp, unidentified
  source 1..1410: mol_type = other DNA
  misc_feature 1..1410: note = Synthetic
atggccctgcaaactgacacacatgcctggcgggtggagatagggaccaggggactaatgttctctaactgtgtcccactccacctgccggagggacagtaccacaagctccggctgcccgtctcggcctacgaggccctggccgtggccaggtacgggctggtgggctccctctgggaggtgcccgccgtgaactctgcccttcagtgtctggcggccgctgcgccctgtaaagatgtaaagatctaccccagctgcatcttccaggtgcacgctcccatgtttgtaactataaagacaagcctgcgttgcctaaatcctcacgacctgtgtctgtgtctcatttgtgtaggtgcggctatcctagatatacccctcctatgcgccccccgtgacggagctggggcacgggccgccgaggggcaggctgcggccgcccaggggggcaaattgcgtgtctggggccgcctgagcccatcctcgcccatatcgctctccctggcttttccctatgcgggcccgccccccgtggcgtggtaccgacattctatcaaactaacaaggagtgaaggtgtggggatcggtaaagattgcgcccaggatcacgcctgccccgtcccaccccaaggtcatgcttcctctgcggctgaccaggctggggtgccggagagaggtagaaagcgggcccatgaaggcccgggggctggcgaggcagcgtccgcgggccgaggggatgtggccctgagtcagtcccgggctctgctctggcgcggcctcggctgggacacgggacgtggtcggctggcaccaggcctggccatgtcacgagacgcagcctccgggtccgtgcacctggacatacaggtggacagggccgaggagggctgggtctgcgacgttctgctggagcccgggccgcccaccgcccgggagggctgttttctaagcatggaccccggtctcgtgaccctgaaagatgcctggacgctattccccctccacccggagcacgacgccgtcgttccacccaaggaggaaatacatgtgatggcacagggccatctccagggcggcacgccctctctctgggggtttacattccaggaggcggcgtgcgaccaatgggtgctgcgcccgcgcgtgtggaccgcccactcgcccataaaaatgacagtctacaactgcgggcacaaaccgctgcacatcggccccagcaccagacttggacttgcgctcttctggccggccgagcgaagtgacaacctagacgccgggcggatattctaccagctaacgagcggagagttgtattggggccgcaccgtcgcccgccccccgactctcaccttgcccgtcgacgagctccggccatggccgaagcttaccccggaggagcccatgcagcactag

SEQ ID NO: 14261 - DNA, 189 bp, unidentified
  source 1..189: mol_type = other DNA
  misc_feature 1..189: note = Synthetic
acgggcaccgaggtagatcaatgtctggcctatcggagcctgacacgcaaaaagctggaacaacacgcggctaaaaagcagaacatctacgaacggattccataccggccctccagacagaacgacaactccccgttgatcgaaccgacgggcacagacgacgaagaggacgaggacgacgacgtctga

SEQ ID NO: 14262 - DNA, 57 bp, unidentified; identical to SEQ ID NO: 6725
  misc_feature 1..57: note = Synthetic
  source 1..57: mol_type = other DNA

SEQ ID NO: 14263 - DNA, 30 bp, unidentified; identical to SEQ ID NO: 6726
  misc_feature 1..30: note = Synthetic
  source 1..30: mol_type = other DNA

SEQ ID NO: 14264 - DNA, 225 bp, unidentified
  misc_feature 1..225: note = Synthetic
  source 1..225: mol_type = other DNA
ttgccacgattatatgaaatgatgcttccttctttggaggcgcgactgaattttcttagtgttggatatagacacgttgcttttgctagatacgttcacggggatgtcgattgcgtgcatagagaggtcatggctcaaaaaatggtacttcttacttcgatattgtcaaagctgttaaatgtaaatggaatattagaacatcaagaatatttaaatacggaatag

SEQ ID NO: 14265 - DNA, 558 bp, unidentified
  misc_feature 1..558: note = Synthetic
  source 1..558: mol_type = other DNA
atgatgacaccagaaaacgacgaagagcagacatctgtgttctccgctactgtttacggagacaaaattcaaggaaagaataaacgcaaacgcgtgattggtctatgtattagaatatctatggttatttcactactatctatgattaccatgtccgcgtttctcatagtgcgcctaaatcaatgcatgtctgctaacgaggctgctattactgacgccgctgttgccgttgctgctgcatcatctactcatagaaaggttgcgtctagcactacacaatatgatcacaaagaaagctgtaatggtttatattaccagggttcttgttatatattacattcagactaccagttattctcggatgctaaagcaaattgcactgcggaatcatcaacactacccaataaatccgatgtcttgattacctggctcattgattatgttgaggatacatggggatctgatggtaatccaattacaaaaactacatccgattatcaagattctgatgtatcacaagaagttagaaagtatttttgtgttaaaacaatgaactaa

SEQ ID NO: 14266 - DNA, 552 bp, unidentified
  misc_feature 1..552: note = Synthetic
  source 1..552: mol_type = other DNA
atgacaccagaaaacgacgaagagcaaacatctgtgttctccgccactgtttacggagacaaaattcagggaaaaaataaacgcaaacgcgtaattggtatatgtattagaatatctatggttatttcactactatctatgattaccatgtccgcgtttctcatagtgcgtctaaatcaatgcatgtctgctaacgaggctgctattactgacgccactgcagttgctgctgcattatctactcatagaaaggttgcgtctagcactacacaatataaacaccaagaaagctgtaatggtttatattaccagggttcttgttatatattccattcagactaccagttattctcggatgctaaagcaaattgcgccacagaatcatcaacactacccaataaatctgatgtcttgactacctggctcattgattatgttgaggatacatggggatctgatggtaatccaattacaaaaactacaaccgattatcaagattccgatgtatcacaagaagttagaaagtatttttgtgttaaaacaatgaactaa

SEQ ID NO: 14267 - DNA, 1410 bp, unidentified
  misc_feature 1..1410: note = Synthetic
  source 1..1410: mol_type = other DNA
atggccctgcaaactgacacacaggcctggcgggtggagatagggaccagaggactaatgttctctaactgtgtcccactccacctgccggagggacagtaccacaagctccggctgcccgtctcggcctacgaggccctggccgtggccaggtacgggctggtgggctccctctgggaggtgcccgccgtgaactctgcccttcagtgtctggcggccgctgcgccctgtaaagatgtaaagatctaccccagctgcatcttccaggtgcacgctcccatgtttgtaactataaagacaagcctgcgttgcctaaatcctcacgacctgtgtctgtgtctcatttgtgtaggtgcggctatcctagatatacccctcctatgcgccccccgtgacggagctggggcacgggccgccgaggggcaggctgcggccgcccaggggggcaaattgcgtgtctggggccgcctgagcccatcctcgcccacatcgctctccctggcttttccctatgcgggcccgccccccgtggcgtggtaccgacattctatcaacctaacaaggagtgaaggtgtggggatcggcaaagattgcgcccaggatcacgcctgccccgtcccaccccaaggtcatgcttcctctgcggctgaccaggctggggtgccggagagaggtagaaagcgggcccatgaaggcccgggggctggcgaggcggcgtccgcgggccgaggggatgtggccctgagtcagtcccgggctctgctctggcgcggcctcggctgggacacgggacgtggtcggctggcaccaggcctggccatgtcacgagacgcagcctccgggtccgtgcacctggacatacaggtggacagggccgaggagggctgggtctgcgacgttctgctggagcccgggccgcccaccgcccgggagggctgttctctgagcatggaccccggtctcgtgaccctgaaagatgcctggacgctattccccctccacccggagcacgacgccgttgttccacccaaggaggaaatacatgtgatggcacagggccatctccagggcggcacgccctctctctgggggtttacattccaggaggcggcgtgcgaccaatgggtgctgcgcccgcgcgtgtggaccgcccactcgcccataaaaatgacagtctacaactgcgggcacaaaccgctgcacatcggccccagcaccagacttggacttgcgctcttctggccggccgagcgaagtgacaacctagacgccgggcggatattctaccagctaacgagcggagagttgtattggggccgcaccgtcgcccgccccccgactctcaccttgcccgtcgacgagctccggccatggccgaagcttaccccggaggagcccatgcagcactag

SEQ ID NO: 14268 - DNA, 1410 bp, unidentified
  misc_feature 1..1410: note = Synthetic
  source 1..1410: mol_type = other DNA
atggccctgcaaactgacacacaggcctggcgggtggagatagggaccagaggactaatgttctctaactgtgtcccactccacctgccggagggacagtaccacaagctccggctgcccgtctcggcctacgaggccctggccgtggccaggtacgggctggtgggctccctctgggaggtgcccgccgtgaactctgcccttcagtgtctggcggctgctgcgccctgtaaagatgtaaagatctaccccagctgcatcttccaggtgcacgctcccatgtttgtaactataaagacaagcctgcgttgcctaaatcctcatgacctgtgtctgtgtctcatttgtgtaggtgcggctatcctagatatacccctcctatgcgccccccgtgacggagctggggcacgggccgccgaggggcaggctgcggccgcccaggggggcaaattgcgtgtctggggccgcctgagcccatcctcgcccacatcgctctccctggcttttccctatgcgggcccgccccccgtggcgtggtaccgacattctatcaacctaacaaggagtgaaggtgtggggatcggcaaagattgcgcccaggatcacgcctgccccgtcccaccccaaggtcatgcttcctctgcggctgaccaggctggggtgccggagagaggtagaaagcgggcccatgaaggcccgggggctggcgaggcggcgtccgcgggccgaggggatgtggccctgagtcagtcccgggctctgctctggcgtggcctcggctgggacacgggacgtggtcggctggcaccaggcctggccatgtcacgagacgcagcctccgggtccgtgcacctggacatacaggtggacagggccgaggagggctgggtctgcgacgttctgctggagcccgggccgcccaccgcccgggagggctgttttctaagcatggaccccggtctcgtgaccctgaaagatgcctggacgctattccccctccacccggagcacgacgccgtcgttccacccaaggaggaaatacatgtgatggcacagggccatctccagggcggcacgccctctctctgggggtttacattccaggaggcggcgtgcgaccaatgggtgctgcgcccgcgcgtgtggaccgcccactcgcccataaaaatgacagtctacaactgcgggcacaaaccgctgcacatcggccccagcaccagacttggacttgcgctcttctggccggccgagcgaagtgacaacctagacgccgggcggatattctaccagctaacgagcggagagttgtattggggccgcaccgtcgcccgccccccaactctcaccttgcccgtcgacgagctccggccatggccgaagcttaccccggaggagcccatgcagcactag

SEQ ID NO: 14269 - DNA, 1833 bp, unidentified
  misc_feature 1..1833: note = Synthetic
  source 1..1833: mol_type = other DNA
atggctaccttctatgaagtcattgttcgcgttccatttgatgtggaagagcacctgcctggaatttctgacaactttgtagactgggtaactggtcaaatttgggagctgcctcccgagtcagatttgaatttgactctgattgagcagcctcagctgacggtggctgacagaattcgccgcgtgttcctgtacgagtggaacaaattttccaagcaggagagcaaattctttgtgcagtttgaaaagggatctgaatattttcatctgcacacgctcgtggagacctccggcatctcttctatggtccttggccgctacgtgagtcagattcgcgcccagctggtgaaggtggtgttccagaacattgagccgcggattaacgactgggtcgccatcaccaaggtaaagaagggcggagccaataaggtggtggattctgggtatattcccgcctacctgctgccgaaggtccaaccagagcttcagtgggcgtggactaacctcgaagagtataaattggccgccctcaatctggaggagcgcaaacggctcgtcgctcagtttcagcttgagtcctcgcagcgctcgcaagaggcatcttcccagagggacgtttcggctgacccggtcatcaagagcaagacttcccagaaatacatggcgctggtaagctggctggtggaacatggcatcacttccgagaagcagtggattcaggagaatcaggagagctacctgtccttcaactccacgggaaactctcggagccagattaaagccgcgcttgacaacgcgtcaaaaattatgagtctgaccaaatctgcctcagactatctcgtgggacagactgttccagaggacatttctgaaaacagaatctggcagatttttgatctcaacggctacgacccggcatacgcgggctctgttctctacggctggtgcactcgcgcctttggaaagaggaacaccgtctggctgtatggacccgcgaccaccggaaagaccaacatcgcggaagccatctctcacaccgtgcccttttatggctgtgtgaactggactaatgagaactttccctttaatgactgtgtggaaaaaatgttgatctggtgggaggagggaaagatgaccagcaaggtggtggaacccgccaaggccatcttgggggggtctagagtacgagtggatcaaaaatgtaaatcctctgtacaagtagactctaccccggtgattatcacctccaatactaacatgtgtgtggtggtggatgggaactccacgacctttgaacaccagcagccgctggaagaccgcatgttcagatttgaactcatgcggcggctcccgccagattttggcaagattaccaagcaggaagtcaaagacttttttgcttgggcaaaggtcaaccaggtgccggtgactcacgagtttatggttcccaagaaagtggcgggaactgagagggcggagacttctagaaaacgcccactggatgacgtcaccaataccaactataaaagtccggagaagcgggcccggctctcagttgttcctgagacgcctcgcagttcagacgtgcctgtagagcccgctcctctgcgacctctcaactggtcttccaggtatgaatgcagatgtgactatcatgctaaatttgactctgtaacgggggaatgtgacgagtgtgaatatttgaatcggggcaaaaatggctgtatctttcataatgctacacattgtcaaatttgtcacgctgttcctccatgggaaaaggaaaatgtgtcagattttaatgattttgatgactgtaataaagagcagtaa

SEQ ID NO: 14270 - DNA, 162 bp, unidentified
  misc_feature 1..162: note = Synthetic
  source 1..162: mol_type = other DNA
aggggtattaatatcagggtatcaaataataaaatgttaactataactagttttcgacgattcgtcaataaacttaaaatgtacaaaactactaaatgtgcttctcaattggataatctatgtactgagataaacaaaatggatattatagacaaaaaatga

SEQ ID NO: 14271 - DNA, 1731 bp, unidentified
  source 1..1731: mol_type = other DNA
  misc_feature 1..1731: note = Synthetic
atggaagagaccaaagttaagacatcagagtactgggccaggagtcctcaaattcacgcaacaaatcatcctaacgtacagaacagagagaagatcaaagaaatattaacaattttaatatcatttatttcttccctatctcttgtactggttatagctgtattgataatgcaatctttacataacggcacaatactaagatgtaaagatgtaggcctagaatctatcaataaatcaacttactctatatctaatgcaattctggacgtcatcaaacaagagctgataactcgtataataaatactcaaagttctgtgcaggtagctctcccaatcttgattaacaagaaaatccaggatctctcactaataattgagaaaagttcaaaagtgcatcaaaattctcctacttgtagtggtgtggctgccctgacacatgtggaagggataaaacctttagatccagacgattactggaggtgtccaagtggggaaccatatctggaggatgaattgacattaagccttatccctggacctagtatgttggctggaacctctaccattgatggctgtgtaagattaccatcccttgcaataggaaaatcgctatatgcctatagttccaacctgataactaagggttgtcaagacatagggaaatcctatcaagtgctacagttaggtattataactctaaactcagacctacatcctgatttaaatcctataatatcacatacttatgatataaatgataatagaaagtcttgttctgttgctgtatcagaaactaaaggataccaattatgctcgatgccacgtgtcaacgaaaaaacagattacactagtgatggtatagaagatatagtttttgatgtacttgatctcaaaggatcctctagaagtttcaaattttcaaacaatgatataaactttgatcatcctttctcagcgttataccctagtgtaggaagtggtattatatggaaaaatgaactatatttcttaggttatggggctcttacaactgcacttcaagggaatacaaaatgtaatttaatgggatgtccgggagcaacacaagacaactgcaacaagttcatctctagttcatggttatacagcaaacagatggttaatgtactgatacaggttaaggggtatttatctagcaagccaagtattatagttagaacaatcccaataacggaaaattatgtaggagcagaagggaaactagtgggaacacgtgagagaatatatatatatacaagatcaacgggttggcataccaatttacaaataggagtacttaatataaatcatccaataaccataacttggacagatcacagagtgctatcaagaccaggaagaagtccttgtgcctggaataacaaatgccctagaaattgtactactggtgtatacacagatgcttatcctatatcgcctgatgctaattatgttgctacagttactctattatctaattcaacacgaaataatcctactattatgtattcatcttctgatagagtatataatatgttaagattaagaaatactgaattagaagctgcatacacaaccacgtcgtgtattgtacactttgatagaggttattgttttcatattatagaaattaatcaaaaagaactgaatacactacagcctatgctctttaagactgcaatacctaaagcctgcagaataagcaatttataa

SEQ ID NO: 14272 - DNA, 45 bp, unidentified; identical to SEQ ID NO: 6740
  source 1..45: mol_type = other DNA
  misc_feature 1..45: note = Synthetic

SEQ ID NO: 14273 - DNA, 3738 bp, unidentified
  misc_feature 1..3738: note = Synthetic
  source 1..3738: mol_type = other DNA
atgaatagaggattctttaacatgctcggccgccgccccttcccggcccccactgccatgtggaggccgcggagaaggaggcaggcggccccgatgcctgcccgcaacgggctggcttctcaaatccagcaactgaccacagccgtcagtgccctagtcattggacaggcaactagacctcaacccccacgtccacgcccgccaccgcgccagaagaagcaggcgcccaagcaaccaccgaagccgaagaaaccaaaaacgcaggagaagaagaagaagcaacctgcaaaacccaaacccggaaagagacagcgcatggcacttaagttggaggccgacagattgttcgacgtcaagaacgaggacggagatgtcatcgggcacgcactggccatggaaggaaaggtaatgaaacctctgcacgtgaaaggaaccatcgaccaccctgtgctatcaaagctcaaatttaccaagtcgtcagcatacgacatggagttcgcacagttgccagtcaacatgagaagtgaggcattcacctacaccagtgaacaccccgaaggattctataactggcaccacggagcggtgcagtatagtggaggtagatttaccatccctcgcggagtaggaggcagaggagacagcggtcgtccgatcatggataactccggtcgggttgtcgcgatagtcctcggtggcgctgatgaaggaacacgaactgccctttcggtcgtcacctggaatagtaaagggaagacaattaagacgaccccggaagggacagaagagtggtccgcagcaccactggtcacggcaatgtgtttgctcggaaatgtgagcttcccatgcgaccgcccgcccacatgctatacccgcgaaccttccagagccctcgacatccttgaagagaacgtgaaccatgaggcctacgataccctgctcaatgccatattgcggtgcggatcgtctggcagaagcaaaagaagcgtcattgacgactttaccctgaccagcccctacttgggcacatgctcgtactgccaccatactgtaccgtgcttcagccctgttaagatcgagcaggtctgggacgaagcggacgataacaccatacgcatacagacttccgcccagtttggatacgaccaaagcggagcagcaagcgcaaacaagtaccgctacatgtcgcttaagcaggatcacaccgttaaagaaggcaccatggatgacatcaagattagcacctcaggaccgtgtagaaggcttagctacaaaggatactttctcctcgcaaaatgccctccaggggacagcgtaacggttagcatagtgagtagcaactcagcaacgtcatgtacactggcccgcaagataaaaccaaaattcgtgggacgggaaaaatatgatctacctcccgttcacggtaaaaaaattccttgcacagtgtacgaccgtctgaaagaaacaactgcaggctacatcactatgcacaggccgagaccgcacgcttatacatcctacctggaagaatcatcagggaaagtttacgcaaagccgccatctgggaagaacattacgtatgagtgcaagtgcggcgactacaagaccggaaccgtttcgacccgcaccgaaatcactggttgcaccgccatcaagcagtgcgtcgcctataagagcgaccaaacgaagtgggtcttcaactcaccggacttgatcagacatgacgaccacacggcccaagggaaattgcatttgcctttcaagttgatcccgagtacctgcatggtccctgttgcccacgcgccgaatgtaatacatggctttaaacacatcagcctccaattagatacagaccacttgacattgctcaccaccaggagactaggggcaaacccggaaccaaccactgaatggatcgtcggaaagacggtcagaaacttcaccgtcgaccgagatggcctggaatacatatggggaaatcatgagccagtgagggtctatgcccaagagtcagcaccaggagaccctcacggatggccacacgaaatagtacagcattactaccatcgccatcctgtgtacaccatcttagccgtcgcatcagctaccgtggcgatgatgattggcgtaactgttgcagtgttatgtgcctgtaaagcgcgccgtgagtgcctgacgccatacgccctggccccaaacgccgtaatcccaacttcgctggcactcttgtgctgcgttaggtcggccaatgctgaaacgttcaccgagaccatgagttacttgtggtcgaacagtcagccgttcttctgggtccagttgtgcatacctttggccgctttcatcgttctaatgcgctgctgctcctgctgcctgccttttttagtggttgccggcgcctacctggcgaaggtagacgcctacgaacatgcgaccactgttccaaatgtgccacagataccgtataaggcacttgttgaaagggcagggtatgccccgctcaatttggagatcactgtcatgtcctcggaggttttgccttccaccaaccaagagtacattacctgcaaattcaccactgtggtcccctccccaaaaatcaaatgctgcggctccttggaatgtcagccggccgctcatgcagactatacctgcaaggtcttcggaggggtctacccctttatgtggggaggagcgcaatgtttttgcgacagtgagaacagccagatgagtgaggcgtacgtcgaattgtcagcagattgcgcgtctgaccacgcgcaggcgattaaggtgcacactgccgcgatgaaagtaggactgcgtattgtgtacgggaacactaccagtttcctagatgtgtacgtgaacggagtcacaccaggaacgtctaaagacttgaaagtcatagctggaccaatttcagcatcgtttacgccattcgatcataaggtcgttatccatcgcggcctggtgtacaactatgacttcccggaatatggagcgatgaaaccaggagcgtttggagacattcaagctacctccttgactagcaaggatctcatcgccagcacagacattaggctactcaagccttccgccaagaacgtgcatgtcccgtacacgcaggcctcatcaggatttgagatgtggaaaaacaactcaggccgcccactgcaggaaaccgcacctttcgggtgtaagattgcagtaaatccgctccgagcggtggactgttcatacgggaacattcccatttctattgacatcccgaacgctgcctttatcaggacatcagatgcaccactggtctcaacagtcaaatgtgaagtcagtgagtgcacttattcagcagacttcggcgggatggccaccctgcagtatgtatccgaccgcgaaggtcaatgccccgtacattcgcattcgagcacagcaactctccaagagtcgacagtacatgtcctggagaaaggagcggtgacagtacactttagcaccgcgagtccacaggcgaactttatcgtatcgctgtgtgggaagaagacaacatgcaatgcagaatgtaaaccaccagctgaccatatcgtgagcaccccgcacaaaaatgaccaagaatttcaagccgccatctcaaaaacatcatggagttggctgtttgcccttttcggcggcgcctcgtcgctattaattataggacttatgatttttgcttgcagcatgatgctgactagcacacgaagatga

SEQ ID NO: 14274 - DNA, 2466 bp, unidentified
  misc_feature 1..2466: note = Synthetic
  source 1..2466: mol_type = other DNA
atgaatagaggattctttaacatgctcggccgccgccccttcccggcccccactgccatgtggaggccgcggagaaggaggcaggcggccccgatgcctgcccgcaacgggctggcttctcaaatccagcaactgaccacagccgtcagtgccctagtcattggacaggcaactagacctcaacccccacgtccacgcccgccaccgcgccagaagaagcaggcgcccaagcaaccaccgaagccgaagaaaccaaaaacgcaggagaagaagaagaagcaacctgcaaaacccaaacccggaaagagacagcgcatggcacttaagttggaggccgacagattgttcgacgtcaagaacgaggacggagatgtcatcgggcacgcactggccatggaaggaaaggtaatgaaacctctgcacgtgaaaggaaccatcgaccaccctgtgctatcaaagctcaaatttaccaagtcgtcagcatacgacatggagttcgcacagttgccagtcaacatgagaagtgaggcattcacctacaccagtgaacaccccgaaggattctataactggcaccacggagcggtgcagtatagtggaggtagatttaccatccctcgcggagtaggaggcagaggagacagcggtcgtccgatcatggataactccggtcgggttgtcgcgatagtcctcggtggcgctgatgaaggaacacgaactgccctttcggtcgtcacctggaatagtaaagggaagacaattaagacgaccccggaagggacagaagagtggtccgcagcaccactggtcacggcaatgtgtttgctcggaaatgtgagcttcccatgcgaccgcccgcccacatgctatacccgcgaaccttccagagccctcgacatccttgaagagaacgtgaaccatgaggcctacgataccctgctcaatgccatattgcggtgcggatcgtctggcagaagcaaaagaagcgtcattgacgactttaccctgaccagcccctacttgggcacatgctcgtactgccaccatactgtaccgtgcttcagccctgttaagatcgagcaggtctgggacgaagcggacgataacaccatacgcatacagacttccgcccagtttggatacgaccaaagcggagcagcaagcgcaaacaagtaccgctacatgtcgcttaagcaggatcacaccgttaaagaaggcaccatggatgacatcaagattagcacctcaggaccgtgtagaaggcttagctacaaaggatactttctcctcgcaaaatgccctccaggggacagcgtaacggttagcatagtgagtagcaactcagcaacgtcatgtacactggcccgcaagataaaaccaaaattcgtgggacgggaaaaatatgatctacctcccgttcacggtaaaaaaattccttgcacagtgtacgaccgtctgaaagaaacaactgcaggctacatcactatgcacaggccgagaccgcacgcttatacatcctacctggaagaatcatcagggaaagtttacgcaaagccgccatctgggaagaacattacgtatgagtgcaagtgcggcgactacaagaccggaaccgtttcgacccgcaccgaaatcactggttgcaccgccatcaagcagtgcgtcgcctataagagcgaccaaacgaagtgggtcttcaactcaccggacttgatcagacatgacgaccacacggcccaagggaaattgcatttgcctttcaagttgatcccgagtacctgcatggtccctgttgcccacgcgccgaatgtaatacatggctttaaacacatcagcctccaattagatacagaccacttgacattgctcaccaccaggagactaggggcaaacccggaaccaaccactgaatggatcgtcggaaagacggtcagaaacttcaccgtcgaccgagatggcctggaatacatatggggaaatcatgagccagtgagggtctatgcccaagagtcagcaccaggagaccctcacggatggccacacgaaatagtacagcattactaccatcgccatcctgtgtacaccatcttagccgtcgcatcagctaccgtggcgatgatgattggcgtaactgttgcagtgttatgtgcctgtaaagcgcgccgtgagtgcctgacgccatacgccctggccccaaacgccgtaatcccaacttcgctggcactcttgtgctgcgttaggtcggccaatgctgaaacgttcaccgagaccatgagttacttgtggtcgaacagtcagccgttcttctgggtccagttgtgcatacctttggccgctttcatcgttctaatgcgctgctgctcctgctgcctgccttttttaagtggttgccggcgcctacctggcgaaggtagacgcctacgaacatgcgaccactgttccaaatgtgccacagataccgtataa

SEQ ID NO: 14275 - DNA, 144 bp, unidentified; identical to SEQ ID NO: 6744
  misc_feature 1..144: note = Synthetic
  source 1..144: mol_type = other DNA

SEQ ID NO: 14276 - DNA, 57 bp, unidentified; identical to SEQ ID NO: 282
  source 1..57: mol_type = other DNA
  misc_feature 1..57: note = Synthetic

SEQ ID NO: 14277 - DNA, 57 bp, unidentified; identical to SEQ ID NO: 282
  source 1..57: mol_type = other DNA
  misc_feature 1..57: note = Synthetic

SEQ ID NO: 14278 - DNA, 642 bp, unidentified; identical to SEQ ID NO: 10087
  source 1..642: mol_type = other DNA
  misc_feature 1..642: note = Synthetic

SEQ ID NO: 14279 - DNA, 642 bp, unidentified; identical to SEQ ID NO: 10087
  source 1..642: mol_type = other DNA
  misc_feature 1..642: note = Synthetic

SEQ ID NO: 14280 - DNA, 162 bp, unidentified; identical to SEQ ID NO: 6747
  source 1..162: mol_type = other DNA
  misc_feature 1..162: note = Synthetic

SEQ ID NO: 14281 - DNA, 162 bp, unidentified; identical to SEQ ID NO: 6747
  misc_feature 1..162: note = Synthetic
  source 1..162: mol_type = other DNA

SEQ ID NO: 14282 - DNA, 15 bp, unidentified
  misc_feature 1..15: note = Synthetic
  source 1..15: mol_type = other DNA
atggttgattattaa

SEQ ID NO: 14283 - DNA, 123 bp, unidentified
  source 1..123: mol_type = other DNA
  misc_feature 1..123: note = Synthetic
acgccgccgtctatgcgtccagtacacagctcgcgcgggcgttatatggaggggatctggtttcgtggattaaacacacccacccgggaattagcctggaactgcaattggatgttccagtaa

SEQ ID NO: 14284 - DNA, 1638 bp, unidentified
  misc_feature 1..1638: note = Synthetic
  source 1..1638: mol_type = other DNA
atggctcgcggggccgggttggtgttttttgttggagtttgggtcgtatcgtgcctggcggcagcacccagaacgtcctggaaacgggtaacctcgggcgaggacgtggtgttgcttccggcgcccgcggaacgcacccgggcccacaaactactgtgggccgcggaacccctggatgcctgcggtcccctgcgcccgtcgtgggtggcgctgtggcccccccgacgggtgctcgagacggtcgtggatgcggcgtgcatgcgcgccccggaaccgctcgccatagcatacagtcccccgttccccgcgggcgacgagggactgtattcggagttggcgtggcgcgatcgcgtagccgtggtcaacgagagtctggtcatctacggggccctggagacggacagcggtctgtacaccctgtccgtggtcggcctaagcgacgaggcgcgccaagtggcgtcggtggttctggtcgtggagcccgcccctgtgccgaccccgacccccgacgactacgacgaagaagacgacgcgggcgtgagcgaacgcacgccggtcagcgttccccccccaacccccccccgtcgtccccccgtcgcccccccgacgcaccctcgtgttatccccgaggtgtcccacgtgcgcggggtaacggtccatatggagaccccggaggccattctgtttgcccccggggagacgtttgggacgaacgtctccatccacgccattgcccacgacgacggtccgtacgccatggacgtcgtctggatgcggtttgacgtgccgtcctcgtgcgccgagatgcggatctacgaagcttgtctgtatcacccgcagcttccagagtgtctatctccggccgacgcgccgtgcgccgtaagttcctgggcgtaccgcctggcggtccgcagctacgccggctgttccaggactacgcccccgccgcgatgttttgccgaggctcgcatggaaccggtcccggggttggcgtggctggcctccaccgtcaatctggaattccagcacgcctccccccagcacgccggcctctacctgtgcgtggtgtacgtggacgatcatatccacgcctggggccacatgaccatcagcaccgcggcgcagtaccggaacgcggtggtggaacagcacctcccccagcgccagcccgagcccgtcgagcccacccgcccgcacgtgagagccccccatcccgcgccctccgcgcgcggcccgctgcgcctcggggcggtgctgggggcggccctgttgctggccgccctcgggctgtccgcgtgggcgtgcatgacctgctggcgcaggcgctcctggcgggcggttaaaagccgggcctcggcgacgggccccacttacattcgcgtggcggacagcgagctgtacgcggactggagttcggacagcgagggggagcgcgacgggtccctgtggcaggaccctccggagagacccgactctccctccacaaatggatccggctttgagatcttatcaccaacggctccgtctgtatacccccatagcgaggggcgtaaatctcgccgcccgctcaccacctttggttcgggaagcccgggccgtcgtcactcccaggcctcctatccgtccgtcctctggtaa

SEQ ID NO: 14285 - DNA, 51 bp, unidentified; identical to SEQ ID NO: 1052
  source 1..51: mol_type = other DNA
  misc_feature 1..51: note = Synthetic

SEQ ID NO: 14286 - DNA, 1398 bp, unidentified
  misc_feature 1..1398: note = Synthetic
  source 1..1398: mol_type = other DNA
atgtcgtcggtgttcactgactacgctaagctgcaagatgcccttgtggccccttcaaaaaggaaggtggatagtgcaccaagcggattgttaagggttgggatccctgtgtgtgtcctactctccgaggatcctgaagaacgatggagctttgtttgcttttgcatgaggtgggtggtgagcgattcagccacagaggcaatgcgtgttggtgcaatgctatctatcctcagcgcacacgccagcaacatgcggagccatgtcgcacttgcagcaagatgtggcgacgccgacatcaacatacttgaggttgaggcaattgaccaccaaaaccagaccattcgtttcactgggcgcagcaatgtgactgacgggagagcacgccagatgtatgcgattgcccaagatctgcctccctcctataacaatggtagcccttttgtaaatagagacattgaggacaattatccgaccgacatgtctgagctgctcaacatggtttacagtgttgcaactcaaatctgggtggcagctatgaagagcatgactgctccagacacatcctcagagtctgaagggaggcggttggccaaatacatccagcaaaacagagtgatccggagtacgattttagctcctgcaactcgcggtgaatgcacccggataatacggagctccctagtcatccgccactttctaataactgagatcaagcgtgccacatcaatgggttccaacacgacgagatattatgccacagttggggatgctgcagcttacttcaagaacgcgggtatggctgcattcttcttaactctgcggtttggaattgggaccaagtactccacacttgcagtttcagcgctgtccgccgacatgaagaaactccagagcttgatccgagtataccagagcaaaggtgaggatggaccctatatggcatttctggaagactccgaccttatgagcttcgcccctggaaactatccactcatgtattcatatgcaatgggagtagggtccattcttgaggcaagtattgctcgatatcagtttgctcgatcattcatgaatgacacgttctatcgattgggtgttgaaactgcacaacgaaaccaaggttcacttgatgagaatctagcgaaggagctgcaactatctggggccgaacggagggcagtgcaggaacttgtgaccagcctggacctagctggagaggccccagtgccccagcgtcaaccaacattcctcaatgaccaggagtatgaggatgatccccccgccaggagacagagaattgaggatactccagacgatgacggagccagtcaagctccacccacaccaggagcaggtctcaccccatactctgataatgccagtggcctggacatctaa

SEQ ID NO: 14287 - DNA, 4158 bp, unidentified
  source 1..4158: mol_type = other DNA
  misc_feature 1..4158: note = Synthetic
atcgctagagacagccgatctccacgcgaccccatggccgctcccaaccgcgaccctccgggataccggtatgccgcggccatggtgccgaccgggtccctccttagcacgatcgaggtggcgtcgcatcgacgcctgtttgattttttttcccgcgtgcgctccgatgcaaacagcctgtacgacgtcgagttcgacgccctgctggggtcgtattgcaacaccctgtcgctcgtgcgctttctggagctcgggttgtcggtggcgtgcgtgtgtaccaagtttccggagctggcctacatgaacgaggggcgcgtacagttcgaggtccaccagccgctgattgcccgcgacggcccgcaccccatcgagcaacccacacacaattacatgaccaagattatcgaccgccgggccctgaacgccgccttcagcctggccaccgaggccatcgccctgctcacgggggaggccctggacgggacgggtatcggcgcgcatcgccagttgcgcgccatccaacagctcgctcgcaacgtccaggccgtcctcggggcgtttgagcgcggcacggccgaccagatgctgcacgtgctgctggaaaaggcgccgcccctggctttgttgttgccgatgcaacgatacctggacaacggccgcctggccaccagggtggcccgggcgaccctggtcgccgagctaaagcgaagcttctgcgagacgagctttttcctgggcaaggcgggccaccgccgggaggccgtcgaggcctggctcgtggacctcaccacggccacgcagccctccgtggccgtgccccgtctgacgcatgccgacacgcgcgggcggccggtcgacggggtgctcgtcaccaccgccccgatcaaacagcgcctcctgcagtccttcctgaaagtggaggacaccgaagccgacgtgccggtgacgtacggcgagatggtcctgaacggggccaacctggtcacggcgctcgtgatgggcaaggccgtgcgaagtctggacgacgtgggccgccacctgctggagatgcaggaggagcagctcgacctgaaccggcagacgctggacgagctcgagagcgccccccagacgacgcgcgtgcgcgcggatctggtgtccatcggcgagaagctggtctttctggaggccctggagaagcgcatctacgccgccaccaacgttccctaccccctggtgggcgccatggacctgacgttcgtcctgcccctgggcctgttcaatccggtcatggaacggtttgccgcgcacgccggggacctagtccccgcccccggccacccggatccccgcgccttcccgccccgccagctgtttttttgggggaaggaccgccaggtgctgcgcctgtctctggaacacgcgatcgggaccgtgtgccacccttcgctgatgaacgttgacgcggcggtcgggggccttaaccgcgaccccgtcgaagccgccaatccgtacggggcgtacgtggcggccccggccggccccgccgcagacatgcagcagctgtttttgaacgcctgggggcagcgcctggcccacgggcgggtccgatgggtcgcggaaggccagatgaccccggagcagtttatgcagcccgacaacgccaacctggctcttgagctgcaccccgcgttcgacttctttgtgggggtggccgacgtggagctgccggggggggacgttcccccggccggcccgggggagatccaggccacctggcgcgtggtgaacggcaacttgcccctggcgctatgtccggcggcgttccgggacgcccggggcctggagctgggggtgggacgccacgccatggcccccgccaccatcgccgccgttcgcggggcgttcgacgaccgcaactacccggcggtgttttacctgctgcaggccgccatacacggcagcgagcacgtcttctgcgccctggcccggctcgtggtccagtgcatcaccagctactggaacaacacgcggtgcgcggcgttcgtgaacgactactcgctggtctcgtacgtcgtgacctacctcgggggagaccttcccgaggagtgcatggccgtgtaccgggacctggtggcgcacgtcgaggccctggcccagctggttgatgactttaccctgaccggcccggagctgggcgggcaggcgcaagccgagctgaatcacctaatgcgagacccggcgctgctgccacccctcgtgtgggactgtgacgccctgatgcggcgcgcggccctggaccgccatcgcgactgccgggttagcgcggggggccacgaccccgtgtacgcggcggcatgtaacgtggcgaccgcggacttcaaccgcaacgacggccagctgctgcacaacacccaggcccgagccgcggacgccgcggatgaccggccgcaccggggggcggactggaccgtgcaccacaagatttactactacgtgatggtgcccgccttctcgcggggccgctgctgcaccgcgggggttcgcttcgaccgcgtatacgccaccctgcagaacatggtggtcccggagatcgcccccggcgaggagtgccccagcgaccccgtgacggaccccgcgcaccccctgcacccggccaatctggtggccaacacggtcaacgccatgtttcacaacgggcgcgtggtagtggacgggcccgccatgctcacgctgcaggtgctggcccacaacatggccgaacgcacaacggcgctgctctgctcggcggcgcccgacgcgggcgccaacaccgcgtccaccaccaacatgcgcatattcgacggggcgttgcacgccggaatcctgctgatggccccccagcatctggaccataccatccaaaatggcgactatttttaccccctccccgtccacgcgctgttcgccggggccgaccacgtggcgaacgcgcccaatttccccccggccctgcgcgacctgtcgcggcaggtccccctggtccccccggctctgggggccaactacttttcgtcgatccgacagcccgtcgtgcagcacgtccgcgagagcgcggccggggagaacgcgctgacctacgcgctcatggcggggtacttcaagatcagtcccgtggccttgcatcatcagctcaagacgggcctccatcccgggtttgggttcaccgtcgtccgacaggaccgctttgtgactgagaacgtgctgttctcggagcgcgcgtcggaggcgtacttcctgggccagctccaggtggcccggcacgaaactggcgggggggtaaacttcacgctcacccagccgcgcgggaacgtggacctgggcgtgggctacaccgccgtcgtggccacggcaaccgtccgcaaccccgtcaccgacatgggcaaccttccccaaaacttttacctgggccgcggggctccccctctcctggacaacgcggcagccgtgtacctgcggaacgcggtcgtggcgggaaaccgcctggggccggcccagcccgtccccgtgttcgggtgcgcccaggtgccgcggcgcgcagggatggaccacggccaggacgccgtgtgtgagtttatcgccacccccgtgtcgaccgacgtcaactacttccgccggccctgcaacccccggggacgcgccgccgggggcgtttacgcgggggacaaggagggggatgtcaccgccctcatgtacgaccacggccagagcgacccgtcccgggccttcgcggccacggccaacccgtgggcgtcgcagcgattttcgtacggggacctgctctataacggggcctaccacctcaacggggcctcgccggtgctcagcccctgctttaagttctttacgtcggccgacatcgccgccaaacatcgctgcctggagcgcctgatcgtggagacgggttcggcggtgtccacggccaccgccgccagcgacgtacagtttaagcgccccccggggtgccgcgaactcgtggaggacccgtgtggcctgtttcaggaggcctacccgctcacctgcgccagcgaccccgccctcctccgcagtgcccgcaacggggaagcccacgcgcgggagacccacttcgcgcagtatctcgtctatgacgcatccccgctcaagggactggctctgtaa

SEQ ID NO: 14288 - DNA, 6693 bp, unidentified; identical to SEQ ID NO: 13172
  source 1..6693: mol_type = other DNA
  misc_feature 1..6693: note = Synthetic

SEQ ID NO: 14289 - DNA, 45 bp, unidentified; identical to SEQ ID NO: 4965
  misc_feature 1..45: note = Synthetic
  source 1..45: mol_type = other DNA

SEQ ID NO: 14290 - DNA, 21 bp, unidentified
  misc_feature 1..21: note = Synthetic
  source 1..21: mol_type = other DNA
atgatcttgcagttggcctga

SEQ ID NO: 14291 - DNA, 1506 bp, unidentified
  source 1..1506: mol_type = other DNA
  misc_feature 1..1506: note = Synthetic
attgtaactgttttctgtttggacaacatcaaaaacatccattgcacaatggggcagttcattagcttcatgcaagaaataccaacctttttgcaggaggctctgaacattgctcttgttgcagtcagtctcattgccatcattaagggtatagtgaacttgtacaaaagtggtttattccaattctttgtattcctagcgcttgcaggaagatcctgcacagaagaagctttcaaaatcggactgcacactgagttccagactgtgtccttctcaatggtgggtctcttttccaacaatccacatgacctacctttgttgtgtaccttaaacaagagccatctttacattaaggggggcaatgcttcatttcagatcagctttgatgatattgcagtattgttgccacagtatgatgttataatacaacatccagcagatatgagctggtgttccaaaagtgatgatcaaatttggttgtctcagtggttcatgaatgctgtgggacatgattggcatctagacccaccatttctgtgtaggaaccgtacaaagacagaaggcttcatctttcaagtcaacacctccaagactggtgttaatgaaaattatgctaagaagtttaagactggcatgcatcatttatatagagaatatcctgactcttgcccgaatggcaaactgtgcttaatgaaggcacaacctaccagttggcctctccaatgtccactcgaccacgttaacacattacacttccttacaagaggtaaaaacattcaacttccaaggaggtccttgaaagcattcttctcctggtctttgacagactcatccggcaaggatacccctggaggctattgtctagaagagtggatgctcgtagcagccaaaatgaagtgttttggcaatactgctgtagcaaaatgcaatttgaatcatgactctgaattctgtgacatgttgaggctttttgattacaacaaaaatgctatcaaaaccctaaatgatgaaactaagaaacaagtaaatctgatggggcagacaatcaatgccctgatatctgacaatttattgatgaaaaacaaaattagggaactgatgagtgtcccttactgcaattacacaaaattttggtatgtcaaccacacactttcaggacaacactcattaccaaggtgctggttaataaaaaacaacagctatttgaacatctctgacttccgtaatgactggatattagaaagtgacttcttaatttctgaaatgctaagcaaagagtattcggacaggcagggtaaaactcctttgactttagttgacatctgtttttggagcacagtattcttcacagcgtcactcttccttcacttggtgggtatacccacccacagacacatcaggggcgaagcatgccctttgccacacaggttgaacagcttgggtggttgcagatgtggtaagtaccccaatctaaagaaaccaacagtttggcgtagaggacactaa

SEQ ID NO: 14292 - DNA, 27 bp, unidentified
  misc_feature 1..27: note = Synthetic
  source 1..27: mol_type = other DNA
atgaaaaataaatactattacgagtga

SEQ ID NO: 14293 - DNA, 72 bp, unidentified
  source 1..72: mol_type = other DNA
  misc_feature 1..72: note = Synthetic
acgagaaaacttaatttccgttgtatgatgacgctaagttttgttacgtcaactaaaatatataaggtttag

SEQ ID NO: 14294 - DNA, 18 bp, unidentified
  source 1..18: mol_type = other DNA
  misc_feature 1..18: note = Synthetic
ttggtaactacgtcgtag

SEQ ID NO: 14295 - DNA, 30 bp, unidentified; identical to SEQ ID NO: 6771
  source 1..30: mol_type = other DNA
  misc_feature 1..30: note = Synthetic

SEQ ID NO: 14296 - DNA, 1095 bp, unidentified
  source 1..1095: mol_type = other DNA
  misc_feature 1..1095: note = Synthetic
atgaaggtccaggggtccgtcgatcgccgccgtctgcaacgccgaatcgcggggctgctgccccctccggcccggcgtctaaatatttcccgggggtccgaattcacgcgggacgttcgtgggctggttgaggaacacgcgcaggcctcctcgctgagtgcggcggccgtctggcgcgcagggctgctggccccgggggaggtggcggtcgccgggggtggcagtggaggggggagcttcagctggtctgggtggcggccgccagtctttggggactttctgatacacgccagctccttcaacaacgccgaggccactggaacgccccttttccaattcaagcagagtgacccgttctcgggcgtcgacgcggtattcactcctctctccctgtttatcctaatgaatcacggccggggtgtagccgcccgggtcgaggcaggtgggggcctgacgcggatggccaacctgctgtacgacagccccgcaaccctggctgacctggtcccggactttgggcggctggtggccgaccgccgcttccacaacttcatcacccctgtgggccccctggtggagaatataaagagcacctatctgaataaaatcaccacggtggtccacgggcctgtggtcagcaaggccatccctcgcagcaccgtcaaggtgacggtgccccaggaggcctttgtggatctggacgcgtggctctccggcggcgccgggggtggcggtggagtatgcttcgtcggggggctgggcctgcagccgtgccccgccgatgcgcgcctctatgtcgctctgacctatgaggaagccgggccgcggtttacgtttttccagtcgtcccgcggccactgtcagatcatgaatatcttaagaatttattactcaccatccatcatgcaccgctatgctgtggtccagcccctacatatagaggagctaaccttcggggcggttgcctgtctggggacatttagtgctactgacggttggaggaggtctgccttcaattaccgtggctctagcctccccgtggtggagattgacagcttttattccaacgtctctgactgggaggtgattctctag

SEQ ID NO: 14297 - DNA, 69 bp, unidentified; identical to SEQ ID NO: 6772
  source 1..69: mol_type = other DNA
  misc_feature 1..69: note = Synthetic

SEQ ID NO: 14298 - DNA, 60 bp, unidentified
  source 1..60: mol_type = other DNA
  misc_feature 1..60: note = Synthetic
atgttatgggatctactgtggatggaagacccgtccaacccgccaattcttcaacgctga

SEQ ID NO: 14299 - DNA, 318 bp, unidentified
  source 1..318: mol_type = other DNA
  misc_feature 1..318: note = Synthetic
atattggggtttaatgataaaatccaggttatggatatgaggaaactgaatacctcgcagggtcgaaatcttaccacagttgatgatagaagacggttttccatcgggtgggaaacatgggatgacggtggagagtctctatacgatgtgactaataatggtacaacggtcatcaatacaacagcctgtgtttcaagttgttcgcatacgtcgcttgtgctttgcaatatgacgcagcagactgattcgttgtacggagtgggtcatcggttgaatgacgaagaagatggtgaactgtggagagtttcggtttcttaa

SEQ ID NO: 14300 - DNA, 1176 bp, unidentified
  misc_feature 1..1176: note = Synthetic
  source 1..1176: mol_type = other DNA
atggatctgatcgagacagtgaacgcatgcgtaaaattgcaaaagcgagtacttggtttggctccaaatacgaatctcaatacagctggacaaagcgtattaaatgattacaacgcactggcttctcgagtaaacgggaaaacgtatgcactgctgaatcagatagctgtttacactccttataccataaatgcgccaattatatctttggctgtacgaatctctaccgatgattacgatgatatgcgatctgggattgaatctatcttagacgttttagctgccgctattcgaactgaaggatcacgacctacacgagtaattgaaagacgtgttttagaaccaaatgtaaaacaattaattgacgatttacgtttgaaaagtctcatttctgatttatcaatagcaaatttagccgccgtcgacactgcaatgatacaacctgaagtgattgaaactgaaaatcctctttatgcagatataatcgaacaggtagttcatagaccgaatataggtatgactggtggaaatattagagctactcttggtaggtggtcaggtaataaaggggttgtaacctgtatgtcaggtatggattctgaacatagatttacagtggaactcaaaacacgcacttgtggaataattaacatcgtctacattcccacatctggaaccatactaattccgatgcccaccggtaggaatagagaaggtgatttgatagacgtgtcagctgaaatgatggcagatgattttgctatagattttatggatgatgataacattattcagactgaaactggagttggagtgtattcctttccaatgtgcaataggattagattcagaataaatccatggaataatcaaaaggatgatgacaatttagggacggtgcatatggttaattgggctcaagggactgctccgaagcagccagctatatctttcatgtttgaaactcgtcggacgttcacggaaggagattaccaacatctatcaagatgcgctcctaaagcacaatacatgatggacacgcagttcaatgacgtttcttttacaaatagaccagctgtagactggaacattcaaagtctactcacgtcaaatactcagcgagtgtggtgtcaaaaaatagcaatgcttatcgcctcgttcgctgctaagatctag

SEQ ID NO: 14301 - DNA, 798 bp, unidentified
  source 1..798: mol_type = other DNA
  misc_feature 1..798: note = Synthetic
atcacccgcctcatggacccgccgctgccgtcgctacattcgccgcaatgggcttccctcctgcagctgcaccacggccttatgtggctgcgccgttttgctgtcctcgtccgggtctacgccctagtggtctttcacatcgccatcagtacggctttctgcggaatgatttggctgggtatccccgattcccacaacatatgtcaacatgaatcttcccctctgctgctggtttttgccccctcccttctctggtgtttggtcttgatacagggcgaaaggcaccccgacgacgtggtattgaccatgggctacgtaggcctcctctccgttaccacggttttctacacctggtgctccgacctgcccgccatcctcatcgactacacactggtcctcacgctgtggatagcttgcaccggcgctgtcatggttggggacagttttcgcgctaagcgttgggagctcatatgctcacgggtgctcaccagcgtttttttcatcacgctctgggttatcggcgaccagaccgtgttccatcatcagcgtattctactctacggctacggcgccatcgtcttccttatgatgaccgtgactttctacggcacgcgttacatccgcgacgaactgccggctgctcagacgttacgcggctcgctgctgatctacgtaggactggtgaccatgtttaaaatcacgctgatcgtgctcagtcccaacctctggcgcctgccctggacgaccgtctttgccgccttcagatcctcgtattgcgaaggtggcggtggctcgtag

SEQ ID NO: 14302 - DNA, 144 bp, unidentified
  misc_feature 1..144: note = Synthetic
  source 1..144: mol_type = other DNA
atgactagctatatagccgctgtctggctttaccgccgtcgctccgcgtcgcttcgccgccaccttcttcttcctctcagtcatgaaccccgtggatcagccgccacctccaccgctaacccagcagccggaggagcaggctaa

SEQ ID NO: 14303 - DNA, 1614 bp, unidentified
  misc_feature 1..1614: note = Synthetic
  source 1..1614: mol_type = other DNA
atgacgtctaagcggctgggtacaaggttgaccggcttcctgagtcgaataggctcggggatttcgaaagcagtgagaagcgacacaacgaagcgagttttaagcgcggcggggcgagcggcggagcgcgccatatcatctgaggtcgggcaacgtgcgataactggtgcggtggaaggcatgatcacatccgcaacgacgggagaaagcctaggtgagtcggtcaagcgtgccgtaatcctgaacgttgcgggggtccaccagaccgtaccagacccgttgaacccggcggaaattgagactcaaacgaagctgcgcgagttggaactggctaacagacgggaggaggcgcagataaagcataataagatcatgatcgagcgggagagggacgcgttgaaggacgtgacgcagtttgcgaaaatccaagaacatatcgacgacgacgcgagcgccgagacgaaagacctggagaacgccctacgtgcggcaaagaccctcgtgaaagaagagcgtcatcagctagataaggttactaaagcgctgattcgggaagataggttgcgctcggcggacgagaggcgactcatcgaggggatgcgccacaattacaaggccctcgcaaagagcgtcgaggcggagaggaatgcgctgattgaggaggcggtcgaacagaccatcgacattggaggggagatagcggagcatgcgactgccgcgatccctttggtaggcgaggcggtggcgagcggaatggcgaccgcgcggggagcgatgcagatttatcgccttggtaagacgattcacgcgatcacgggactacacacgagccattgcgagattccggcgatccaccagggggcaattgagacgcttctcgtttcggatgcgcccacgagcgactcctctctagcacagatcacgagcacacgagcgcgccacttgaaggagatagagtccgagctcgatcatctgaacgcggaggtcgcacctgtggtgcggaagatgtgccaagacatctcagcgatcgcgccggaccacatgcggggcaagcaccggatagcccaaatgaacgccgctcacgagctcagagttcctctaaaacaccgccctatgatccacacctatacctccccctgggacagcgactacgtgctcatcctacacgtagtaggtccgtaccacaccgggcaggctttcgtgttctgtctcgacctcgcgctggacctgttccatttcgaggaagtccagagccccagccacccttttcatcaccgtcacacagcgataaggcggacgttcattcaggtgtgcaccgacttcttcatgtcctccgcccgccacccgggcgcgacgcgggtgcacagcacgcgcatggcttggagtgcggatgattcaccgctgcacatcggctcaatcccctacgaaacgtcctatggacagatgcttgataacgcgcgtagcttttcctccacaccgcagctccagcaggcgttacttcgtggcccaatctctatgcagcggcggacagtccttaacgccatcatgcatgggtcagtccttgtccaggcacgccggcggaacctgcccgcgcccgtgagacgtcggtgctag

SEQ ID NO: 14304 - DNA, 1074 bp, unidentified
  source 1..1074: mol_type = other DNA
  misc_feature 1..1074: note = Synthetic
atggacgcgtacacagccagagcgctttcggttttggagggcctagccatttcaggagatccacgctcacacagagacccgactacggaggcgacgatgtcgatcttcgcgatgaggttcaacagtacgacttcgcgcccagtgattggaacgccgacgacgagggaggcaagacgcaataacttctacgccgccgttgacgtggcattcgctaccctgaacatcacatcgaccttcgtgatgccgggctacatccagaatccgcagaccctagcgatcctagcgcgtgacgagatcccatacacgccgtccacgttccggagggtgcagcggattcgtatctgcacaaatgaccactcgaatgtgcgagaggagcggcatgcatactctcactacgaagcggtcacctccccaggcgttgtgctcccggcccctgccgggggcggccctcgttgctacgcaatttcggcgaccacccttcagatccatatcgacgcgatgcagaatgaagtcctaaccccgcttatcttcccagaccaggatgatgtcattatggcggaattcatctggcagcggcttgccaatggcatcgataacaatgcggtaataaacatggggacgaatgtggagctccttcgggacaacgcagctgtagagggagggacaccatttatggcaacgccaagggatcacgttgtgcttgcaagctacgagcccgtcaatctctgcactatccaccttacgtgcacgcgctactgggtcaccgcgccccccagggtggtatacgattcaatggaggcggacattctcgccgtttatacctacagagacgagttctgggacgcgctcaggagttacgtgctacaggcgctaggcatgccggcgcaccactatcccactcgcccggttaccgagttccggcagaatctcgcaatcgcaatactctcgcgcctcttcgacgtctactgtgccatggcgccagagatcaaccccccggtcgcggcccaaggcgttgtgggtgggctcgctcatagactgcaagccgctctgcgtgccttcaggttggggcgctag

SEQ ID NO: 14305 - DNA, 1098 bp, unidentified
  misc_feature 1..1098: note = Synthetic
  source 1..1098: mol_type = other DNA
attgctgcaaacgcaacgatgtctgccgacaagcaaattccgatgatccgaaagccctttacccgaacaatcgtcctcaagagtacggggaaagatgactacgtcgcgaaaatgtgcaacgcgttggggtgtgagtacttagttgtacgtcatggactcgggatgcacgtggctggcagcaatacccccacccatgggtgcatgctgctgctgattcccggagcggggtcgttccgtctaatcgatagggatcagtcgacgtttgtggtcgtttcgagtgacgggctggaggtgcagcaggaccggtggcctgggatgcgcttcgaagcggtcgatatgtttccaagatgctgtcgtatcgtggtgggtgatgtcgccgcagattcagagattagattcggaagcgcttcaggaacggtgccgccgtacacagctggggagagcatggaggctcaggacgagatctcgttgccgggattggatttcagcgtgccggattcggatcttcgtgaataccgcgaaaagctccgcgaggagaaagaggaacgcgcggctgcgatcctctcggcgttgcgcacaactcaacaatcgagaacgcttggtcgcctgcacggagtgaagacctccgacttggtaacgctgcgcccgccgcagccgccgacgcccggccgtaatggccactctgcgttgatgagctcagcgccagttccaccgccgctagtgccgacatcctcctcgacgggctcgccggccctttccaccacgggattgaagcgcactcagaagctagcgcccccccccgtcgcggagtcagcgggacccacgttcggggccgactccaaccgattcatcgaggaagcgctcgaggcggtcatgcaggatgacgcgtccggacggctgaactttggaggcgaacccgagtcagtgggtctgttctcgcagaatcttggcagctttgacatcccaccgagccagttgcccgcctacgaaatcgacgagacgcggaataagtacaaatacgtcgggatgcggacatccacgcgcctgcatgcgctcgcttgcgacgaccgcgtctacttcgttcccagcgctgaataa

SEQ ID NO: 14306 - DNA, 2727 bp, unidentified
  misc_feature 1..2727: note = Synthetic
  source 1..2727: mol_type = other DNA
atggcaaatccgcaaaatcgagtgcaaacagaaagacagcagagcaacagctcaccatatctaagaggcgatgaagtacacgacgaccctggaatcgcattgtctgtcttcgccctacaagagatcatccgaaaagtccgagagtcacagacttcactgcgcaatgaggggcgtgaggtcaaccccgcgccccccgagattgagcaaatcttttcggcgctgagcgacctgcgcgatgagagaccctatcgaatagaacggaggctacccacgtattacagattcgagtcgtctcaatcgcaggagcgtttcttccgagtggatagccacttcgaaaggatcgccgcaccagttgataacacgactctggaggagccagccaggctgatgtctttagtgcttgcgcgggtagacaccatacgcgaggccggatctttcctcctttacaacgcgcctacgcacttcattgatggacgtgaaataatcgacgccgacggcttaggcgttgacgtctccggtctgctccgccttgtcgagccgagagttcgtcacctgctgcagagacagatagaccagctgaccgtcctgaatcaggaccaggaggacaccatggtggatacctaccctggcgcatgccccgacgctgttttccgagtgcaccgcgctctcacagcccacgtggtgcatcaccagcgggatgattacagaaacgcgatgcaatggctgcaggcctacggagagtacaagcgtatagacttctcgcgatcgctgctcacagacgtattttcccctgacacggtttacattcagagttaccagctgcccgccaacccgcagctcctatgggaggtaccgcggtgcggaatcccaaatcttgtgttgaatgcggcgctcggcgtgccacaaggaacgtatattacgcccaacccaaggatcacgtcgatcacgatcgcttcgcgtgtcacaactaccacctcgtttgcgcagttgctcgggaccattcccaccgcggcccagatggatgacgtgcgaaagatctatctagcgttgatgttcccgaaccagatcctgctcgacattagatcggagcccggacatcaggttgatgttgtcgcgcagtccgtcgcaggggtcttgggtaagttgctcttctcttatggaccagcactgttcaacattaccccccacacggccagagctcttgaccgcgcctgcgcttcttttctgcaaatggcgacagacgacaggcgcaccatccgccatgggccctcagggcgacctctcgactttgtcatcacgcagggacagcgtgcgttcgactgcaaccagctcgcccagaaccccgctcggggcaacggttatgcgggctggggagttgacgccgtgggtgaccatccgactccgtacccgcatgtgagacgtcgtattcagtatctcggctatgtcccagaagatgtaatcgatgagaggttctgcggcgacgacctgcgctacccgcttcatgaaacgatgtgcgaggctctagcgatctcgggtcacgtaaacgagaggaactacgttgagatgatgcggcagcatcacgtcgtgagattcgcgcatctcagccaagttatcaatcgggacctcgtatccgccttttccctaccggatgagagattcaacatgctcgcggcgggcgtcccacgggatgccaccggaccggatggaccgctcgtgctcgacataagctacatggctatcatacacgcgttccgcctgcgctttctcccagtctccaggccagagcgtattgtctatcagcccatgctcgaatccgtctacgcctcccacctctcactggcaaaacttcacgcgaacaatttacagacgtttgtcacagcaaactcggagagcttcgtggaggcgcggcctctggacacttggagggccgtctatccccgcttgcccgagcccgtccgccaaatttttgacctcacaggtcagcattcgttcgtgacgggacgtgacatcggattatggctgcgctcacccctggtacaggattcgctcttcctgctgtgcgctcgaacggcttggcaggcagtggacgaccctgcggacatcggctttacgcgcgacgtctacattcaccgccagccagctccggaatacccgttggaggacgtgcgccaattccgacgagacgcggtctatttcacgaatatgctggaggcgcgaccagcaaacggcaatcgagtgatcctggaccgggtaatcatgcagcagcgagctggggcgggacgtctacggatgtctatccgcgaactactcgacgacggcttgtttgtgcaaatcggatcagccctgcgaccgattactctgagcattcatcacggactgccgccggaggagaccctgcgcgccttacccttcgaatatcgtcgcgagagtgcgaacggccctacggcacgtgtcacccttcagatgctccggcccgtttccgccttcttcatgctgtacaacgcggacgaacaggcgttccccgacgagatgatcgacctcgtccctaagatgtcactcgtgagcctatacgtacaacagccccccgtggagcgcgtcagttacgacacggcgctgagcgtcataaatcgcgactttgtttcgttccgatctcgcgtgcgcctgatggatttgtcagctgcattcgatgcggggagccagtatgctcttccctctaacgcgatgtag

SEQ ID NO: 14307 - DNA, 48 bp, unidentified; identical to SEQ ID NO: 6791
  misc_feature 1..48: note = Synthetic
  source 1..48: mol_type = other DNA

SEQ ID NO: 14308 - DNA, 153 bp, unidentified
  misc_feature 1..153: note = Synthetic
  source 1..153: mol_type = other DNA
atgaagtacacgacgaccctggaatcgcattgtctgtcttcgccctacaagagatcatccgaaaagtccgagagtcacagacttcactgcgcaatgaggggcgtgaggtcaaccccgcgccccccgagattgagcaaatcttttcggcgctga

SEQ ID NO: 14309 - DNA, 1347 bp, unidentified
  misc_feature 1..1347: note = Synthetic
  source 1..1347: mol_type = other DNA
atggagaccaaagggcgccaagcgacagaagttttcgaccagcaggatgagtctgaagcgcaccctggcaagcgcccaagcaggcgcacaccccttcactgtgacggaaacaaccctgactcgaacactgagaccctggaaggaccgaaccctggcagcgctggacgcccatcgtctcataccctattccaggagccgtccaaacccgcgaaacgaggaggtctgctggatcgagatgccatagaacacatcactgaactgtggaacagactagaacttttgcagcaaactctctccaaaatgcccatggctgacggtctgaaaccgctgaaaaacttttcctcactacaagaacttctatcactaggaggagagcgcctcctaatggatttggtgcgggaaaatatgcatgtaagggaaatgatgaacgaggtggcccccttgcttcgagaagacggcagttgccgttccctaaactaccacctgcaacccgtaatcggaatcatttatggccccaccggatgtggcaaatctcaattgctcagaaatttgctatcatcacaattaatcacccccgccccagaaacggtgtttttcatagccccccaggtggacatgattccaccctcggaactgaaagcttgggaaatgcaaatctgtgaggggaactatgctccggggcccgaaggaacattcataccccaatctggtactctccgccccaaattcattaaaatggcttatgatgatttaactcaggaacataactatgatgtgtcagacccacggaacgtgtttgcccgcgccgctgcccacggccccattgctattatcatggatgagtgcatggaaaatcttggaggacacaagggtgtctccaaatttttccacgcttttccatccaagctgcacgataaatttcctaaatgtaccggatacaccgtcttggtggtccttcataacatgaacccaagacgggatcttggcggcaatattgccaacttaaaaatccaatccaaaatgcacataatttcaccccgaatgcacccatcccagctcaaccggtttgtaaacacctacaccaagggcttatctgtggcaatcagcctacttctaaaagatattgtgcaacaccatgcactgcgaccttgttatgactgggtgatttacaacactaccccggagcatgaatcccttcaatggagctatctccaccccaaagacggcctaatgcccatgtatctaaacattcaatcccacctctataggatcctggaaaaaatccaccgagttctcaatgatagagatcggtggtctagggcataccgtgcgcgaaaaatgaaataa

SEQ ID NO: 14310 - DNA, 1908 bp, unidentified
  misc_feature 1..1908: note = Synthetic
  source 1..1908: mol_type = other DNA
atgttcgggccacacacggtgattctgctgcatcagtctttacggcgttataggaaggagctctatggaccaagttttcaaatacgacgcgattggacgttaaacgacctatggcgtgagaatggacgttacgctacagatgtgtacgctgagggtgatgtatcatggcttacaatcaggcaggtgcgtgcacacggcatcatcttcgtgggacccgcaggggcacggttcccgatgcgcgatgcagttctttcacccgatgtgataatacggagcgtcagagacgcgaaagatttggagacgcagattggacgcggacgcataaaactaaggcgtaccttcgggaacgcggttcgtaactacgcatgggcgcgagcgacctattttcatgggagcgaagtagaaacagtcacgcatggagatatccgcggaaagaagctgttcggactgccgccgcgcgcgccgctcgcttacccagaagtagatgtagagttcgcaagcgatgggcccgtgggtgagaaacttgtgagcatgctggactacgccgtacatggctacgacaccgtcctctacgtgggcgctggcgatggacggacggttacgcagttctcgcggaaggaccccgaacgtttcagacgaactcgttgggtgctgatcgatcccatcgtgcgagaagagggctggcctagcaacgtcaccacctcgaggcgtcgtgtcgatacgccgcgtgatttggctcgataccaatgcaacggcgctaccttgttgctgtgggacgtacgtagcgatcgagggacccaggctgatcgggagtgggaggagacgtgcaggcgggaggacgatttgggtgagagcgttgcgatagcaaattcggcgtggctggactcggcgcttctgaagagacgtgttcctttctcagatgttctaaggtgtaccgtttcggtgctatgcttccaaccgggagctccggcggatatgtacgagttacgctccttcttagcgctctcgggacatgaatggctgggcgagccgatgagcgtgactcttccgactgagcccttacgccgtaggatccagcgctaccacgggaaggaccgcggcaggtcgctgcgcacacgtttgatccagacgctgcacatcgaacaatgtgatggcctacagagcgagctcacaccgcgggcggacctgttctatctgacgaatcgtcggaatacgccggaatccgtcttccgtgtagtgtcgcgaagtgaaatctcaacgctttgggtcggcgcgcgtctcctctcttatgatgattacacgatgagcggagcggaggtgatgctgcggtgttcgaccgagtcgcatatggttgtggatggactggggttcctcctacttctcatgttatggggtgaagtggcgaatacgctgtcgttcgatccggggtgggctgggcagtatgcagttgtattccgacgtcgtagagtccctcccgtgcccgacgtgtggctatgccgattcatcggattgcgcgcaaactcctcacttctgcgcatccgagagccatgtgcgcacgacacgcccgatctaatcaagcgcatggggatagacttgtctgggcatctgtacgtgtcactggttacggacaaatacgtggcggatttgcgcacgtggtttcaaatgattctcacgtggagtgtcttaggagcggaggagaagaaggacgcgatagcgcgtgcgcacggcgaggtaatagagtggaaggatcaaatggaatcgaagccatggcacctgcgagaggatctgatcgccgcactgcgcgcctttcggctcttggctccagagcacctccacccgtacatcgacgatgcagtgggtcacctccgagtttttccggacccgggacggcgaacccaggaggggtga

SEQ ID NO: 14311 - DNA, 39 bp, unidentified; identical to SEQ ID NO: 6797
  misc_feature 1..39: note = Synthetic
  source 1..39: mol_type = other DNA

SEQ ID NO: 14312 - DNA, 150 bp, unidentified
  misc_feature 1..150: note = Synthetic
  source 1..150: mol_type = other DNA
ttgaatgctctggacatggaaaaaatgaaagttggtaagcgactcccttccgtggtttggtggaaaagtcacaagggtaccatagcgaggaaccccggttcgaaaccggcaggatccgctatgagcacaagtgaggcgcttgcgcgttga

SEQ ID NO: 14313 - DNA, 546 bp, unidentified
  misc_feature 1..546: note = Synthetic
  source 1..546: mol_type = other DNA
gtgttgctttcattgccaagtttgtttcataacaaaagccttaggcatctcctatggcaggaagaagcggagacagcgacgaagagctcatcagaacagtcagactcatcaagcttctctatcaaagcaacccacctcccaaccccgaggggacccgacaggcccgaaggaatagaagaagaaggtggagagagagacagagacagatccattcgattagtgaacggatccttggcacttatctgggacgatctgcggagcctgtgcctcttcagctaccaccgcttgagagacttactcttgattgtaacgaggattgtggaacttctgggacgcagggggtgggaagccctcaaatattggtggaatctcctacagtattggagtcaggaactaaagaatagtgctgttagcttgctcaatgccacagccatagcagtagctgaggggacagatagggttatagaagtagtacaaggagcttgtagagctattcgccacatacctagaagaataagacagggcttggaaaggattttgctataa

SEQ ID NO: 14314 - DNA, 351 bp, unidentified
  source 1..351: mol_type = other DNA
  misc_feature 1..351: note = Synthetic
atggcaggaagaagcggagacagcgacgaagagctcatcagaacagtcagactcatcaagcttctctatcaaagcaacccacctcccaaccccgaggggacccgacaggcccgaaggaatagaagaagaaggtggagagagagacagagacagatccattcgattagtgaacggatccttggcacttatctgggacgatctgcggagcctgtgcctcttcagctaccaccgcttgagagacttactcttgattgtaacgaggattgtggaacttctgggacgcagggggtgggaagccctcaaatattggtggaatctcctacagtattggagtcaggaactaaagaatag

SEQ ID NO: 14315 - DNA, 1656 bp, unidentified
  source 1..1656: mol_type = other DNA
  misc_feature 1..1656: note = Synthetic
atggaggagttcgaggtgctgatcaagaacgcagatggaaaatataaagtggggtcgtatacggagttcgatatcgtgctcacgccacatacgaaagaggatgaagctgcatacgttttagagaagcggctctgttctgatatagaatatgagaagcaagagagggttgggatgccgatgtcgattgcgattccgaacgcagcggcggttggaatagactacctcgaggggcgactgacccgagaagacgcggaggcagcgctcgacgataaagatgatgtgagctatgcggtatggtcgcacaccgaccaggggaactatcgcgcgcgaatggcttgtggggacgttgagatgaagccgcgtacggcgagaacgtgctgttttcatcggttgtcctggtgcaaagagggacggtgccacacccgattagaggcggaacgggcgcgcgagtgcgtgctactatgcctgctattggtcgaagaggacgggaagatctcggtcgggccacgaacccgtgagggggcgcgcatccagtgcttcgcgcccacaaagagtgcgtacatactgcccaagccgcagtaccggaccatgtggcgcgatgagctcgagtccttttttaaggtacaggcgaagaaacggcccatatgcaatctgtccgtttacaccgagatggcggtgcgatccctgctgttagacatattttgcatactttactgtttcctccccgcgggtcataagatgagggaaggtgagttccgcaccactcgccaggcgcgtgcggcgctgcttcctcggaaggtcttaaagagcccaggaggagtggcgcagcgcatacataacctgttggcgcatgtgctccacttcggtgaggttcagacgagcccgcgcgcgttccgggacgaccccttctcctgggtcttacgtacgcccctggtggcgcacgcggagcgcgcgcgcgacgatgacgaggcgctcacttactacgttgcactgaacttcctgctggcgggcatcccgggtgcgtgtttagagagcctcgatatcgttcgtattgagcccaggcgggaggcgcgagtgcaatacgagttaaagatgcagaagacgacgaagtactgcgacgttcccctgcacgcatggctcagccaggagtacggcgcgccgcaagttgggacggatgcctcaaaagggatgcgtggaatgctggggcgcgcgctcgagcaggtacgcgcgggggggctactccgaattagaaaacgtgcggaacaccccgctgtaagaacgtacgcctctgttcacgcgttgatggggtttgtgtgtaatggcttgaaggaggtggcttcagtcatcgtgccctaccgtgcgccacgaaagagcttccttttggtcgtctttggggacgagcgcctggacgattctgccgtcgccgacatcgaggcctcgcggctcgggaaaacgcgatcgtcgttcctggggacgtgcgttgtacggttgactaaggcgggcgtccccctagtccgagtgccggagggtgtccgaaggatcgtggaggcctacctgtgggggtcaactcaggggacgtatgtcgccataaagcctcgaagcgcaacccgcgagatggcggatttcatgacgaaggtgttgcggtaccgcgattag

SEQ ID NO: 14316 - DNA, 87 bp, unidentified; identical to SEQ ID NO: 6803
  source 1..87: mol_type = other DNA
  misc_feature 1..87: note = Synthetic

SEQ ID NO: 14317 - DNA, 81 bp, unidentified; identical to SEQ ID NO: 6805
  misc_feature 1..81: note = Synthetic
  source 1..81: mol_type = other DNA

SEQ ID NO: 14318 - DNA, 1596 bp, unidentified
  source 1..1596: mol_type = other DNA
  misc_feature 1..1596: note = Synthetic
atggaacgattcattcgcaaattcaaaccggttggaggagcggcacttggcctgaggacgatcgaggctttgtctgacatatggacgtgcggccacaagcgattctcatgcatgtaccaaggccagtgtgttgtgcagaaccttgacgcctttgtcgcgcgcgcaattgtctcgggagacagtatgcttgcgagcaaaatcgtcgagatcgcaggtgcgttgggaaacaaccgggatgaggtgcggtgccaggtggcggcgtgtgcagacagaagtggaaatcaagacctagcgcgactgagcgccctgactactcaggcggtgcagcgcgcggcggaactcgcagggatggagagagtgaacccgaacaacatgatacgcgatgacgcgacgcgcgcatatgtcgacgactcgcggagtctgatcccacatttgttcgttccgatgcgagatggggtggcacccgagatagtcgactcactggcgatcgggcctgtactatatctcttctacgacacgctcaatgcggacacgctggttttccagcgcgacccccgggctctcgcaacgacgaaccactacctcgcgtgggctccgaacgcaccgcgatacgggactccagagacggccatgtggatcgctttcttcgactactctctgcgcgcgctgttcgaccagacggatctgaagacgatcatcacgaggaacgtggaggcggatctgaacttcatcaggggtcaggcgacaagacggggtgcacgtctctacttccagcgctttggggttgaggggcaagggatcgggccagtggaggatatgtataaccgctcggtcgctgagcggccaatcgcaatcacgtatctcgaacaggctagaacatgggagacgttgttcttcccttcgctgttgttcaggggatggatcgcgggagtgtacactgagagggagatggcgcaatggttcaactcgcacgagacgtgccaaacctgctacgcggcgagccagacttcctatgcacgtgtgctcgcgatggacgtacgtaccgaagaggagacgggggcgatggcgatgcggtcgctgcggcccttgcgacacggaggagaggatctggcggggatccgatcgcgagatctgaacgatggcgaagtcctgacaaggcagggggatcactggtgtgctactgtgtgccggtcgacgaccgaagcggtatacgttaccgcgacgtttatccaccgacttatgcgagggcgagggctcagtgacggcttccagcgattgataagcgctgaggcggtcgcgtggtgctacttgcagtggcttccggatcgggcggactgcattgtgctttttaggctgctcgcgtacgcccaacagttatacaccccgccttttctgtcgcgacttggtgcttggaccgacttggcggtcttcttccgcgagatctacaaccagacggacgctagcgaggctgtcctgcgagacatccacggggcgatgcttgcgctggtgcgcttccacgttcacaactccgcacagcatggcttcacgcggccttgcgctcctccccctcaaatccgccgcacgcctcgccgttag

SEQ ID NO: 14319 - DNA, 66 bp, unidentified; identical to SEQ ID NO: 6787
  source 1..66: mol_type = other DNA
  misc_feature 1..66: note = Synthetic

SEQ ID NO: 14320 - DNA, 375 bp, unidentified
  misc_feature 1..375: note = Synthetic
  source 1..375: mol_type = other DNA
atgccaagaaagaagcaggagccactagtggaggagatggaagaagaatgggacagccaggcagaggaggacgaatgggaggaggaagaattggaagaggtggaacaggagcaggcaacagagcagcccgtcgccgcaccatccgcgccggcagcccctccggtcaagcctcctcgtagatgggatcgagtaaagggtgacggtaagcaccagcggcagggctaccgatcatggagggcccacaaagccgcgattattgcctgcttgcaagactgcggggggaacatcgcttttgcccgccgctacctgcttttccaccgcggggtaaacatcccccgcaacgtgttgcattactaccgtcaccttcacagctaa

SEQ ID NO: 14321 - DNA, 309 bp, unidentified
  source 1..309: mol_type = other DNA
  misc_feature 1..309: note = Synthetic
atgtcatggctgcggtggagcagcggatcacctcagcgagatcagcactacgacgcattttcaaccacaaactgttcacccaaacgcaaagatgttatgaatactacaaattttcacagtggcagcattcggagaatgagaagcgcggatatctatacaccgtcccagttgtgcgagaaaacggatggcaggagataccgagatgcgttggcgcacgccctcgagatgccctcgacgtctattaccgttccatacaaccgatcagtcggatacagccagaggaagagtttctgcgtaactacgcgttag

SEQ ID NO: 14322 - DNA, 1908 bp, unidentified
  source 1..1908: mol_type = other DNA
  misc_feature 1..1908: note = Synthetic
atgttaaacagggtacaaatcttaatgaaaacagctaacaattatgaaactattgagatattgcgtaactatttaagactgtatatcattttggcacgaaatgaagaaggtcatggtatactaatatacgatgataacatagatagtattatgtcgatgatgaatattacaagattagaagttataggattaactactcattgcacaaaattaagatcatcgcctccaattcctatgtctagattgtttatggacgaaatagatcatgagtcatattattctccaaaaacctcagattatccgttgattgatattatacgaaagcgttctcacgaacagggagatatagcactggctttaaaacgatactgtatcgagaatacagattccatatcagaaattaatgaatggttgtcgtcaaaaggtttagcatgttatagatttgtaaaatttaacgattataggaaacagatgtatcgtaagttctctaagtgtactatagttgacagtatgataatagggcatataggtcatcattatatttggattaaaaatttagaaacatatacgcgtcccgaaattgatgtgttaccgtttgatattaaatacatatctagagatgaattatgggcgcaaatttcttcctcgttagatcaaacacatataaaaaccatcaccgtatcagtttatggagctattactgataatggaccaatgccatatatgatatccacgtacccgggtaatacctttgttaactttaacagtgtaaaagatctaattttaaatttcttagattggattaaagatattatgactagtacacgaactatcattctagtaggttacatgagtaatctattcgatataccgttgctaacagtatactggcccaataattgtggatggaaaatctataataatatactgatatcatctgatggtgcaagagttatttggatggatgcgtataaattttcttgcggtttatctttacaagactattgttatcattggggtagcaaaccagagagccgaccattcgatttaataaaaaaaatagatgctaaacgcaatattaaatcgtgggttaaagaatctatgacatccttgaaatcattgtatgaggcatttgagacacaatcaggagcgctagaagttttaatgagtccgtgtaggatgttttcgttttctagaattgaagacatgttcttaactagtgtcatcaatagagtatccaagaatactggaatggggatgtattatcctaccaacgatatatcttctttatttatcgaatcatctatctgtctagattatattatagtgaataatcagaaatccaacaaatatcgtatcaaatctgttctcgatatcatttcttcaaaacaataccctgcaggacgtcccaactacgttaaaaatggcacaaaaggaaagttatatatcgcgttgtgtaaagtcaccgtacctactaacgaccatattcctgttgtgtatcatgatgatgacaatactaccacctttattacagtattgacgtccgtcgatattgaaacggctaccagagcagggtattcgatagtcgaattaggggctttacaatgggatgataatattccagaacttaaagactgtttattggatagtatcaaaatgatttatgacttgaacacagtcacaacaaataatttattggaacaactaatagaaaatattaactttaacaactctagtataattttgttgttttatacatttgccattagttattgcagagcatttatttactcaattatggaaaccatagatccagtgtatatatctcagttcagttataaagaattatatattcgtagctcgtataaagatatcaatgaagtcatgagtcaaatggtaaaattataa

SEQ ID NO: 14323 - DNA, 5646 bp, unidentified
  source 1..5646: mol_type = other DNA
  misc_feature 1..5646: note = Synthetic
atggctcaaacgctctcaaaaatctctaacaaagaaaacgcctcttcaggccttcggcctaagaggtttaaaccccaccaacccatcccaacgtggatggtgcggtgtgagcctcttgaccacgactcacgtcgtggtcgagaccctgtacgtgcttcgccacaagcgaaacgcgtcagaacacctactccctacccccgccatctcaaacctgcagcatctgctgtagttaggagtggtaacaatccttcccatctcaaacctgcatcaacggatgtagttaggagtggaccccaacccctttgctgcgaagccaaggacggaggtgtagttaggagttgcaaaacctacaatctcaaacctgcacacgaatccaaggctgtcgccttctcccttcccaaaacggacggacccaccggaaacgaacccgaattcatcgctgaggcttgccctagctgcgctctttacgacacgtgtccaaattgcacatctaaggttatcaacgatgatggctcaactgacggaaccattccttcatgggaccagattgaaacaacacctgctttcctatctcttctctccaacaccgacgaggaaatgtcagctgatgagctcaccaacttggcagctcacctgcgaaaggctttcgagactggatcacacccggcaaacgttgactactccaaggaccaactccaaggactactggaaatggctgaagctgcagtaccaccagcaaggagacaaaccctaccattctaccaacaaaggcttgaggctcgtagaacctggcgcgagaagatcttcaaccaaccattggaagaaatcaacaaaatcctaacgacatcaaaagaccgattccaacgctgcgccgcctggaaagtcatacttgaaaaggcagtgcttgcaaaagaatacggcgaagaggcctacgcttacgcgcaacaggccctgaaaaacatcaactcgtttgatgtcaatttggttctgaaaatggccgcagcaacgttcattgaccacatcaggatgatgactgtggataacccagatttggtatcttacatcccaaagttgatcgttaaattgaaaccactcacactaaaaatgataattgacaatcatgaaaacaccaaggaaggttggttggtcacactcaccagccttgccgagctctacggtatggtcgaggtcgcaattgacttcgttccaactgtagttggaaaattgtttgatttgctcatgaaaacaacatccaaaatgtacagcatgtttaaatcagtggtgctcgcaacattcacatctgaatcccttgatttcaccaacccattctggtacgccattgctgcgatactctgctttctaatcacaggggccatcccacataatgggaaaatgaagatccataagaacatcctgtccaacgccactggcatcgtggctgggataaaagccattcaagcccttgctgccatgttctcgacatggtcaaacgagaggttggtcaatgacctttcatcaagaaccatcgcacttactgagctgaacaaccctacaatcacagctgacatcgatgcggttatcaacttgcaaagattggcagaagtactacgggatgaggtgaaatcccacaccctcaatccactcatgcagccatacaacccaatcttgagaaatttgatgtccgctcttgacaaagtgatatcctgttgcacacggcgaaaggccatcgccacaaaaaggacagcacctgtggctgtcattttgaccggacctccggggtgcggcaagacaacagcagcatttgcccttgcaaagcggttgtcacagcaaaaaccatcaatcatatcccttgatgtcgaccaccacgacacatacactgggaatgaggtgtgcatcattgatgaattcgactcatctgacaaggttgattatgccaattttgtagtcaacatggttaacaccaaccccatggtcttaaattgtgatctaattgaaaacaaaggcaagacattcacctcaaaatacgtcatcatgacgtccaacacggaaacaccagtcaagccaacatcaagacgtgctggtgcattctaccgtcgtgtgatgattgtggatgtcacaaacaacgccgttgacaaatggaagagtgataacccagggaaagctgtcccaaaatggtgcttcaacaaggacttctctcacctaagcttgtcgctgaggggaaccgaaccgtactctaaggagtacgtgctggaccccactggtagaaaccaccaatctcgacgagctccccccccccaacaaatcacacttgagcaattggcccaaaagatggttgtgcaacacacaaccaacaccagtgaattcgtcacgcaagctggtgatgtccctgtgtttggattcgtctgccaaaacaatgaaattgacactgtctacaacctacttgccgccgttaaggccaggtacggtgcaaatttcaatttgtacaagggcatggtaagaactgcacacgagaacagtgggtgtggggcccatgttcacgtgatctctagagaggacaacttcagaggaaaggcattcacagtcaacagatctagacttgaatcagttccccatctcgagggagactcctttaggaggtcccttggtgttgtcatgtctgataaagacgtgacaacgatgttctactacatcaaggggaaagtgatcaatgatcaggtgagcttgactgaactacccgccaatcagcacgtggtgaccgtccacaccgtgtatgacatggcctgggctcttcggagacacctgaaatggtctggacagtggcaactcatcaaggctgcctatgaaatcatgtgttacccagacactgcagcctgtgctctacggaattggatggactcaacagacttttccgaagaacacgttgtcacccagttcattgctcctggagggaccatcattcttgagtcctgctatggcgcacgcatgtgggccacaggtcagcgcctcatccgcgctggtggacttacagaagctggtggaccccaaggaggggttagatttgctggccttggtgcccggaatgtaccctggagtgagattctcagagaattcatgaccttgatttcacacatttggtctcaaattaaaggtgcgactgttgttctaacagcgctaaccttttatctcaaaagattcagacccagagttgaagccaaaggcaagaacaaaaataaaggcccacggaagaacactggggtcgctctcactgatgatgagtacaatgattggaaacagtccaaagctgaaaaaaacctcgacctcacggtcaaggacttcctccaactcaggcaccgagctgcaatgggtgctgataacaccgatgccgtcaaattcaggtattggtactcaaaaaaacaaaaaatttaccatgatttggaaaatttccccataattggccgtggtggcttaaaacgtgaactcatccgcaagggaccccttcgtcctcgtggaaacgatttttacgatgaaccagacgattggtattcggagggagtcattgatggcgtcactcacaagaacgccatcgtgagcgtggatgatgttgatggcatgcacaaaggttatgctattcacatcggacacggagtttacatttcactgaaacatgttttaactggaaatgcaagaattctgtctgaagaaccaaaaggtatcaccatcagcggcgaattggcgacatttagactcaacaacatcctaccaacagcagttccagttggaacgaacaaacccatcaaagacccctggggtaacccagtatcaactgattggcagtttaaaaattacaacaccacctctggaaacatctatggagcctgcggctcatcgtgttcactgacgagacagggtgactgcggtctcccctacgtcgacgatcacggtgttgtcgttggactccatgctgggtctggtggtgacaaatgcccgtcccgaaaactcattgttccctacgtcaaggtggatatgagaattcgtgacacgtgcacaaaggagtcacctacaaagacacacaaacctacattctcatacaggggactcctcgggaaggagactggagaaccaagaacaatcatgaaaggcactagactccatgtgtcgccagcacacgttgacgactacgaggagtgcactcaccaacccgcttcgcttggagcgggcgatccaaggtgccccatatccctaactgggattatggtgaacaatctccaaccctacactgaagcctcccctggacccgacacagcaacactgaaccgggtttcaaagatgctaacatcacacatggaggggtatgtcccgaaagtccacaaaactgaagaggacagtatttctgcattctacatgcttaatcatgacacgttgtgtggcccatacatcggtgcccgcaagaaagaccatgtcaaagacggtgtcctggataaaaaccttctggacctcctcagttcaaagtggaatcgtgctaaacttgggcttgctctcccacacgagtacgccctcggcctcaaagacgaactccggccaaaagacaaggtcgcagtcgggaagcgtaggctaatctggggttgcgatgttggcgttagcacggtctgtgctgccgccttcaagcgcgtctcagaatcaatcatggccaaccacgctctcggctttatccaagttggcatcaacatggatggacctgccgtggaagatctcttcaagaggcttgaaagaccaaagcacgatcggtattgtgttgactactcaaagtgggactccactcaaccaccaaaagtgacatctcaatcaattgacatcctcagacatttcactgacaaatccccaattgttgattcggcatgtgcaacacttaaatcaaacccaattggcatcttcaacggtgttgcattcaaggtggccggcggcttgccctcgggtatgccactaacgtccatcatcaactcactgaaccactgcctcatggtgggctcagctgttgtcaaggctctcgaggattctggcgtgcgagtaacatggaacatcttcgactcgatggacctgttcacatacggtgacgacggtgtctacattgtcccgccgctcatctcatctgtcatgcccaaagtcttcgcgaacctgagacagtttggcctgaaaccgacccggaccgacaagtcggatgctgagataacgcctatccctgctgatgaaccagttgagtttctcaagcggacgatagttcgcactgagaacggcgtacgtgcattgcttgatagatcatccataattcggcaattctactacatcaaagcggaaaacactgaaaattggactgtcccacccaagagaattgacaccccatctcggggccaacaactctacaatgcatgcctgtacgccagtcaacacggagaggaattctataccagcaagatcgtaccgctcatcgagcgggcggttaaacttgaaggtctacacattgaggtcccggaattccaccaggctgtcgcagcctacaacgggtatttcaatggtactgagggccaaccaaaccaaatcgctcacgcgagtggtggacttgggctcagtggtgaggtgtttgaaaattaa

SEQ ID NO: 14324 - DNA, 27 bp, unidentified
  source 1..27: mol_type = other DNA
  misc_feature 1..27: note = Synthetic
atgtcgaaaataaatagacgggcatga

SEQ ID NO: 14325 - DNA, 891 bp, unidentified
  source 1..891: mol_type = other DNA
  misc_feature 1..891: note = Synthetic
atggaaaccgtctactgcactttcgatcacaaactgtcactttccgatatcagcaccctctgcaagctcatgaacatcgtcataccgatcccagctcaccaccatctaataggtagcggcaatttaggtctttatcccatcgtctcctccaacaaagattacgtccacatccggaacgtattacggaccatggtcgtaaccattctgcagaaggtggaaggtaatcaactagttttgagaaagccgatgaccggccagcagtatgccataaagaacacaggacccttcccctgggaaaagggtgacaccttgacattgattccacctttatcgacgcactcggaagaaaagctattgaaactgggtgattgggagctcactgtacctttagtcgttccgaccgcaattgcggccgagatcaacatcagattgctatgcattggtcttatagcagttcacagagaatacaatgagatgcaaacaatcatcgatgagttatgctctatccaatacagagacgtactcattaaattaccagacatagtcaacgacaaacaatcaatgtactccatgaaaacagcctgcatctcgctgtccatgatcacggccatggccccagacatcgtgagaacttacatagatcggctaacgctggaagaccattcaatgcttttgatcaaatgccaagaactattatctaaaagaacaacgttaagcacacagcgctgcggacaacttcacgctacggacatcaaagacgaattaaaaaaaatcaaatcagtcttaactatgatcgaccaaattaattctttgaccaacgagaaaacgtattttgttgtctgtgacgtttccgcagataacagaatggctacatgtatttataaaaattaa

SEQ ID NO: 14326 - DNA, 87 bp, unidentified; identical to SEQ ID NO: 6820
  source 1..87: mol_type = other DNA
  misc_feature 1..87: note = Synthetic

SEQ ID NO: 14327 - DNA, 957 bp, unidentified
  misc_feature 1..957: note = Synthetic
  source 1..957: mol_type = other DNA
ctgggcctggttgaggaacctgttaagacggctccgggaaaaaagaggccggtagagcactctcctgtggagccagactcctcctcgggaaccggaaaggcgggccagcagcctgcaagaaaaagattgaattttggtcagactggagacgcagactcagtacctgacccccagcctctcggacagccaccagcagccccctctggtctgggaactaatacgatggctacaggcagtggcgcaccaatggcagacaataacgagggcgccgacggagtgggtaattcctcgggaaattggcattgcgattccacatggatgggcgacagagtcatcaccaccagcacccgaacctgggccctgcccacctacaacaaccacctctacaaacaaatttccagccaatcaggagcctcgaacgacaatcactactttggctacagcaccccttgggggtattttgacttcaacagattccactgccacttttcaccacgtgactggcaaagactcatcaacaacaactggggattccgacccaagagactcaacttcaagctctttaacattcaagtcaaagaggtcacgcagaatgacggtacgacgacgattgccaataaccttaccagcacggttcaggtgtttactgactcggagtaccagctcccgtacgtcctcggctcggcgcatcaaggatgcctcccgccgttcccagcagacgtcttcatggtgccacagtatggatacctcaccctgaacaacgggagtcaggcagtaggacgctcttcattttactgcctggagtactttccttctcagatgctgcgtaccggaaacaactttaccttcagctacacttttgaggacgttcctttccacagcagctacgctcacagccagagtctggaccgtctcatgaatcctctcatcgaccagtacctgtattacttgagcaga

SEQ ID NO: 14328 - DNA, 594 bp, unidentified
  misc_feature 1..594: note = Synthetic
  source 1..594: mol_type = other DNA
atgtctgggatagtaaaatctatcatattgagcggaccatctggttcaggaaagacagctatagtcaaaagactgttaaaagactatggaaatatatttggatttgtggtgtcccataccactagatttcctcgtcctatggaacgagaaggtgttgattaccattacgttaacagagaggccatctggaagggaatagccgctggaaactttctagaacatactgagtttttaggaaatatttacggaacttctaaaacagctgtgaatacagcggctattaataatcgtatgtgtgtgatggatctaaacatcgatggcgttagaagtcttaaaaatacttacctaatgccttactcggtgtatataagacctacctctcttaaaatggttgagaccaagcttcgtcgtagaaacactgaagcggacgatgagattcatcgtcgtgtgatgttggcaaaaactgacatggatgaggccaatgaagcaggtctattcgacactattattattgaagatgatgtgaatttagcatatagtaagttaattcagatactacaggaccgtattagaatgtattttaacactaattag

SEQ ID NO: 14329 - DNA, 57 bp, unidentified; identical to SEQ ID NO: 6830
  misc_feature 1..57: note = Synthetic
  source 1..57: mol_type = other DNA

SEQ ID NO: 14330 - DNA, 159 bp, unidentified
  misc_feature 1..159: note = Synthetic
  source 1..159: mol_type = other DNA
aagggcagacgaagaaggactccaaggaaaactaagactccttcgccttctgcaccagacaaatccatatccacaaggaccggggacagccagccaacgaaggaacagaagaagacgtcggaggcgacagtggttacgacttgtggccttggccaataa

SEQ ID NO: 14331 - DNA, 681 bp, unidentified
  source 1..681: mol_type = other DNA
  misc_feature 1..681: note = Synthetic
atgtcccaacgacgagaaaacaagaagttgaaggtgcagccgccgcccccagaagatatggaggaagattgggacagtcaggcagaggaggcggaggaggacagtctggaggacagtctggaggaagacagtttggaggaggaaaacgaggaggcagaggaggtggaagaagtaaccgccgacaaacagttatcctcggctgcggagacaagcaacagcgctaccatctccgctccgagtcgaggaacccggcggcgtcccagcagtagatgggacgagaccggacgcttcccgaacccaaccagcgcttccaagaccgcccctactatagccagcaaatcccggcagtctcgacagataaagacagcggcggcgacctccaacagaaaaccagcagcggcagttagaaaatacacaacaagtgcagcaacaggaggattaaagattacagccaacgagccagcgcaaacccgagagttaagaaatcggatctttccaaccctgtatgccatcttccagcagagtcggggtcaagagcaggaactgaaaataaaaaaccgatctctgcgttcgctcaccagaagttgtttgtatcacaagagcgaagatcaacttcagcgcactctcgaggacgccgaggctctcttcaacaagtactgcgcgctgactcttaaagagtag

SEQ ID NO: 14332 - DNA, 576 bp, unidentified
  source 1..576: mol_type = other DNA
  misc_feature 1..576: note = Synthetic
atgtcccaacgacgagaaaacaagaagttgaaggtgcagccgccgcccccagaagatatggaggaagattgggacagtcaggcagaggaggcggaggaggacagtctggaggacagtctggaggaagacagtttggaggaggaaaacgaggaggcagaggaggtggaagaagtaaccgccgacaaacagttatcctcggctgcggagacaagcaacagcgctaccatctccgctccgagtcgaggaacccggcggcgtcccagcagtagatgggacgagaccggacgcttcccgaacccaaccagcgcttccaagaccggtaagaaggatcggcagggatacaagtcctggcgggggcataagaatgccatcatctcctgcttgcatgagtgcgggggcaacatatccttcacgcggcgctacttgctattccaccatggggtgaactttccgcgcaatgttttgcattactaccgtcacctccacagcccctactatagccagcaaatcccggcagtctcgacagataaagacagcggcggcgacctccaacagaaaaccagcagcggcagttag

SEQ ID NO: 14333 - DNA, 60 bp, unidentified; identical to SEQ ID NO: 6834
  source 1..60: mol_type = other DNA
  misc_feature 1..60: note = Synthetic

SEQ ID NO: 14334 - DNA, 60 bp, unidentified; identical to SEQ ID NO: 6834
  misc_feature 1..60: note = Synthetic
  source 1..60: mol_type = other DNA

SEQ ID NO: 14335 - DNA, 141 bp, unidentified; identical to SEQ ID NO: 6840
  misc_feature 1..141: note = Synthetic
  source 1..141: mol_type = other DNA

SEQ ID NO: 14336 - DNA, 891 bp, unidentified
  misc_feature 1..891: note = Synthetic
  source 1..891: mol_type = other DNA
atggaaaccgtctactgcactttcgatcacaaactgtcactttccgatatcagcaccctatgcaagctcatgaacatcgtcataccgatcccagctcaccaccatctaataggtagcggcaatttaggtctttatcccatcgtctcctccaacaaagattacgtccacgtccgaaacgtattacggaccatggtcgtaaccattctgcaaaaggtggaaggcaatcaactggttttgagaaagccggtgaccggccatcagtatgccataaagaacacaggacccttcccctgggaaaagggtgacaccttgacattgattccacctttatcgacgcactcggaagaaaagctattgaaactaggtgattgggagctcactgtacctttagtcgttccgacagccattgcggccgagatcaacatcagattgctatgcattggtcttatagcagttcacagagaatacaatgagatgcaaacaatcatcgatgagttatgctctatccaatacagagacgtactcattaaattaccagacatagtcaacgacaaacaatcaatgtactccatgaaaacagcttgcatctcgctgtccatgatcacggccatggccccagacatcgtgagaacttacatagatcggctaacgctggaagaccattcaatgcttttgatcaaatgccaagaactattatctaaaagaacaacgttaaacacacagcgctgcggacaacttcacgctacggaaattaaagatgaattaaaaaaagtcaaatcagtcttaactatgatcgaccaaattaattctttgaccaacgagaaaacgtattttgttgtctgtgacgtttccgcagataacagaatggctacatgtatttataaaaattaa

SEQ ID NO: 14337 - DNA, 1398 bp, unidentified
  misc_feature 1..1398: note = Synthetic
  source 1..1398: mol_type = other DNA
atggtgaaaggcattcctaaaattatgctcctgatctctataacgttcttgctcctttccctcataaattgtaatgtattggtaaactccagaggaacaagacgttcctggccgtataccgtgctatcttatcgaggtaaagagattctgaagaaacagaaggaagatatcttaaaacgattgatgtctacatcatctgacggataccggtttttaatgtaccccagtcagcaaaaatttcatgccatcgttattagcatggataaatttcctcaagactacattttagcgggtcccattagaaatgatagcattacccatatgtggtttgacttttacagtactcaactccgaaaaccagccaagtacgtatattccgaatataatcacacggcccacaaaataacgttacgacccccaccttgcggcacagtgccttctatgaactgcctatccgaaatgttaaatgtttccaaacgcaatgataccggcgaaaaaggttgcggtaatttcaccacgtttaatcctatgtttttcaacgtaccacgttggaacacaaaactgtacataggttccaacaaagtcaacgtggatagtcagacaatctactttttgggcctaaccgccctacttttacgatacgcgcaacgtaactgcactcgcagtttctacctggttaacgccatgagccgaaatttattccgcgttcccaagtatattaacggcaccaagttgaaaaacactatgcgaaaactcaaacgtaaacaagcgcttgtcaaagaacaaccacaaaaaaagaataagaaatctcaaagtactactacgccatatctttcctatacaacgtctaccgctttcaacgtcaccactaacgtgacttatagtgctaccgctgctgtaacgcgggttgccacatctacgacaggttatcgtcctgatagtaactttatgaaatccattatggccacgcagttaagagatctcgcaacatgggtatatactactctgcggtatcggaatgaacccttttgtaaaccagaccgtaaccgtaccgccgtgtcagaatttatgaaaaacacgcacgtactgattcgtaacgaaacgccgtacactatttatggcactcttgacatgagctccttatattacaacgaaaccatgtccgtggaaaacgaaacggcttccgataataacgaaactacacctacgtcaccatcgacgaggtttcagagaacgttcatagatcccctatgggactatctagactcgctgctgtttctagataaaatccgtaactttagcctccagttacccgcgtatggaaatcttaccccgccggaacaccgccgggctgcaaatctatccaccctcaatagcctttggtggtggtcgcagtaa

SEQ ID NO: 14338 - DNA, 1620 bp, unidentified; identical to SEQ ID NO: 10517
  source 1..1620: mol_type = other DNA
  misc_feature 1..1620: note = Synthetic

SEQ ID NO: 14339 - DNA, 441 bp, unidentified
  source 1..441: mol_type = other DNA
  misc_feature 1..441: note = Synthetic
gtgtttggagtgccaggaaagtggggtgggatgtcgctgtgtagattgttgctcatgcttgcaatgtgctgcggggtgtcaaggggctcccaaacgctcccagccggaggcaggcgtggccagcgccgccgtgacaattcagcccagtggagcactcaacaacgccccgagggagccgtcggccccgcccctctcacagacgttgtcaccgcggcaggtactcgcacggtaccagatgtagatcaagccggtgccgtgctggtgcgccagtataatctagtgaccagcccgttaggcctggccacccttggtagcaccaatgccttgctttatgccgcaccggtgtcaccgttaatgccgcttcaggacggcacgacgtctaatatcatgagcacggagtctagcaactatgctcaataccgtgtacagggcctaactgtc

SEQ ID NO: 14340 - DNA, 726 bp, unidentified
  misc_feature 1..726: note = Synthetic
  source 1..726: mol_type = other DNA
atgaaaagaacagaagtagatcgtatcatcactaattcagttggatctagacgtttaatggaattgtcacgaccatacattgaaggaggcaaaatacaatatgtcgatagaaataatgtgattggtgtttgtattgattcgaatccgcgaggtgacgttttgattcaagccgtgattaatcatttaattactggtgttgcaacttttccaggtagagtggacgtttcaacaagaaatttgactttatataatgtgatagctgagaaagggtataacattgaaaccgataatataaattatctattgacattggcttgtatcggtgttgaaaatttgaattcagaacaacgacttaggttagtaatattgttgaaaatgatagcaataaaagataataatttattatggtataaaagtatgataagagcaaattcctggatgagaacttttgatgtagactttgatttaactcaaaacagcatcgaacgagtcaatctcaatatagctataattcagaagggtgtcaatcatactctatctaagccatatttagatgccagtcttgaacacgcatatcttagttctagatacaatgatctgatgatgtatgaccatttggataagccaagtttgaacagaataagtgatagacgtagttacacaactaactacattaatgccttaagactatatggcataaatccaccatttataaatgccgtttaa

SEQ ID NO: 14341 - DNA, 15 bp, unidentified
  misc_feature 1..15: note = Synthetic
  source 1..15: mol_type = other DNA
atggtaggatgctag

SEQ ID NO: 14342 - DNA, 12 bp, unidentified
  misc_feature 1..12: note = Synthetic
  source 1..12: mol_type = other DNA
acgacgctttga

SEQ ID NO: 14343 - DNA, 39 bp, unidentified; identical to SEQ ID NO: 6861
  misc_feature 1..39: note = Synthetic
  source 1..39: mol_type = other DNA

SEQ ID NO: 14344 - DNA, 1521 bp, unidentified
  source 1..1521: mol_type = other DNA
  misc_feature 1..1521: note = Synthetic
atgaatactattgaacgtacaacctcactggtgaacgagacttcagctcaattgaaaactttggtttccaatgctgagaaatctcattttcttaaaccggatgaagtcagagctaaactagcttttttgattaatccaaaacaaaacttgtttgctaatttgaactctttctttaataagcagaaatgtttggatgacctgactcgcatactcaaagtttgtggtggtactgaaacaagatatcaaattacagctattggtttaagtcatttgatcgagtattgtttaaaatacgaattaccaagtgatgcacgcatgttaaagtcattcatcttcatcatatttagtgtatttgacaaggtcgactcacgctctcaaggcaatgtgatgaagtttgacgaagtgtatgattatataaatagtgagttagccgataatgttgacttaactgctggagaaattgatggttcaaaggttattaagatatcttttctaaccacgacttacgtatgtgaacaagttaacactaaagtaatcgctgaccaagttctagccaaactgggtcagtatttgatttctgaccaattcggttactttaagtcgaagataggtgtcaatggaaatgagaagtctgatgcaattgcaattatgaatggtaaacaggatgaatcatgtcacgttgatttatttaggaataagtatagcgtaattcctgcttactacaaacagttggtggcagaggtacgagctctcagaaagataaaatcagctggcaatccaaatggagtcaagtttagaggtattactaagtttggtttcattaaaccgttgacggatatgcaacgttttaagaaaactgccctcaatgtagctttgattgactctaactccaagtacttcacaaccaattcaggtaaattgtactacgcttatgatcaatgtgtattaagttacatggatgatattgaaataagcgcgaatcgcgtttgtagggagttaatggatataaatgctttggtagcttataaattgttacataattatggtttaggaaataagtgtaagaatgcgaaatgtagtgtcgtaggacatataagcccagctatacaatccgctttggcgaaacgctacactggcgctttgaaagacatcattctagatgagactcttgatgacgtggacgatggtgttgatactagtgctattgctaatgaagcttctaaagatgtacctttgtcatccgattccagaatggttaagggtgacaacaactatatgtatatgtcagctaaagataagtcgcgcaacgcagcttcatcggatagattagcgaagtacaaaagtgttaggaatacagaggatgatacaccatcgtctactgttgttgcttctaactcagctgacgttattcatgttgatgacattgacatcgacaacatcagcattgcttcaagttctaattcagttaatacacacaagtcgaaaccatttgcagctagaaacggaaagtctttgctctaa

SEQ ID NO: 14345 - DNA, 48 bp, unidentified; identical to SEQ ID NO: 6863
  source 1..48: mol_type = other DNA
  misc_feature 1..48: note = Synthetic

SEQ ID NO: 14346 - DNA, 144 bp, unidentified
  misc_feature 1..144: note = Synthetic
  source 1..144: mol_type = other DNA
attgtggaccaggaatttgacatccctttcaaggtgtggaggaagttcgccgcccgccggggactggaataccagagctgggaggagggtaacgaggtgctgctgaacaactacaccagagacatactttcagatttcaagtaa

SEQ ID NO: 14347 - DNA, 24 bp, unidentified
  misc_feature 1..24: note = Synthetic
  source 1..24: mol_type = other DNA
atgctcggaggcagaccattctga

SEQ ID NO: 14348 - DNA, 24 bp, unidentified
  source 1..24: mol_type = other DNA
  misc_feature 1..24: note = Synthetic
atgctcggaggcagaccattctga

SEQ ID NO: 14349 - DNA, 2907 bp, unidentified
  source 1..2907: mol_type = other DNA
  misc_feature 1..2907: note = Synthetic
atgcctaataaaagaagtaataaaggaaaagcttcgaaagatgtaaaagttacaagttcagacactaaaacaattaacggtggttcactaaacgatgaaaaagctaactcgattttagacgaagcgttcaactcacgtcaagtcaacgattctggcgatcgcttgataacgtcaagctctaagatagttaacaatgttctaccaggtcctgaaacattcgcagaaattcgtgatagtaagaaagatggcactgttgtgagaggtgagaatcaggctatattgattgatgttaataatgatgtgagtggtgcaacagccgaagcgttttcgaagagcacaactcaaccgctagctgctgctaatactagggagcttcttgagcaatcgcgattggctgcatctgaaggattgagaaaggtgatacctacaaaggagttgctagttgctgcctatcttggtccagatgctgatcgttatgatgctgatcttgacgcgcttagtgctgctctgatagtcggacaagatgaagttagaaagatcagaagcgagaatcttgagattaggaagattgggataggtagtccaaatcttgaagtaatcacctctaacaaaggtaggacggctaagtgcgctataatacgtgagaatgttggttttatgaaaatcaaaactggcataaataagaacattcaatgtcgtaaattggcaaaagctctgttggatagatatggcttgacttcacccttcgtcattgacatcagcaatatggttgagactgttgtttacgataactcaagctactccacagctggttacgattataaacaaatagttgaagcgctcaatgctacgcgtaggttcagaggaatgccagaactacaaccacgtgagttaactgaaataagatctgatttgttagtgaccgatggacctgacaggacgtcaataagtacactgtatgatggaacgatcaaggctcaaattattaaagcagctgcttatgagtgggagcaggacataatatctttaccagagtacatcagacgcattaagctgagtataccagaaggatacaggattaaggaatattcacctaaagagatgaggtatggtaaggtttattatagattcagacaggcatcactgcgtatgctgcttgatatgttaggtgacgaatgctctgatttctttattaaacgtttataccttgatatcaaacataagttaccagctactgcatcttcaactacttcagttgtagccgctatagctcccgatgtcagagtatcatcaacgaccactagtttagctaattcattcctcagtgcacttaagttgactgatatcgagaatgttagagctctctcaattttgtgtgctgtgttcaagaatctgcaaatcgaaataaactttacaaagaggtctggaaatgctgggataatggacatgatagccgcaacgtttgctttgctcttctttcctgatcattcaatctcggatgcgttgtatttatccattcttaaagtgattgcctcattcttaggtaaacgcgccatccaagattatcgcgattacaatagtgttcaaatgcgtgatgagttgattggactgaattggcctttcattaatagatgtactcccgaacagttggagttggaggggtcacccttcttctcgaatggtgaaattgggcgatatgacataccattaaatattaactctagaggcaaacacgttctgggtgacatcagtcgtgagcttagagctatgtctagagaacgttggagggataataactcttcagttggcctgctagtttcgagtgttttaaaattcgcaatttcagcttgctatgacctatttgacacacacatagacgttgtcgcccatattcgtgctatggttccgaatgaagtagccgaaatgttagaccataccagaggcacatatcagattgaaccatcttctcttgtatcatatatcatgcatatcggcaaatgggagataactgacacattcgttgatgagatcgatgtgatggctgaaaagaggttgagtgaataccatcaactagctcttgatataagtgaagctattaacatcactcgtaccattatttctgagactaaaccaaccaacgctagacgtttagcttacactaacgctgtcgtgcgttatgtcgatcacatgtggggaaaagagtctgctgatggtaaacaaggtataagtagtacattgggtttattgttaggagctgcagctggagctgatttaaaatctggttataagcgtttcttaaatgatttatgtactcgtaatgacgccactccagccgatgagccattataccgtataatggagtcagttacgaagattgttgagagtaatctctcagcgtttggcataactgaagagatattaatatgtccgaaaagacatagaattgaaactgatgcaagatttaatggtatattcagacagagtccatttgttgctacaatgccagttgaatatagaagagttcattatactgatttactcaaaatgggtgcgcttgaggcggctaaagttataagcgtcggagttatagtatacggagtgccttttaactacgaataccgtatacattcaggtgacagtagtacggtcagtgagaagcagtttgttaatctcgatacgaatggagtgacattaggtgagttggaatgggatatatattttgataatggtcataatgttgttgctgagtgtgatgacatctttggacttggctataagactatgattgtaacaccaccgaatctacagccaattgataattacaatgaatataaagttaaatacactagtgcggatgatgaagctatttatattaatgatcacatttacatgtacaaacgaacttaa

SEQ ID NO: 14350 - DNA, 33 bp, unidentified; identical to SEQ ID NO: 6871
  source 1..33: mol_type = other DNA
  misc_feature 1..33: note = Synthetic

SEQ ID NO: 14351 - DNA, 966 bp, unidentified; identical to SEQ ID NO: 13339
  misc_feature 1..966: note = Synthetic
  source 1..966: mol_type = other DNA

SEQ ID NO: 14352 - DNA, 27 bp, unidentified
  misc_feature 1..27: note = Synthetic
  source 1..27: mol_type = other DNA
atgcaccaaccattactgttaaattaa

SEQ ID NO: 14353 - DNA, 48 bp, unidentified; identical to SEQ ID NO: 6874
  source 1..48: mol_type = other DNA
  misc_feature 1..48: note = Synthetic

SEQ ID NO: 14354 - DNA, 465 bp, unidentified
  misc_feature 1..465: note = Synthetic
  source 1..465: mol_type = other DNA
atgatgccaactactttgtttgctggcacacacataactatgactactgtataccatataacagtgtcacagatacaattgtcgttactgaaggtgacggcatttcaacaccaaaactcaaagaagactaccaaattggtggttattctgaggataggcactcaggtgttaaagactatgtcgttgtacatggctatttcaccgaagtttactaccagcttgagtctacacaaattactacagacactggtattgaaaatgctacattcttcatctttaacaagcttgttaaagacccaccgaatgtgcaaatacacacaatcgacggctcttcaggagttgctaatccagcaatggatccaatttatgatgagccgacgacgactactagcgtgcctttgtaagcacaagaaagtgagtacgaacttatgtactcattcgtttcggaagaaacaggtacgttaa

SEQ ID NO: 14355 - DNA, 249 bp, unidentified
  source 1..249: mol_type = other DNA
  misc_feature 1..249: note = Synthetic
atggtcaatgatatgatttttaatcaagattcatttttaaaatatttattagaacatctgattagaagccactatagagtttctaaacatataacaatagttagatacaaggataccgaagaattaaatctaacgagaatatgttataatagagataagtttaaggcgtttgtattcgcttggtttaacggtgtttcggaaaatgaaaaggtactagatacgtataaaaaggtatctgatttgatataa

SEQ ID NO: 14356 - DNA, 249 bp, unidentified
  misc_feature 1..249: note = Synthetic
  source 1..249: mol_type = other DNA
atggtcaatgatatgatttttaatcaagattcatttttaaaatatttattagaacatctgattagaagccactatagagtttctaaacatataacaatagttagatacaaggataccgaagaattaaatctaacgagaatatgttataatagagataagtttaaggcgtttgtattcgcttggtttaacggcgtttcggaaaatgaaaaggtactagatacgtataaaaaggtatctaatttgatataa

SEQ ID NO: 14357 - DNA, 216 bp, unidentified
  source 1..216: mol_type = other DNA
  misc_feature 1..216: note = Synthetic
ctgctgaagtcctccccggagagaaaatcgtttatgtccgcggaattctccatttatagtcagagtcactgttcaattttagtggtactaaatggctcgaaatctgcgcgaggccatggccgagagcctgggccgcacttcgcgcagcttggccgcagagcagtccgttctcttctcgcgcctggaagtgcgcatcgaggtcgaggagcagattga

SEQ ID NO: 14358 - DNA, 90 bp, unidentified; identical to SEQ ID NO: 6880
  misc_feature 1..90: note = Synthetic
  source 1..90: mol_type = other DNA

SEQ ID NO: 14359 - DNA, 198 bp, unidentified
  misc_feature 1..198: note = Synthetic
  source 1..198: mol_type = other DNA
atgtatggggatgaaatgttgagaaagattgccgatctaggaaagaaacttagagatggtaatggaaacggaggaaacggttgtacatccagctgtgaattcgaaagaaaaagaatcgccgtcctagaagctgaacttcggaaatctatggaaacaatcaaatcgttggagaaatttatggagttcgatcgcctttag

SEQ ID NO: 14360 - DNA, 72 bp, unidentified; identical to SEQ ID NO: 2773
  source 1..72: mol_type = other DNA
  misc_feature 1..72: note = Synthetic

SEQ ID NO: 14361 - DNA, 522 bp, unidentified
  source 1..522: mol_type = other DNA
  misc_feature 1..522: note = Synthetic
atgccgaggaagaagcaggagccgctagtggaggagatggaagaagaatgggacagccaggcagaggaggacgaatgggaggaggagacagaggaggaagaattggaagaggtggaagaggagcaggcaacagagcagcccgtcgccgcaccatccgcgccggcagccccggcggtcacggatacaacctccgcagctccggccaagcctcctcgtagatgggatcgagtgaagggcgacgctaagaaaaagcaagtaagagaagtcgccggaggaggcctgaggatcgcggcgaacgagcccttgaccaccagggagctgaggaaccggatcttccccactctttatgccatttttcagcagagtcgaggtcagcagcaagagctcaaagtaaaaaaccggtctctgcgctcgctcacccgcagttgcttgtaccacaaaaacgaagatcagctgcagcgcactctcgaagacgccgaggctctgttccacaagtactgcgcgctcactcttaaagactaa

SEQ ID NO: 14362 - DNA, 414 bp, unidentified
  misc_feature 1..414: note = Synthetic
  source 1..414: mol_type = other DNA
atgccgaggaagaagcaggagccgctagtggaggagatggaagaagaatgggacagccaggcagaggaggacgaatgggaggaggagacagaggaggaagaattggaagaggtggaagaggagcaggcaacagagcagcccgtcgccgcaccatccgcgccggcagccccggcggtcacggatacaacctccgcagctccggccaagcctcctcgtagatgggatcgagtgaagggcgacggtaagcacgagcggcagggctaccgatcatggagggcccacaaagccgcgatcatcgcctgcttgcaagactgcggggggaacatcgctttcgcccgccgctacctgctcttccaccgcggggtgaacatcccccgcaacgtgttgcattactaccgtcaccttcacagctaa

SEQ ID NO: 14363 - DNA, 1053 bp, unidentified
  source 1..1053: mol_type = other DNA
  misc_feature 1..1053: note = Synthetic
atgtcgcaggtacgtagcatggagcccgaccttacgttggcggcggtctatcaggcggcggcgaatctcacagagcaggataaggagattttttccgaagcggtaaaaactgcgttttcagtgtgtagttcggcagccccgagcgctaggttgagaatgatcgaaacgcctacacagaattttatgtttgtgacgagcgttattccttcgggtgtgccgtctggtgaaaaaaaaacaaagttaaatatcgatgccgctctggataatttggctttgtcgtttgcgaacaaaaaatcaaagaagatggctagaacgtatttgctacagaacgtttcgcggactcaagatcaacaagttgccatttcggggacgtacattttatatacaaaaaaacacattgaaacgtctttgatgctcgataagacgaagttagttaaacaaattcttgagtatgctgagacccctaatttgttagggtataccgatgtgcgtgatcttgaatgtttactttggttggtgttctgtggccctaaaagtttttgccagtcagacagttgtttcggatacagtaagacgggatataatgccgcatttccgaatctattgcctccgtatctgtacgaatgcggccagaataatggactgttttttggcattgtgcaagcttacgtgttttcttggtactcagattttgatttttcagcgctagagatttcagaacgcgctcgtcgtcgaatcaggtcactcctgtacgacttaaaacagaagttttcggagcaagaaatttctgttttaccggtagcgtcacagatgtgtatcttctgtgcattatataaacaaaacaaacttagtctagaatacgtttctggtgacttaaagacttctgtttttagtccaattataataaaggattgtttatgcgtgcagacgacaatttctacaactcagatgctgccaggtacaaagagctcagcgatatttccggtatatgaccttcgtaagctgctcagtgcacttgtcatttcggaaggtagcgtcagattcgatatataa

SEQ ID NO: 14364 - DNA, 1062 bp, unidentified
  source 1..1062: mol_type = other DNA
  misc_feature 1..1062: note = Synthetic
atgtgggttatgtcgcaggtacgtagcatggagcccgaccttacgttggcggcggtctatcaggcggcggcgaacctcacagagcaagataaggagatttttgccgaagcggtaaaaactgcgttttcagtgtgtagttcggcagccccgagcgctaggttgaggatgatcgaaacgcctacacagaattttatgtttgtgacgagcgttattccttcgggtgtgacgtctggtgaaaaaaaaacaaagttaaatatcgatgccgctctggataatttggctttgtcgtttgcgaacaaaaaatcaaagaagatggctagaacgtatttgctgcagaacgttttgcggactcaagatcaacaagttgccatttcggggaagtacattttgtatacaaaaaaacacattgaaacgtctttgatgatcgataagacgaagttagttaaaaaaattctcgagtatgccgagacccctaatctgttaggatataccgatgtgcgtgatcttgaatgtttactttggttagtgttttgtggtcctaaaagtttttgccagtcagacagttgtttcggatacagtaagacgggatataatgccgcgtttccaaatctattgcctccgtatctgtacgaatgcggccaaaataatggactgttttttggcattgtgcaagcttacgtgttttcttggtactcagattttgatttttcggcgcttgagatttcagaacgcgctcgtcgtcgaatcaggtcactcctgtacgacttaaaacagaagtttgcggagcaagaagtttctgttttatcggtagcgtcacagatgtgtatcttttgtgcattatataaacaaaacaaacttagtctagaatacgtttctggtgacttaaagacttctgtttttagtccaattataataaaggattgtttatgcgcgcagacgacaatttctacaactcagatgctgccaggtacaaagagctcagccatatttccggtatatgaccttcgtaagctgctcggtgcgcttgtcatttcggaaggtagtgtcaagttcgacatataa

SEQ ID NO: 14365 - DNA, 111 bp, unidentified
  source 1..111: mol_type = other DNA
  misc_feature 1..111: note = Synthetic
atgttacgtatgattcgcctattacgtatatcattttcgatatccatgatgatcagacaactcaaattacgatttcaatattataatcttgatgtaattagtgttatataa

SEQ ID NO: 14366 - DNA, 1527 bp, unidentified
  source 1..1527: mol_type = other DNA
  misc_feature 1..1527: note = Synthetic
atggagatcttgagaacgaaatcgcagtcagctgcagtggttattggaatttccaaattcttcgatgagaaggaaaaccgtgatgttattgtgactgcttcggatttcaaacgtaacaatgctttcattttcaaagattctggtaactatttccttggcttagagaatattttccgcaattcacttgatgaactaaaggatatactgattttagctggtggctcaatttcaaagagtaagatcactcaggccgggttgtcgcacatgataacctttcttgagaaattgtgtcttagtgatgacgctggtgtgaacaaagctttgatctttatcgtctttcagattcatgatagctcacaacgcagaggtggtgtttgtactcttttcgatgtattatacaattacctcgtacagcgcaaactgaatcaggagagtgagttcttaagctatggcacgtacaaggaaaagaagtacatatacatcaatgggaagacagtgacttacgtgtgcaagaacgctgatgctctgactattaaagaattggctaattcaaaatcacatatgacgtatgctgatactattggaagttttcgcaaaaatgcaagtgggatggacgcagtgactttcttaacagtaaaaatggacacaatgcatactgcttcaatttttgggaagacgtacaacattggtcagctgtactacagacagttgaatgttgaagtcaatactttgaagaaggtgttagccaatattgatgatcattcaagggttaagatgcacggtaattcacgtgatggctttgtaaaacgtcttgatgatgctgggaaaagtcgtgctactggcttgatcagagctttggatcattccaactcgatacgcttcaaatcaattggcatgggtagagatgagaaattgtcatacgtagtcgacagctgcttcatcagaaagatgcaaaatggaagaggattatgtgttaccattgataacataaacaaactgattgaacacaagttagttcatgattgcggtattggacgtacatgtagttgtggagctaaggcttgcgatgatgaatcactgttggatcagttagcggagcgtggccatgatgttgtcgctaatgctaaagaggctatgtcagctatgtgtgatgatgaagaacatgctgaaaaaatagctgtgactaagtcagatgcaaagttggatgataggattgtacaaggtaagggatcacgttatatgtctgcaagtgtatacagatcacgcctgaatacagaatccactactactaataacgctcagagtcccgtttctgaccctgtcaatgcaagtgctaacgtaaaaacgtcaccagctggtacccacactgatgaatcagtgatgaagaaggaagatcatggagttattgttaatgaaagcacaacatttaaaattaattcagatgttgtctttgacgccgcagaggcaacttttgcagacacaagctccggtttgtcctcattgctaaaaactaagatgaagttttga

SEQ ID NO: 14367 - DNA, 30 bp, unidentified; identical to SEQ ID NO: 6892
  source 1..30: mol_type = other DNA
  misc_feature 1..30: note = Synthetic

SEQ ID NO: 14368 - DNA, 96 bp, unidentified
  misc_feature 1..96: note = Synthetic
  source 1..96: mol_type = other DNA
ctgaccatgtcatcaataaagataaagcgcaatttagtgatttgccatttcacactaccttatacaaggaagttaacggtaaacgtgttaaattag

SEQ ID NO: 14369 - DNA, 159 bp, unidentified
  misc_feature 1..159: note = Synthetic
  source 1..159: mol_type = other DNA
atggacaagcaacaattacaagaaatggaggaaggttcgaaatcaggtgtcgtcacttggaccgtgactacaccatgccactaccaaatgctactagtaatgataattttcttgattgtattaagtttatcactgagtgtgtgggctttgattatgtaa

SEQ ID NO: 14370 - DNA, 4314 bp, unidentified
  misc_feature 1..4314: note = Synthetic
  source 1..4314: mol_type = other DNA
ttggatatgatgttcaagatgcttgcaaagctcctcttgtttttatggaccacacttcaggcatggtctataccgctgtcaaatagatgctttgaaggaggagtcctggtagaagaaagatcaatggaccatggaattgctgaaatctgtgtcaaagatgatgttagtatgatcaaaacatcatcactgcaaaagagaaatgaaactagattcacaaacataattatgaggaaaatgttgatcccaaattaccaagactgcaatcccattgaaatgccaaatggtcccattatgatatttaaaccaaatagcgacctgatgttgatcccaaagacatatgcatgtagagtagactgcactatatcattagatagagatgaggcaacaataattctccactcagacaaacttaataatttcgaagttatgggtactacaacagcaacaagatggttccaaggaagtacaacatattcgctagagcacacatgtgagcatatacaagttacctgcggctcaaaaagtctcagtttccatgcttgttttaaatatcatatggcatgcatccgtctgctaaataagagctacatgccagcattcatgattcagtctgtctgccaaaataaggaaattattataatgacctgtttaattttgataatctttgcactattatatattctaactatgtcatacatctgctacatattattgccactgtttataccgattgcatatctctatggttgggtatacaataaatcttgcaaaaaatgcagttactgtgggctggcataccacccgttcagcaaatgtggacgcaactgtgtgtgtggagcaatgtttgagaactcagacagaatgagaatgcatagacaaacaggattatgtaaaggatacaaatcactcagagctgcaaggatactttgcaaaagcagaggatctgctttctgcttggcagtaattttagctaccctgttgctttcatttatccaaccacttgaagcagtaaaattaacttacaataatgaagtaatagaattacctgaattatcacgggaattagaagttatattcagtggtatagattatgttaaaagtattgtggtcattcaacttactatttgtggatttttaattttactgcttttgagttatttaatcctttctaaaagaattgaagacaagttaatatataatgtcttatattactgtccagaatgcgagatgacacacccaaaaagaggattgaaaaaatatttctctggtgaattcacaaatatgtgtaacagctgtatgtgcgggtgtacttataatcaggaggatttaaatgatggatatacaataccgatgatgcacaaactaactgtcggatgctatgcaccagggagatattacactaacaaaaaaatgaacagtgtcagtatgtatataacattagcatgcctgatggtgctagcttctatgaccatagtggctgcatctgaagataattgcctaaaaacatcactttataagacacaagaaccagttagctgttcagcatggatcaaggccactacatgtactgcatcatccggcattgaaggaatgatggcccgcatcaagctcccaaagcaagacacagatttaatttccgggataagaggtagcttggactctatcctccggaagtctcaagagagttcagtaccaatccaatcatatatctttgaagccttggctgtaacgatgtactgttctgaacttgtgggtgcatcattagaaaatggaaatattaattcaaacataaaaatgcaatatacagaaaggaaattagaagtgtgcactgcaaaaaaagctgtctcagcatgcgcatgcttaactggcataactggctgtgacccatcaaatgcagatgatgtcaaagattactacaaaacccatcatgagatttttaaatctgatgtttctagaatgatccaaacaatagctaaaatgtttccaggagtgttcgctaaagagctattacttgcatcaaaaacatccaactacactagaatacaagcaattttgaagatgctggagccaaaattgacaaatgccagggcaacgaaagcactattgaaaatcttaatgactgcaatctcagaatcttctattgcaaatgtgcctgctcctgtcccatcctccaaaagtatcaatccatttgatccaaagtggtctcaagatagtattttcaaaaacattgttgcagccactgcaataaagacatgtccttcgagtaaagcatataaatgcttcttccctgtcagccttagatttacgttctatttttcatgtggagaggaaaacaaattttatcacactggtgacgatttgatagccatacattataatactggaaccactctctgtgtagcagatccttactgtgaaaaggacttcacaccagtagatgttgcaaataaggactcgctgttgacaatgaaatgtgatcagattacactgaatgtgtctgaaatgcctaattctatgccaatcaataaatgccgagttatttcaatgcagcaatgtacagtcacaggaactgcaaacagaagtgttgcagaatgttcgaatggatacttttatgaatatactggggaattacatcaaagcccaaaagatgatgttggtgtatattgctttgagaaggcatgcaaacctaacagatttccgcatcatcctagcaaccttcaaggttgtgtttcccataataatgaaatgttgaccaggaaacttaaagaaataaactattcaaacttggaacaattgaaacacagtctgcaagagacaattaaaacagatttggttgagcatcattacatcctgacaaaaaacttaccaaaaatcaaccctatttttaaagcactctctattcaaggagtggaaactgatagtggtattcagagctcatatatagaaaccaatttaatggtaaaaactggattgtctgtgggtttgcatctaacaacaaagaatggggactccctttttgatattatagtgtttgtcaaaactgctcattatgaagctgtctatgacgaaatatatcaaactgggcctacaattgggataaatgtccagcacaatgaaaaatgtaccgggaagtgtccagaatcgctaatgaaaactggctggctgtcattctcaaaagaacacacaagtcaatgggggtgcgaggaatttggatgcttagcaatcaatgaagggtgcctctacgggcattgtaaagacatcattaagccagaaatgacagtattgagaaaggctcaagatgaaactcctgttattaaaatatgtatctcattacctcatgaaacattttgtcaacccataaatgcatttaatgcgatcatcacagataaagtagaaactcaatttatatcaaatgaagcagggaaactacctaagttgttagcatataaatcaaataagattcacacaggcatgataaatgatcttgggaccttttcgaagatgtgtgggagtgttcaatcaatcaacaacaatgttctaggtgctggaactgcacgttttgactatatctgccatgctgcgcagagaaaagatgtgactgttagcagatgctttgataatttttatgactcatgcctgagactagaagcttcagataacattgtttatgataacaatcaaaaacgtgtctcactattaaataaaaacatgggtgagctaaggctaaaaataaaaatgggcgatctaaattataaactatttgaaaaaatgccttcttttgacttcaaggggagctgtgttggctgcctaaaatgtattaaaggagtagattgtgagtttgatatacattccacttctgaagcagtttgtgttttgacatcaaactgtgctttctaccataacaacttaaagattgacccgaatatccagaaatatggcatgaaagcgaaatgctcagaagagaaaatatggatagatctctgcgggaataaaatagaaatccaactgtctatagtgcagacacatgaaactatcgaagtcggcaacagtgaccaaacatattttgtaaaggagaaagatgacagatgtgggacatggttatgtaaagtaagtgaacaagggatttcctcaatatttgctccattctttgccatatttggagattatgccaagattgctttctatactgttttagcaatacttgctatagcactgatggtataccttatgttacctatgattggcaaattaaaagatatattaaagaaaaatgaaatagaatatattaaagaattcagggggaagaaaatctag

SEQ ID NO: 14371 - DNA, 15 bp, unidentified
  misc_feature 1..15: note = Synthetic
  source 1..15: mol_type = other DNA
attgcgttgacctag

SEQ ID NO: 14372 - DNA, 78 bp, unidentified; identical to SEQ ID NO: 6902
  misc_feature 1..78: note = Synthetic
  source 1..78: mol_type = other DNA

SEQ ID NO: 14373 - DNA, 732 bp, unidentified
  source 1..732: mol_type = other DNA
  misc_feature 1..732: note = Synthetic
atgtccgacgagggctaccgagagctcgtggagagtaagagtgctcccacgaccccgggaccctggagcccggacagggagagatggaagcgtcacgaggcagcgtggaagcagcactgtagctggagtcacgggctctggtgccactgccacgactggacgcgacacctcaaaaaagagacgcgagaatgcggttccggtaccgaaagtggagaagaccccgccgtctctttcgatctcgtagacgacgcggctatgctcgccgccgctggagacgccgagcctggggccgccggaggcggtggggtggaagtacccaagggaccagcacccacattgacaacccatgcaatccgagacctaaatcaatacaaatcgcagacccagccaccgcccctagagacgtcatacacccctgggatgtggatgcttccggaactatatcaaccgcaaaactcaaacaactcatggaaggacttggttacagggaaccgaaaccgaaaccgggaccccccgagaccctcatacctccgggagcgccgacgccggagctcgactactacagctcggagaccgagagcgatgacttcgacaccggagactccgaggaagaggaggaggaccaccaggacccgcgctgggttcgagagagccttgacaagcttactcgaaggcttaggggtgagcgaagacagcgacagcagctcggaaagggactgctggcccttctaa

SEQ ID NO: 14374 - DNA, 306 bp, unidentified; identical to SEQ ID NO: 10208
  misc_feature 1..306: note = Synthetic
  source 1..306: mol_type = other DNA

SEQ ID NO: 14375 - DNA, 852 bp, unidentified
  source 1..852: mol_type = other DNA
  misc_feature 1..852: note = Synthetic
atgttatcagagactgagttaagggctttgaagaagttgagtacaacgaccactagggtcgttggagattcaactttagctcttccttcgaatgttaaactaagtaaaggtgaggttgaaaagatcgctgtaacgaagaaagaaatgttcgatgagttagctcaatgtaatctacctacaattgaattaattacaagagaacacacattcaacggtgatgccatccgattcgctgcctggttattcttgatgaatggacaaaagctaatgaccgcaaataatgttgttgtcagaatgggtatgcaatattctacaaatttggctggtaataacgtcgagattaattacgtgacatcaaatagtgtagttaaattaggacacattcctgctggtgtacttgctgctccttattcaggaaagggaagtggacttttcattacttatgaacaaaatttgattactaatacagttgaaacaggtaaagtttgtgtcttgtttataacgtcactttcaactactgcttcagcagttaactcgtttgcttattcttactgtaatgttccagtggagagttgggattttaacatgattaaactgactgctgaaactagttgtgcttcacttactgcaatgactaatttggttaatacattagtgcctgatgatagggttaggccggttggtctttatgtagatatacctggagtaaccgtgactactagcgcatcattaggttcattacctattactaccatcccagcgacaacaccattgatattcagtgcttatacaaaacaagtcgaggaagttggcgtcgttaatactctatatgctttaagttacttgccttaa

SEQ ID NO: 14376 - DNA, 165 bp, unidentified
  source 1..165: mol_type = other DNA
  misc_feature 1..165: note = Synthetic
atgagcggcaaagaactcatctttctgagatttttctgggattattctggtaaaaatgtatgtctcgtttgtagtcgtttttggatttctgtaatgttacgatttgctatgtgtattttgatggtgtcgagcatgtttattttgttcttattttcacacagataa

SEQ ID NO: 14377 - DNA, 48 bp, unidentified; identical to SEQ ID NO: 6906
  misc_feature 1..48: note = Synthetic
  source 1..48: mol_type = other DNA

SEQ ID NO: 14378 - DNA, 30 bp, unidentified; identical to SEQ ID NO: 6907
  misc_feature 1..30: note = Synthetic
  source 1..30: mol_type = other DNA

SEQ ID NO: 14379 - DNA, 102 bp, unidentified; identical to SEQ ID NO: 6908
  source 1..102: mol_type = other DNA
  misc_feature 1..102: note = Synthetic

SEQ ID NO: 14380 - DNA, 27 bp, unidentified
  source 1..27: mol_type = other DNA
  misc_feature 1..27: note = Synthetic
ctggcaccatcaaagaatcacttctaa

SEQ ID NO: 14381 - DNA, 108 bp, unidentified; identical to SEQ ID NO: 6912
  source 1..108: mol_type = other DNA
  misc_feature 1..108: note = Synthetic

SEQ ID NO: 14382 - DNA, 150 bp, unidentified; identical to SEQ ID NO: 6914
  misc_feature 1..150: note = Synthetic
  source 1..150: mol_type = other DNA

SEQ ID NO: 14383 - DNA, 6849 bp, unidentified
  source 1..6849: mol_type = other DNA
  misc_feature 1..6849: note = Synthetic
gtgtacccctatctacaaaacttacagaaaattcagtcatatcacaatatatgcataatggactatcaagagtatcaacaattcttggctaggattaatactgcaagggatgcatgtgtagccaaggatatcgatgttgacctattaatggccagacatgattattttggtagagagctgtgcaagtccttaaatatagaatataggaatgatgtaccatttgtagatataattttggatataaggcccgaagtagacccattaaccatagatgcaccacatattaccccagacaattatctatatataaataatgtgttatatatcatagattataaggtctctgtatcgaatgaaagcagtgttataacatatgacaaatattatgagttaactagggacatatccgatagattaagtattccaatagaaatagttatcgtccgtatagaccctgtaagtaaggatttgcatattaactctgatagatttaaagaactttaccctacaatagtggtggatataaacttcaatcaatttttcgacttaaaacaattactctatgaaaaattcggtgatgatgaagaattcctattgaaagttgcacatggtgacttcactcttacagcaccctggtgcaagactgggtgccctgaattttggaaacaccccatttataaagaatttaaaatgagtatgccagtacctgagcggaggctctttgaagaatctgtcaagttcaatgcttatgaatctgagagatggaatactaacttggttaaaatcagagaatatacaaagaaagactattcagagcatatttcaaaatctgcaaaaaatattttcctggctagtggattttataagcagccaaataagaatgagattagtgaggggtggacattaatggttgagagggttcaagatcagagagaaatctcaaaatctctccatgaccagaaacctagcatacattttatatggggagcccataacccaggaaatagtaataatgcaaccttcaaactcatattgctttcaaagtccttacaaagcataaaaggtatatcaacttacacagaagcgttcaaatctttaggaaaaatgatggatattggagataaggctattgagtatgaagaattctgcatgtccctaaaaagcaaagcaagatcatcatggaagcaaataatgaacaaaaaattagagcctaaacaaataaacaatgcccttgttttatgggaacagcagtttatggtaaataatgacctgatagacaaaagtgagaagttgaaattattcaaaaatttctgcggtataggcaaacacaagcaattcaagaataaaatgctagaggatctagaagtgtcaaagcccaaaatattagactttgatgacgcaaatatgtatctagctagcctaaccatgatggaacagagtaagaagatattgtccaaaagcaatgggttgaagccagataattttatactgaatgaatttggatccaaaatcaaagatgctaataaagaaacatatgacaatatgcacaaaatatttgagacaagatattggcaatgtatatccgacttctctactctgatgaaaaatatcttatctgtgtcccaatataacaggcacaacacatttaggatagctatgtgtgctaataacaatgtctttgctatagtatttccttcggctgacataaaaactaagaaagcaactgtagtttatagcattatagtgctgcataaagaggaagaaaacatattcaacccaggatgtttgcacggcacatttaagtgtatgaatgggtatatttccatatctagagctataaggctagataaagagaggtgccagagaattgtttcctcacctggactgtttttaacaacttgcctactattcaaacatgataatccaactctagtgatgagcgatattatgaatttttctatatacactagcctgtctatcacaaagagtgttctatctttaacagagccagcacgctacatgattatgaactcattagctatctccagcaatgttaaggactatatagcagagaaattttccccttacacaaagacactgttcagtgtctatatgactagactaattaaaaatgcttgctttgatgcttatgaccagagacagcgtgtccaacttagagatatatatttatctgattatgacataacccaaaaaggtattaaagacaatagagagctaacaagtatatggttccctggtagtgtaacattaaaggagtatttaacacaaatatacttaccattttattttaatgctaaaggactacatgagaagcaccatgtcatggtggatctagcaaagactatattagaaatagagtgcgaacagagggaaaacataaaggagatatggtctacaaattgtaccaaacagacagtgaaccttaaaattttgatccattccttgtgcaagaatttactagcagacacttcaagacacaaccacttgcggaacagaatagaaaataggaacaattttagaaggtctataacaactatttcaacatttacaagttcaaagtcttgcctcaaaataggggactttagaaaagagaaagagctgcagtcagttaaacagaagaaaatcttagaggtgcagagtcgcaaaatgagattagcaaacccaatgttcgtgacagatgaacaagtatgccttgaagttgggcactgcaattatgagatgctgaggaatgctatgccgaattatacagattatatatcaactaaagtatttgataggttatatgagttattagataaaggagttttgacagacaagcctgttatagagcaaataatggatatgatggtcgaccacaaaaagttctatttcacatttttcaataaaggccagaaaacgtcaaaggatagagagatattcgttggagaatatgaagctaaaatgtgtatgtacgcagttgagagaatagcaaaagaaagatgtaaattaaatcctgatgaaatgatatctgagccgggtgatggcaagttgaaggtgttggagcaaaaatcagaacaagaaattcgattcttggtcgagactacaaggcaaaagaatcgtgaaatcgatgaggcaattgaagcattagctgcagaaggatatgagagtaatctagaaaaaattgaaaagctttcacttggcaaagcaaagggcctaaagatggaaataaatgcagatatgtctaaatggagtgctcaggatgttttttataaatatttctggctcatagccttagaccctatcctctacccacaggaaaaagagagaatattatactttatgtgcaactacatggataaagaattgatactgccagatgaattattattcaatttgctggaccaaaaagttgcataccagaatgatataatagctactatgactaatcaattaaattcaaatacagttctgataaagagaaattggctccaagggaatttcaactacacctcaagttacgtccatagctgcgcaatgtctgtgtataaagaaatattaaaagaggccataacattactagacgggtctatattagtcaactcattagtccattcggatgataaccaaacatcgataacaatagttcaggataagatggaaaatgataaaattatagattttgcaatgaaagaatttgagagagcctgtttgacatttggatgccaagcaaatatgaaaaagacatatgtaacaaattgcataaaagagtttgtttcattatttaacttgtacggcgaacccttttcaatatatggcagattcctattaacatctgtgggtgattgtgcctatatagggccttatgaagatttagctagtcgaatatcatcagcccagacagccataaagcatggttgtccacccagtctagcatgggtgtccatagcaataagtcattggatgacctctctgacatacaacatgctaccagggcagtcaaatgacccaattgattatttccctgcagaaaataggaaggatatccctatagaattgaatggtgtattagatgctccattgtcaatgattagtacagttggattggaatctgggaatttatacttcttgataaagttgttgagcaaatataccccggtcatgcagaaaagagagtcagtagtcaaccaaatagctgaagttaagaactggaaggtcgaggatctaacagacaatgaaatatttagacttaaaatactcagatatttagttctagatgcagagatggaccctagtgatattatgggtgagacaagcgacatgagagggaggtctattttgacacctagaaaattcacaacagcaggcagtttaaggaaattatattctttcagtaagtaccaggatagactgtcttcccctggaggcatggttgaattgttcacttatttgcttgagaaacctgagttgttagtgactaaaggggaagatatgaaagattatatggaatctgtgatattccgatataattccaaaaggttcaaagaaagtttgtcaatacagaacccagcacaattatttatagaacagatattgttctcacataagcccataatagacttttctggtatcagggacaaatatataaacctacatgatagtagagctctagagaaggaacctgacatattaggaaaagtaacatttacagaggcttatagattattaatgagggacctgtctagcctagaactaaccaatgatgacattcaagtaatttattcttacataatacttaatgaccctatgatgataactattgcaaacacacatatattgtcaatatacgggagtcctcaacggaggatgggcatgtcctgttcaacgatgccagaatttagaaatttaaaattaatacatcattccccagccttagttttgagagcatatagtaaaaataatcctgacatccagggtgctgatcccacggaaatggctagagatttagttcatctgaaagagtttgttgagaacacaaatttagaagaaaaaatgaaagttaggattgctataaatgaagcagagaaaggacaacgggatatagtctttgaactaaaagagatgactagattttatcaggtttgctatgagtatgtcaaatctacagaacacaagataaaagtcttcattctcccgacaaaatcatacacaacaacagatttctgttcactcatgcaggggaatttaataaaagataaagagtggtacacagttcactacctaaaacagatattgtctggtggccataaagccataatgcagcataatgccactagtgagcaaaatattgcttttgagtgtttcaaattaattacccattttgcagactcattcatagattcattatctaggtcagcttttttgcagttgataatagatgaattcagttataaagatgtgaaggttagcaaactttatgacataataaagaatgggtataatcgaactgacttcataccattgctttttagaactggcgatttaagacaagctgacttagacaagtatgatgctatgaaaagtcatgagagggttacatggaatgattggcaaacatctcgtcacttggacatgggctcaattaatctaacaataaccggttacaatagatcaataacaataatcggagaagataacaaattgacatatgcagaattatgtctgactaggaaaactcctgagaatataactataagtggcagaaaattgctaggtgcaaggcatggacttaaatttgaaaatatgtccaaaatccaaacatacccaggcaattattatataacatatagaaagaaagatcgccaccagtttgtataccagatacattctcatgaatcaataacaaggaggaatgaagagcatatggctatcaggaccagaatatacaatgaaataactccagtatgtgtagttaacgttgcagaggtggatggggaccaacgtatattgataagatctttagactatctaaataatgatatattttctctttcaaggattaaagtcgggcttgacgaatttgcaacaataaaaaaagcacactttagtaaaatggtctcatttgaaggacccccaattaagacagggctcctcgaccttactgaattgatgaaatctcaagatttgcttaaccttaattatgataatataaggaatagcaacttgatatctttttcaaaattgatttgctgtgaggggtcagataatataaatgatgggttagagtttctgtccgatgaccctatgaactttacagagggtgaagcaatacattcaacaccgatctttaatatatattactcaaaaagaggagaaagacatatgacatacaggaatgcaattaaattactgatagaaagagaaactaagatttttgaagaagctttcacattcagtgagaatggcttcatatcgccagagaatcttggttgcttagaagcagtagtatcattaataaaattgttgaaaactaatgagtggtccacagttatagataaatgtattcatatatgtttaataaagaatggtatggatcacatgtaccattcatttgatgtccctaaatgttttatggggaatcctatcactagagacatgaattggatgatgtttagagaattcatcaatagtttaccagggacagatataccaccatggaatgtcatgacagagaacttcaaaaagaaatgtattgctctgataaactctaagttagaaacacagagagatttctcagaattcactaaactgatgaaaaaggaaggtgggaggagtaatatagaatttgattag

SEQ ID NO: 14384 - DNA, 282 bp, unidentified
  misc_feature 1..282: note = Synthetic
  source 1..282: mol_type = other DNA
attatcgttgttgttacgttaatgtttattttttttaaaaccgaaattatcttggcttttaataaaacaaaagttgttaataatccaatcgacaaatttaaagatacatttttgttttgcaaagaaaataaaatgatgattggcggattacccaataacaatgttacagaagcgttaactacagataaaattcccattgttgtagataactgcgaggatattttaaaatcaataaatggatcacataaagtatctcttaacgatattcttagaagaagatga

SEQ ID NO: 14385 - DNA, 87 bp, unidentified; identical to SEQ ID NO: 6918
  misc_feature 1..87: note = Synthetic
  source 1..87: mol_type = other DNA

SEQ ID NO: 14386 - DNA, 117 bp, unidentified
  misc_feature 1..117: note = Synthetic
  source 1..117: mol_type = other DNA
atgcaaggccgagtcgtgaatttcaccgatcaacaggctagtcggctctgccgacacaggggtcattactggatatcctcaacatctcctagtctctcacattctccacagtattaa

SEQ ID NO: 14387 - DNA, 75 bp, unidentified; identical to SEQ ID NO: 6920
  misc_feature 1..75: note = Synthetic
  source 1..75: mol_type = other DNA

SEQ ID NO: 14388 - DNA, 93 bp, unidentified
  misc_feature 1..93: note = Synthetic
  source 1..93: mol_type = other DNA
atggcagccggaacttccaaaatgtgtacgctaataaacataaaacataaaaattatacaatggtttttatgtcagctactttgtatccgtag

SEQ ID NO: 14389 - DNA, 1095 bp, unidentified
  source 1..1095: mol_type = other DNA
  misc_feature 1..1095: note = Synthetic
ttgcatgttgctagtatgtcagattctccgcttttggattccggtgtggaaacggctgttgagtcgaatgcatcgaacggtttgtttaatctggaatcgaatacagttgaatcacctgttccggaggtctactggaccacgtttttgcagagcttcgctgcggaaaccgtatctttcggagacgttgctcattttgttttgcaatatgctcaccatcgacttcctctcgtgtggccttccggcgctgagttgaggtttgcctcttcggagatgcttggcatttcggaagacgaagtctgcaagttaaccagaaattttgtctgctgtccttttgtggaagtttgggtcatcggtctggtgctctattctgatttatctgctttgatgcttattggagatcggggtgaattttatgcatttaaccgttccgtggacaacgccatttacagagttgcggacaccccttatggtctctggaagcgtggtctgcgcagatttgaccctgtgtacgcttttttcgagtccatcgtttcggggggttttttcttcggccctatgtgcggggtggaggatgttttgaatttcgctgttgctttcgacaaggctcttgtgcctcttccgtggcctaaaggcgtgctgttcgaattttccgtcccggaggaccatggagagcggtggaggttcattcctaggcgtggcgttgccgtggttatcggaaagtttgtcggaagatgcctcggtcgtggtcttcttcgaaagcaacgggttcttatggatcgcttgggtgctgtctacgctctggatgttcgcggaggagccgtcgttaacttggcttgtagttttagggtttttttggccatgggcgccaggagactctttaaaaactatcgctttcctgatagaaacgcttgggccatgcagttacccgtcacttgcatccacgttccggtagttcaattaccacgagaatatagtttatgtccatctgctttggaggcttaccgggatactgagctcagtccagacacccttagcgatctgtgttgttttcggggggcttcggaagagctgcggaattatgaaattcttttttaa

SEQ ID NO: 14390 - DNA, 174 bp, unidentified
  misc_feature 1..174: note = Synthetic
  source 1..174: mol_type = other DNA
acgcgcccgacgaggagatttacgccttctgcgacgcgcacccggacgacgagcgctgcgcgtgcctcaagcccagccaggccgtggtcgacaccggccgcgacacgcgcctgccctactactgctggtacgcgccttgcaagcgcgcggacgcgctgctgccgcgcgcgctga

SEQ ID NO: 14391 - DNA, 1275 bp, unidentified
  misc_feature 1..1275: note = Synthetic
  source 1..1275: mol_type = other DNA
atgattgctttaattcaaatgaagaatatgaagtgcactttgaaagtcgaggaaacaactgaaaatcaagaattggaaggcgtttcattcgatgaactagttgcattgagagaggagaatgccaaactgaaacaagagaatgaagctctgaaggctaagcttcatcgtcttgaaagtgactggactacttcagacatcgttgaaaaggttgagttaatggatgctcagtttgataggattgggaagataatggataagatgcgtgagccgatgctgtttaagcgtgacgaaatcgaattgcatggtgatttgctagctagagttgaagggttactacgcattaagaacgagcgcagtgagattgaatttgaaaaggacattcaatgcatagttggaagatgcttcagtgatgagaataaacaacgtaaccttgaaaagatgataaaatcattcgagtatgacgacattgctgacaccatcgctctgcgcttgactcatttcattcaggatccaggtttacgctcgatagtgtatgcgatgtgtaaagctgctgttctgaatcaaaattatctaaacatcgaggtgcaggagatagttgacgtgacaaggcaaaagtacactcataacgcacgtgacgacattgatttttacccaatgtttacttttgatgccaacgtgccggaaggtgtcttcgatcacatatacaaaaagcactatttatctccacaatctgctgctttggttcacacactgtcacatcttgatgtgaatgttgatggtaatggaatagcgatgtatcatatcggatcagcgacgaggtttgctgagtgttcggttgtatatgttgatggacgtgcttacaagccaattagagttatggctgaatatgctatctttccaaccttgccgcatgagtataaaggtagagtcgaaggattgttgttgttgcatgggggattagcgccaataacattagtgcgtgtttatcacgatgttaatgttggtggtctagtgaccggttcgatcgcagcatccgtttcaactctattgcgtaattgcatgttatacagttttgatatctatttcactccgaatggtgtttgtatcaatgctgttggtaacaacaactttgttaacataatagatataaactgttgcggacgtgcttttggtaaagctcctttagaccaaggatcatggaatagaaataagttcatgggtcacaaacatgggagaggatcaaagtgcaagcagtataagaaaatcaattcatag

SEQ ID NO: 14392 - DNA, 4068 bp, unidentified
  source 1..4068: mol_type = other DNA
  misc_feature 1..4068: note = Synthetic
gtgacaatgatacactcagtgtttctactgatgttcttgttaacacctacagaaagttacgttgatgtagggccagattctgttaagtctgcttgtattgaggttgatatacaacagactttctttgataaaacttggcctaggccaattgatgtttctaaggctgacggtattatataccctcaaggccgtacatattctaacataactatcacttatcaaggtctttttccctatcagggagaccatggtgatatgtatgtttactctgcaggacatgctacaggcacaactccacaaaagttgtttgtagctaactattctcaggacgtcaaacagtttgctaatgggtttgtcgtccgtataggagcagctgccaattccactggcactgttattattagcccatctaccagcgctactatacgaaaaatttaccctgcttttatgctgggttcttcagttggtaatttctcagatggtaaaatgggccgcttcttcaatcatactctagttcttttgcccgatggatgtggcactttacttagagctttttattgtattctagagcctcgctctggaaatcattgtcctgctggcaattcctatacttcttttgccacttatcacactcctgcaacagattgttctgatggcaattacaatcgtaatgccagtctgaactcttttaaggagtattttaatttacgtaactgcacctttatgtacacttataacattaccgaagatgagattttagagtggtttggcattacacaaactgctcaaggtgttcacctcttctcatctcggtatgttgatttgtacggcggcaatatgtttcaatttgccaccttgcctgtttatgatactattaagtattattctatcattcctcacagtattcgttctatccaaagtgatagaaaagcttgggctgccttctacgtatataaacttcaaccgttaactttcctgttggatttttctgttgatggttatatacgcagagctatagactgtggttttaatgatttgtcacaactccactgctcatatgaatccttcgatgttgaatctggagtttattcagtttcgtctttcgaagcaaaaccttctggctcagttgtggaacaggctgaaggtgttgaatgtgatttttcacctcttctgtctggcacacctcctcaggtttataatttcaagcgtttggtttttaccaattgcaattataatcttaccaaattgctttcacttttttctgtgaatgattttacttgtagtcaaatatctccagcagcaattgctagtaactgttattcttcactgattttggattatttttcatacccacttagtatgaaatccgatctcagtgttagttctgctggtccaatatcccagtttaattataaacagtccttttctaatcccacatgtttgattttagcgactgttcctcataaccttactactattactaagcctcttaagtacagctatattaacaagtgctctcgttttctttctgatgatcgtactgaagtacctcagttagtgaacgctaatcaatactcaccctgtgtatccattgtcccatccactgtgtgggaagacggtgattattataggaaacaactatctccacttgaaggtggtggctggcttgttgctagtggctcaactgttgccatgactgagcaattacagatgggctttggtattacagttcaatatggtacagacaccaatagtgtttgccccaagcttgaatttgctaatgacacaaaaattgcctctcaattaggcaattgcgtggaatattccctctatggtgtttcgggccgtggtgtttttcagaattgcacagctgtaggtgttcgacagcagcgctttgtttatgatgcgtaccagaatttagttggctattattctgatgatggcaactactactgtttgcgtgcttgtgttagtgttcctgtttctgtcatctatgataaagaaactaaaacccacgctactctatttggtagtgttgcatgtgaacacatttcctctaccatgtctcaatactcccgttctacgcgatcaatgcttaaacggcgagattctacatatggcccccttcagacacctgttggttgtgtcctaggacttgttaattcctctttgttcgtagaggactgcaagttgcctcttggtcaatctctctgtgctcttcctgacacacctagtactctcacacctcgcagtgtgcgctctgttccaggtgaaatgcgcttggcatccattgcttttaatcatcctattcaggttgatcaacttaatagtagttattttaaattaagtatacccactaatttttcctttggtgtgactcaggagtacattcagacaaccattcagaaagttactgttgattgtaaacagtacgtttgcaatggtttccagaagtgtgagcaattactgcgcgagtatggccagttttgttccaaaataaaccaggctctccatggtgccaatttacgccaggatgattctgtacgtaatttgtttgcgagcgtgaaaagctctcaatcatctcctatcataccaggttttggaggtgactttaatttgacacttctagaacctgtttctatatctactggcagtcgtagtgcacgtagtgctattgaggatttgctatttgacaaagtcactatagctgatcctggttatatgcaaggttacgatgattgcatgcagcaaggtccagcatcagctcgtgatcttatttgtgctcaatatgtggctggttacaaagtattacctcctcttatggatgttaatatggaagccgcgtatacctcatctttgcttggcagcatagcaggtgttggctggactgctggcttatcctcctttgctgctattccatttgcacagagtatcttttataggttaaacggtgttggcattactcaacaggttctttcagagaaccaaaagcttattgccaataagtttaatcaggctctgggagctatgcaaacaggcttcactacaactaatgaagcttttcacaaggttcaggatgctgtgaacaacaatgcacaggctctatccaaattagctagcgagctatctaatacttttggtgctatttccgcctctattggagacatcatacaacgtcttgatgttctcgaacaggacgcccaaatagacagacttattaatggccgtttgacaacactaaatgcttttgttgcacagcagcttgttcgttccgaatcagctgctctttcggctcaattggctaaagataaagtcaatgagtgtgtcaaggcacaatccaagcgttctggattttgcggtcaaggcacacatatagtgtcctttgttgtaaatgcccctaatggcctttacttcatgcatgttggttattaccctagcaaccacattgaggttgtttctgcttatggtctttgcgatgcagctaaccctactaattgtatagcccctgttaatggctactttattaaaactaataacactaggattgttgatgagtggtcatatactggctcgtccttctatgcacctgagcccatcacctctcttaatactaagtatgttgcaccacaggtgacataccaaaacatttctactaacctccctcctcctcttctcggcaattccaccgggattgacttccaagatgagttggatgagtttttcaaaaatgttagcaccagtatacctaattttggttctctaacacagattaatactacattactcgatcttacctacgagatgttgtctcttcaacaagttgttaaagcccttaatgagtcttacatagaccttaaagagcttggcaattatacttattacaacaaatggccgtggtacatttggcttggtttcattgctgggcttgttgccttagctctatgcgtcttcttcatactgtgctgcactggttgtggcacaaactgtatgggaaaacttaagtgtaatcgttgttgtgatagatacgaggaatacgacctcgagccgcataaggttcatgttcactaa

SEQ ID NO: 14393 - DNA, 4068 bp, unidentified
  misc_feature 1..4068: note = Synthetic
  source 1..4068: mol_type = other DNA
gtgacaatgatacactcagtgtttctactgatgttcttgttaacacctacagaaagttacgttgatgtagggccagattctgttaagtctgcttgtattgaggttgatatacaacagactttctttgataaaacttggcctaggccaattgatgtttctaaggctgacggtattatataccctcaaggccgtacatattctaacataactatcacttatcaaggtctttttccctatcagggagaccatggtgatatgtatgtttactctgcaggacatgctacaggcacaactccacaaaagttgtttgtagctaactattctcaggacgtcaaacagtttgctaatgggtttgtcgtccgtataggagcagctgccaattccactggcactgttattattagcccatctaccagcgctactatacgaaaaatttaccctgcttttatgctgggttcttcagttggtaatttctcagatggtaaaatgggccgcttcttcaatcatactctagttcttttgcccgatggatgtggcactttacttagagctttttattgtattctagagcctcgctctggaaatcattgtcctgctggcaattcctatacttcttttgccacttatcacactcctgcaacagattgttctgatggcaattacaatcgtaatgccagtctgaactcttttaaggagtattttaatttacgtaactgcacctttatgtacacttataacattaccgaagatgagattttagagtggtttggcattacacaaactgctcaaggtgttcacctcttctcatctcggtatgttgatttgtacggcggcaatatgtttcaatttgccaccttgcctgtttatgatactattaagtattattctatcattcctcacagtattcgttctatccaaagtgatagaaaagcttgggctgccttctacgtatataaacttcaaccgttaactttcctgttggatttttctgttgatggttatatacgcagagctatagactgtggttttaatgatttgtcacaactccactgctcatatgaatccttcgatgttgaatctggagtttattcagtttcgtctttcgaagcaaaaccttctggctcagttgtggaacaggctgaaggtgttgaatgtgatttttcacctcttctgtctggcacacctcctcaggtttataatttcaagcgtttggtttttaccaattgcaattataatcttaccaaattgctttcacttttttctgtgaatgattttacttgtagtcaaatatctccagcagcaattgctagcaactgttattcttcactgattttggattacttttcatacccacttagtatgaaatccgatctcagtgttagttctgctggtccaatatcccagtttaattataaacagtccttttctaatcccacatgtttgattttagcgactgttcctcataaccttactactattactaagcctcttaagtacagctatattaacaagtgctctcgtcttctttctgatgatcgtactgaagtacctcagttagtgaacgctaatcaatactcaccctgtgtatccattgtcccatccactgtgtgggaagacggtgattattataggaaacaactatctccacttgaaggtggtggctggcttgttgctagtggctcaactgttgccatgactgagcaattacagatgggctttggtattacagttcaatatggtacagacaccaatagtgtttgccccaagcttgaatttgctaatgacacaaaaattgcctctcaattaggcaattgcgtggaatattccctctatggtgtttcgggccgtggtgtttttcagaattgcacagctgtaggtgttcgacagcagcgctttgtttatgatgcgtaccagaatttagttggctattattctgatgatggcaactactactgtttgcgtgcttgtgttagtgttcctgtttctgtcatctatgataaagaaactaaaacccacgctactctatttggtagtgttgcatgtgaacacatttcttctaccatgtctcaatactcccgttctacgcgatcaatgcttaaacggcgagattctacatatggcccccttcagacacctgttggttgtgtcctaggacttgttaattcctctttgttcgtagaggactgcaagttgcctcttggtcaatctctctgtgctcttcctgacacacctagtactctcacacctcgcagtgtgcgctctgttccaggtgaaatgcgcttggcatccattgcttttaatcatcctattcaggttgatcaacttaatagtagttattttaaattaagtatacccactaatttttcctttggtgtgactcaggagtacattcagacaaccattcagaaagttactgttgattgtaaacagtacgtttgcaatggtttccagaagtgtgagcaattactgcgcgagtatggccagttttgttccaaaataaaccaggctctccatggtgccaatttacgccaggatgattctgtacgtaatttgtttgcgagcgtgaaaagctctcaatcatctcctatcataccaggttttggaggtgactttaatttgacacttctagaacctgtttctatatctactggcagtcgtagtgcacgtagtgctattgaggatttgctatttgacaaagtcactatagctgatcctggttatatgcaaggttacgatgattgcatgcagcaaggtccagcatcagctcgtgatcttatttgtgctcaatatgtggctggttacaaagtattacctcctcttatggatgttaatatggaagccgcgtatacttcatctttgcttggcagcatagcaggtgttggctggactgctggcttatcctcctttgctgctattccatttgcacagagtatcttttataggttaaacggtgttggcattactcaacaggttctttcagagaaccaaaagcttattgccaataagtttaatcaggctctgggagctatgcaaacaggcttcactacaactaatgaagcttttcagaaggttcaggatgctgtgaacaacaatgcacaggctctatccaaattagctagcgagctatctaatacttttggtgctatttccgcctctattggagacatcatacaacgtcttgatgttctcgaacaggacgcccaaatagacagacttattaatggccgtttgacaacactaaatgcttttgttgcacagcagcttgttcgttccgaatcagctgctctttccgctcaattggctaaagataaagtcaatgagtgtgtcaaggcacaatccaagcgttctggattttgcggtcaaggcacacatatagtgtcctttgttgtaaatgcccctaatggcctttacttcatgcatgttggttattaccctagcaaccacattgaggttgtttctgcttatggtctttgcgatgcagctaaccctactaattgtatagcccctgttaatggctactttattaaaactaataacactaggattgttgatgagtggtcatatactggctcgtccttctatgcacctgagcccattacctcccttaatactaagtatgttgcaccacaggtgacataccaaaacatttctactaacctccctcctcctcttctcggcaattccaccgggattgacttccaagatgagttggatgagtttttcaaaaatgttagcaccagtatacctaattttggttccctaacacagattaatactacattactcgatcttacctacgagatgttgtctcttcaacaagttgttaaagcccttaatgagtcttacatagaccttaaagagcttggcaattatacttattacaacaaatggccgtggtacatttggcttggtttcattgctgggcttgttgccttagctctatgcgtcttcttcatactgtgctgcactggttgtggcacaaactgtatgggaaaacttaagtgtaatcgttgttgtgatagatacgaggaatacgacctcgagccgcataaggttcatgttcactaa

SEQ ID NO: 14394 - DNA, 105 bp, unidentified; identical to SEQ ID NO: 6935
  misc_feature 1..105: note = Synthetic
  source 1..105: mol_type = other DNA

SEQ ID NO: 14395 - DNA, 105 bp, unidentified; identical to SEQ ID NO: 6935
  misc_feature 1..105: note = Synthetic
  source 1..105: mol_type = other DNA

SEQ ID NO: 14396 - DNA, 39 bp, unidentified
  misc_feature 1..39: note = Synthetic
  source 1..39: mol_type = other DNA
atgacgcatacgaaacaatctacgatcccagtgacctaa

SEQ ID NO: 14397 - DNA, 39 bp, unidentified; identical to SEQ ID NO: 14396
  misc_feature 1..39: note = Synthetic
  source 1..39: mol_type = other DNA

SEQ ID NO: 14398 - DNA, 42 bp, unidentified; identical to SEQ ID NO: 6937
  source 1..42: mol_type = other DNA
  misc_feature 1..42: note = Synthetic

SEQ ID NO: 14399 - DNA, 51 bp, unidentified; identical to SEQ ID NO: 6938
  misc_feature 1..51: note = Synthetic
  source 1..51: mol_type = other DNA

SEQ ID NO: 14400 - DNA, 48 bp, unidentified; identical to SEQ ID NO: 6941
  source 1..48: mol_type = other DNA
  misc_feature 1..48: note = Synthetic

SEQ ID NO: 14401 - DNA, 909 bp, unidentified
  source 1..909: mol_type = other DNA
  misc_feature 1..909: note = Synthetic
atggcaaatagagcaacttcagcctttctcgataaccctcatccagtcggagtcaactatgttgatgaagggtctcgtcaattcgttgcagtcgctgagcttttagcttcaaagttgattgctagtagtagagagtcagatgaaagtaattcagatgtaccgttcgttcaggcatatagcaagttcgctgatgataatccacgtcatcttcgtgttaagacgggaggtaagatggcaaatgcattgactaatgtcattagatcatattatagtataaatgcaccagctattgtaccacaagtcgaaattgatcgcttagcttcaaaggctacggtttcaggtgacatgtacaattcatatgctgtatttaacagtgttccaattgttgaggtactcagtccagctcaaacaactgtgtcaatagtaggttcagacagggccgatgttaccatgcttaacactggagccggagccgcgaacataacctttaactttggacagatagctgaaacagttatacttaaaggttcagttcctttccaattagcacgcgctaatcagccaatgccagcagcacgttttacatataaacttcgaccactggacggaccattcatagttgtattaccagttggaaatccattagtgattagtgctacagcagcaacacgtatacaggttcctcttgctttcaacaaagctctagttgaatctggatttcaaacggcaatgaatgatgggctgtttgatgcgcagaatgtcaattattactctagcttcgacgaattcatcatagctcaatatcatgcattagatggtataaacagagtgtccacttgtgtcgttctgggattagctttgcaagcatacgatcaaatgcgtagagcactacctgtccgacgagtgtag

SEQ ID NO: 14402 - DNA, 108 bp, unidentified
  misc_feature 1..108: note = Synthetic
  source 1..108: mol_type = other DNA
atgaaagtaattcagatgtaccgttcgttcaggcatatagcaagttcgctgatgataatccacgtcatcttcgtgttaagacgggaggtaagatggcaaatgcattga

SEQ ID NO: 14403 - DNA, 750 bp, unidentified
  source 1..750: mol_type = other DNA
  misc_feature 1..750: note = Synthetic
atggatgtactgagtaaaagttctttgaaggagttgttagctcatttggagagaactccacttgaggaagcgatttcttataagattggaactataccatatcagaatgttttgataagcagaaatgaatattataatcaaccgtatccagatgtgacttcattaattgacggtgttgctagagaaggacagcgtaacgtcaacggcttgataatgtcaataatatcatatgtggtaagtggctctggtcactatattcctaatatcggttatacattactgaggcgatcgatactggacattctaactaagcatgacactgggttgaacacgaacaacatcaactacgatatgattgctcgaaacttaacggtcagtaaaatgaattgtgaacagagaaaaaggatgttaatatgtttcaaactcctagcatacaaagatggtaatcttaacgattatgaaacgtatttgaatcagaatatatcattgaaacaaattgctccaaatttcattcctggtgatatgcgaacagtgatgagtaacagtgataaactgagtattgtaggtataccagcatacagattaacacagtcaactgagttatcaattcgtgatgacaatgccaaatcatacaaaatcggatacgttgattggtataatagtagttcttttctacgagaagggaatgattttaatttgataagtcttaaagatagagataataaatatgtaagattaaatggatggtga

SEQ ID NO: 14404 - DNA, 117 bp, unidentified; identical to SEQ ID NO: 6947
  source 1..117: mol_type = other DNA
  misc_feature 1..117: note = Synthetic

SEQ ID NO: 14405 - DNA, 78 bp, unidentified; identical to SEQ ID NO: 2057
  source 1..78: mol_type = other DNA
  misc_feature 1..78: note = Synthetic

SEQ ID NO: 14406 - DNA, 78 bp, unidentified; identical to SEQ ID NO: 2057
  misc_feature 1..78: note = Synthetic
  source 1..78: mol_type = other DNA

SEQ ID NO: 14407 - DNA, 1131 bp, unidentified
  source 1..1131: mol_type = other DNA
  misc_feature 1..1131: note = Synthetic
gtgggactccgcgtcgtctgcgccaaatacgccttagcagacccctcgcttaagatggccgatcccaatcgatttcgcgggaagaaccttccggttttggaccagctgaccgacccccccggggtgaagcgtgtttaccacattcagccgagcctggaggacccgttccagccccccagcatcccgatcactgtgtactacgcagtgctggaacgtgcctgccgcagcgtgctcctacatgccccatcggaggccccccagatcgtgcgcggggcttcggacgaggcccgaaagcacacgtacaacctgaccatcgcctggtatcgcatgggagacaattgcgctatccccatcacggttatggaatacaccgagtgcccctacaacaagtcgttgggggtctgccccatccgaacgcagccccgctggagctactatgacagctttagcgccgtcagcgaggataacctgggattcctgatgcacgcccccgccttcgagaccgcgggtacgtacctgcggctagtgaagataaacgactggacggagatcacacaatttatcctggagcaccgggcccgcgcctcctgcaagtacgctctccccctgcgcatccccccggcagcgtgcctcacctcgaaggcctaccaacagggcgtgacggtcgacagcatcgggatgctaccccgctttatccccgaaaaccagcgcaccgtcgccctatacagcttaaaaatcgccgggtggcacggccccaagcccccgtacaccagcaccctgctgccgccggagctgtccgacaccaccaacgccacgcaacccgaactcgttccggaagaccccgaggactcggccctcttagaggatcccgccgggacggtgtcttcgcagatccccccaaactggcacatcccgtcgatccaggacgtcgcgccgcaccacgcccccgccgcccccagcaacccgggcctgatcatcggcgcgctggccggcagtaccctggcggtgctggtcatcggcggtattgcgttttgggtacgccgccgcgctcagatggcccccaagcgcctacgtctcccccacatccgggatgacgacgcgcccccctcgcaccagccattgttttactag

SEQ ID NO: 14408 - DNA, 210 bp, unidentified
  source 1..210: mol_type = other DNA
  misc_feature 1..210: note = Synthetic
gtggtggacgacgagtacgtgcatgtgaccagcgccgacatggacggcacgcactacgcgcggcacgccttcgtcagctttaactgcgcggagcgcgcattcgcgcgagcgcttggtgcgctcttcgagcgcgactggcagtcgtccttcagctcgccgcttcctcgggcaccgccaccggagcccgccacgctgctacccgtgaactga

SEQ ID NO: 14409 - DNA, 774 bp, unidentified
  misc_feature 1..774: note = Synthetic
  source 1..774: mol_type = other DNA
atggtacgtccaaccgaggccgaggttaagaaatccctgagcaggcttccagcagcacgcaaaagagcaggtaaccgggcccacctggccacctaccgccggctcctcaagtactccaccctgcccgatctatggcggtttctaagtagccggccccagaaccctccccttggacaccacagattattctttgaggtgactctagggcacagaattgccgactgcgtaattctggtatcgggtgggcatcagcccgtatgttacgttgtagagctcaagacttgtctgagtcaccagctgatcccaaccaacaccgtgagaacgtcacagcgagctcaaggcctgtgccaactctccgactcgatccattacatcgctcactcggcccctccgggtaccgaggcgtggactatcacgcccctgctgatatttaagaatcagaaaacactaaagacagtatactctgaatcacccggggcgtttcccacgccggtgcacaccaccgaaggaaaattgtgcgcctttctcactgctagagaaaatgctgacatcagaaaggtcctatctaaggtacccaaaaaaccgaagatggacagaggcgggaagattctgggccccacacccggaaaacgtgctgtttattcacaagcccaccatggaagaaacaagaagggtcgcccttggactgcgcagccaactcgtgcgaaatcgagaacgaaagacaaaggcacacctgctttccctagagctggaccggcttgttcaggtccatga

SEQ ID NO: 14410 - DNA, 33 bp, unidentified; identical to SEQ ID NO: 6956
  misc_feature 1..33: note = Synthetic
  source 1..33: mol_type = other DNA

SEQ ID NO: 14411 - DNA, 297 bp, unidentified
  misc_feature 1..297: note = Synthetic
  source 1..297: mol_type = other DNA
atggaccccaatcaaaccaacgtagtgccccccgcattacatttggtggacccacagattcaactgacaataaccagaatggaggacgcaatggggcaaggccaaaacagcgccgaccccaaggtttacccaataatactgcgtcttggttcacagctctcactcagcatggcaaggaggaacttagattccctcgaggccagggcgttccaatcaacaccaatagtggtccagatgaccaaattggctactaccgaagagctacccgacgagttcgtggtggtgacggcaaaatga

SEQ ID NO: 14412 - DNA, 435 bp, unidentified
  misc_feature 1..435: note = Synthetic
  source 1..435: mol_type = other DNA
ttgcggcacttcttaggcttatttaaaaccatgcaggctatgctaccagtcattttaattttgctactaccctgcattcccctagcttccaccgccactcgcgctacacctgaacaacttagaaaatgcaaatttcaacaaccatggtcatttcttgattgctaccatgaaaaatctgattttcccacatactggatagtgattgttggaataattaacatactttcatgtacctttttctcaatcacaatataccccacatttaattttgggtggaattctcccaatgcactgggttacccacaagaaccagatgaacatattccactacaacacatacaacaaccactagcactggtacagtatgaaaatgagccacaaccttcactgccccctgccattagttacttcaacctaaccggcggagatgactga

SEQ ID NO: 14413 - DNA, 33 bp, unidentified; identical to SEQ ID NO: 6946
  source 1..33: mol_type = other DNA
  misc_feature 1..33: note = Synthetic

SEQ ID NO: 14414 - DNA, 189 bp, unidentified
  source 1..189: mol_type = other DNA
  misc_feature 1..189: note = Synthetic
ctgggttctgctgcgcttcatctagaaaagatgaagatggtgggtagggattgggaagaagaatctgaccttccatttaagatttggagaaagtttgctgtttgcaagtctgtcaggtttgacagttgggaagagggaaattttataagagtacacggagaccatgatgtattttcagatttccggtaa

SEQ ID NO: 14415 - DNA, 219 bp, unidentified
  source 1..219: mol_type = other DNA
  misc_feature 1..219: note = Synthetic
atgtcggtttcgtttattggaaaaaggttgggagatacggggtggtgctcgagcgagagcactggcaggggtggcaaaacgcagttgagcggggtatgcgtgttcagttgggcggcaggggcatgcggccttagcggctcgggctggcgtgctgttttccgtgttgccgacggcggcgcggtccgtcgagaccggcggaccgcggagcggaggaggtga

SEQ ID NO: 14416 - DNA, 66 bp, unidentified; identical to SEQ ID NO: 6964
  misc_feature 1..66: note = Synthetic
  source 1..66: mol_type = other DNA

SEQ ID NO: 14417 - DNA, 6633 bp, unidentified
  source 1..6633: mol_type = other DNA
  misc_feature 1..6633: note = Synthetic
atgatggctacccaacatacacaatatcctgatgcaagattgtcttccccaattgtcttagaccaatgtgacctagtgacaagagcatgtggactttactctgagtattcgctgaaccctaaactaaagacatgccgtttaccgaaacatatctatagattaaaatatgacactattgttttacgatttattagtgatgtccctgtagctacaatcccaatagactacattgctccgatgttaataaatgttctggcagatagtaaaaatgtaccattggaacctccctgcttgagtttcttggatgaaatagtcaattataccgtgcaggatgcagccttccttaattattacatgaatcagattaaaacacaggaaggagtaattacagatcaattaaaacagaacattcgtagggtcattcacaaaaacagatatctatctgctctattcttctggcatgatcttgccatcctcacccgtcgagggagaatgaaccgaggaaatgtgcgctccacttggtttgtaacgaatgaggttgttgacattctaggatatggtgattatatcttctggaagatccctattgctctattaccaatgaacacagctaatgttccacatgcatcaactgactggtaccaacctaatatcttcaaggaggctattcaaggacacacacatattatttcagtctctacagccgaggtccttattatgtgtaaggatcttgtcacaagtcgttttaatacccttctgattgctgagttagccaggttggaagatccagtgtctgctgattatccactagtagataatattcaatctctgtataacgcaggagactacctgttgtccatattgggatcagaggggtacaaaataatcaaatatctcgaacctctgtgtttggctaagattcaactatgttcccaatatacagaacgaaaagggcggtttttaacccagatgcatcttgcagttattcagacattgcgtgaactcctccttaatagagggttgaaaaaatcacaattgtctaaaatccgcgagtttcaccaactgttgctcagactccgatctacaccacaacaattatgtgaattattttcaatccaaaaacactggggccacccagttctgcatagtgaaaaggccatccaaaaggttaaaaatcatgcaacagttctaaaggcattgcggccgattatcatctttgaaacgtattgtgtattcaagtatagtgttgcaaaacatttctttgatagtcaaggcacttggtacagtgtgatatcagaccgatgtttaacgccgggattgaattcctacattaggcgaaatcaattccctccacttccaatgatcaaagatcttttatgggaattttaccatttggatcatcctccattattctccacgaagatcattagtgacctcagcattttcattaaagaccgcgcaacagcagttgaacaaacctgttgggatgcagtttttgagcctaacgttttgggctacagtccaccttatcgattcaataccaaacgtgtacctgaacaattcctggagcaagaggatttttctattgagagtgtcttacaatacgcccaagaacttaggtacttattgccccagaatcgaaatttttctttttcattgaaggaaaaagaattaaatgttggtaggacatttggaaaattgccttatttaaccaggaatgtccaaaccctctgcgaagcattacttgcagatggtttggctaaagcctttccaagcaatatgatggttgtcacagagagggaacaaaaggagagcctccttcaccaagcatcctggcaccatacaagtgatgatttcggagagcatgccacagttcgtggaagtagttttgtcacagacctggaaaaatacaatctggccttcaggtatgaattcacagctcccttcatcaaatattgcaaccaatgctatggggttcgcaatgtctttgattggatgcacttcctaattccgcaatgttacatgcatgttagtgattattataacccaccacataatgtaaccttagagaatagggaatatccccccgaaggaccaagtgcttatagaggccaccttggcggtattgaggggcttcaacaaaagttatggactagtatctcatgtgctcaaatctcattggtagagatcaagaccgggttcaaattgcgatcagcagtcatgggggataatcaatgtattacagtattatcagtctttccactagaatctagtccgaatgagcaggagagatgcgcagaagacaatgcagccagagtggctgctagcttggccaaagtcacaagtgcctgtgggatattcctcaagcctgatgagactttcgtacactcaggctttatctattttggcaaaaagcaatacttgaacggaattcaattacctcaatcactcaagacagcagctaggatggcccctctctcagatgcaatttttgatgacttgcaaggtacacttgccagtataggaactgcctttgagcgatcaatctccgaaactagacatattttaccatgccgtgttgcagctgcctttcatacatatttctctgttcggatcttacaacatcatcaccttggtttccataagggttcagaccttggacaattggcaatcaataaacctcttgatttcgggaccattgcactatccttagcagttcctcaggtattgggtggattatccttcctaaatccagaaaagtgcctttatcgcaacttgggtgatcctgtaacttcaggcctatttcagttgaagcattatctgtcaatggtgggtatgagtgatatctttcatgcacttattgcaaaaagcccagggaattgtagcgcaattgactttgttctaaacccaggcgggttaaatgtccctggatcacaggatttaacatctttccttcgtcagattgtcagaaggagtatcacactttcggcaaggaacaagttaatcaacacgttatttcacgcttctgcagatcttgaagacgaattagtatgtaaatggttactttcttcaacgcccgtgatgagccgttttgcagccgatattttctcacgaacaccaagcgggaaaagattacaaatcttgggatacctcgagggaaccagaactttattagcatccaaaatgataagcaataatgcagagacaccaatcttggagaggctcagaaaaataacacttcaaagatggaatctatggtttagttacctagaccattgtgacccagctttaatggaagcaattcaaccaattaagtgtactgttgatattgctcaaattcttagagaatactcctgggctcatatccttgatggtagacagttaataggggcaacactgccatgtatacctgagcagttccaaaccacatggttaaaaccttacgagcaatgtgtggaatgttcatccacaaacaattctagtccatatgtatcagttgcattaaaaaggaacgtggttagtgcttggcctgatgcatctagattggggtggacgattggtgatgggattccctacataggctcaagaactgaggacaaaataggtcagcccgctattaagccgaggtgcccatcagctgcattaagagaagctattgaattgacctctaggttgacctgggtcactcaaggtagtgcaaacagcgatcagttaattcgcccttttcttgaggcaagagtaaacttgagtgtacaagagattcttcaaatgaccccctcacattactccggtaatattgtgcatcggtataatgatcagtatagccctcactcctttatggctaaccgcatgagtaacacagcaacgcgcttgatggtatctaccaacacactaggagagttttccggagggggtcaggctgcacgtgatagcaacattatatttcaaaatgtgattaactttgcagtggccttgtatgacattaggtttcggaacacttgtacatcttctattcaatatcacagggcccatattcacctgacgaattgttgtacgagggaagtaccggcccaatacttaacatacacaaccacgctaaatctagatttgagtaagtaccgtaataatgaactgatttatgattcagatccactaagaggaggtctcaactgcaacttatcgattgacagtcctttgatgaagggcccacgtttaaatattattgaggatgacttaatacggttgccacatttatccggctgggaattagcaaaaacagtcttgcaatcaataatctctgatagtagcaattcatcaacagatcccattagcagcggtgaaacaagatccttcacaacccacttcttaacgtatcccaaaatagggcttctatacagttttggagccctcataagtttttatttgggtaatactattctatgcacgaaaaagatcggactcacagaatttctatactatctccagaatcagatccacaacttatcacatagatcccttcgaatcttcaaaccgacatttagacactcaagtgtcatgtccaggttgatggatatagaccccaacttctcaatatatattggtgggactgcaggtgaccgtggattatcggacgctgcaagattatttctccgaattgcaatttcaactttcttgagctttgttgaggagtgggttatctttaggaaggcaaacatcccactatgggttatctatcctctcgaaggccaacgctctgatcctcctggcgaatttttgaaccgagtaaaatctctaattgttgggactgaagatgataaaaataaaggctctatactttcaagatctggagagaaatgctcttcaaatctagtttataattgcaagagtacagcaagcaattttttccatgcatcattggcttactggagaggtcgacatagacctaagaagactataggtgcaactaacgcgacaacagctccacatatcattttgccactgggaaattctgatcgaccgcctggcctagaccttaataggaacaatgatactttcattcctaccagaattaaacagatagtccaaggagactctagaaacgacagaacgaccaccacgagatttccacccaaaagtaggtccactccaacatcagcaaccgagcctcctacaaaaatgtatgagggttcgacaacccaccaagggaaattaacagatacacatttggatgaggatcacaatgccaaagagttcccatccaatccgcatcgtttagtagtaccattctttaaattaacaaaagatggggaatacagcatcgaaccttctcctgaagaaagccgcagtaatataaaagggttacttcaacatttaagaaccatggttgatactaccatatattgtcgcttcactggaattgtttcatcaatgcattataagttagatgaagtactatgggaatataataaatttgaatcagctgtaaccctagcagaaggggagggttcaggtgccttactactgatccaaaaatacggcgttaagaagttatttttgaatacacttgctactgaacatagtattgagagtgaagtgatatcaggttacaccactccaaggatgctactcccaattatgcctaaaacacatcgtggtgagctagaggtcatattaaataactcagctagtcaaataactgatattacacatcgagattggttttcaaatcaaaaaaataggattccaaatgatgctgatattattaccatggatgctgaaactacagaaaacttagatcgttccagattatatgaagcagtatatacgattatttgtaatcatatcaatcctaaaactttgaaagtggtcatcttaaaagtcttcctcagcgatttggatgggatgtgctggattaacaattatcttgctcctatgtttggatcaggatatttaatcaaacctataacatcaagtgcaaagtcaagtgagtggtatttatgcttatctaatctactttcaaccttgagaactactcagcatcaaacccaggcaaactgtctccatgtcgtacaatgtgctcttcaacagcaagtacaaagagggtcatattggctaagtcatcttaccaaatacaccacaagtagattgcacaatagttatattgcatttggttttccttcattagagaaggtcctatatcataggtataaccttgttgattcgagaaatggaccattagtttctataacgagacaccttgccctcctccaaactgagatccgggagttggtaactgattataatcagctgcgacaaagtcgaacccagacttatcatttcataaaaacatccaagggacggataactaaactagtgaatgattatctaagatttgagttggttatacgggctcttaaaaataattctacatggcaccatgagttatacttgctaccagaacttataggtgtttgccatcgatttaatcatacacgtaactgtacatgcagtgaaaggttcctggttcaaactttatatctacaccgaatgagtgatgctgagataaaacttatggaccggctcaccagcctagtcaatatgtttcctgaaggtttcaggtctagttcagtctaa

SEQ ID NO: 14418 - DNA, 762 bp, unidentified
  source 1..762: mol_type = other DNA
  misc_feature 1..762: note = Synthetic
attccaccctccttcctccaggccatgcgcaagtactcccccttccgaaacggatacatggaacccacccttgggcaacacctcccaaccctgtcttttccagaccccggcctccggccccaaaacctgtacaccctctggggagactctgttgtctgcctgtacctctaccagctctccccccccatcacctggcccctcccgccccatgtgattttttgccaccccggccagctcggggccttcctcaccaatgttccctacaagcgtatggaagaactcctctataaaatttcccttaccacaggggccctaataattctacccgaggactgtttaccaaccacccttttccagcctgctagggcccccgtcacgttgaccgcctggcagaacggcctccttccgttccactcaaccctcaccactccaggccttatttggacatttaccgatggcacgcctatggtttccggaccctgccccaaagatggccagccatctttagtactacagtcctcctcatttatatttcacaaatttcaaaccaaggcctaccacccttcatttctactctcacacggcctcatacagtactcctcctttcacaatttacatctcctttttgaagaatacaccaacatccccgtttctctactttttaacgaaaaagaggcaaatgacactgaccatgagccccaaatatcccccgggggcttagagcctcccgctgaaaaacatttccgcgaaacagaagtctga

SEQ ID NO: 14419 - DNA, 54 bp, unidentified
  misc_feature 1..54: note = Synthetic
  source 1..54: mol_type = other DNA
atggactcccatagacatgatccatctgagttgccccaacaacctattatctga

SEQ ID NO: 14420 - DNA, 1767 bp, unidentified
  misc_feature 1..1767: note = Synthetic
  source 1..1767: mol_type = other DNA
atggaacagcagcaggcaccggaccccgcaatgcgggcggcgctgcagagccagccgtccggcattaactcctcggacgattggacccaggccatgcaacgcataatggcgctgacgacccgcaaccccgaagcctttagacagcaaccccaggccaaccgcctttctgccatactggaggccgtagtgccctcccgctccaaccccacccacgagaaggtcctggctatcgtgaacgcgctggtggagaacaaggccatccgtcccgatgaggccgggctggtatacaatgctctcttggagcgcgtggcccgttacaacagcagcaacgtgcaaaccaacctggaccggatggtgaccgatgtgcgcgaggccgtgtctcagcgcgagcgattccagcgcgacgccaacttggggtcgttggtagcgctaaacgctttcctcagcacccagcccgccaacgtgccccgtggtcagcaagactatacaaactttttgagtgcattgagactcatggtagctgaggtgccccagagcgaggtgtaccagtccgggccagattacttcttccagaccagcagacagggcttgcagacagtgaacctgactcaggctttcaagaacctgaagggtctgtggggagtgcacgccccagtaggggatcgcgcgaccgtgtctagcttgctgactcccaactcccgcctgctgctgctgctggtatccccctttactgacagcggtagcattgaccgcaactcgtacttgggctacctgcttaacctgtatcgcgaggccataggacagagccaggtggacgagcagacctatcaagaaatcacccaagtgagccgcgccctgggtcaggaagacacgggcagtttggaagccaccctgaacttcttgctaaccaaccggtcacagaagatccctcctcagtatgcgcttaccgctgaggaggagcggatcctcagatacgtgcaacagagcgttggactgttcctgatgcaggagggggcgacacctaccgccgcgctggacatgacagctcgaaacatggagcccagcatgtatgctagtaacaggcctttcattaacaaactgctggactacctgcacagggcggccgccatgaactctgattatttcaccaatgctatcctgaacccacactggctgcccccacctggtttctacactggcgagtacgacatgcccgaccccaatgacgggttcctgtgggacgatgtggacagcagcatattttccccgcctcccggttatacagtttggaagaaggaagggggcgatagaagacactcttccgtgtcgctatccggaacggctggtgctgccgcgaccgtgcccgaagctgcaagtcctttccctagcttgcccttttcactaaacagcgttcgcagcagtgaactggggagaataacccgcccgcgcttgatgggcgaggatgagtacttgaatgactctttgctgaggccagagagggaaaagaacttccccaacaatggaatagagagtctggtggataagatgagtagatggaagacctatgcgcaggatcacagagacgagcccaggatcttgggggctacaagcagaccgatccgtagacgccagcgccacgacaggcagatgggtcttgtgtgggacgatgaggactctgccgatgatagcagcgtgttggacttgggtggaagaggagggggcaacccgttcgctcatctgcgtcccagattcgggcgcatgttgtaa

SEQ ID NO: 14421 - DNA, 144 bp, unidentified
  misc_feature 1..144: note = Synthetic
  source 1..144: mol_type = other DNA
ataaaatattgcaatatggcagtctgggagtttttttgggaggtttgggcattggaacagccagaggctctggaggaagaattggttatactcccctcggtgagggtggtggggttagagttgctactcgtccaactccagtaa

SEQ ID NO: 14422 - DNA, 2298 bp, unidentified; identical to SEQ ID NO: 13415
  source 1..2298: mol_type = other DNA
  misc_feature 1..2298: note = Synthetic

SEQ ID NO: 14423 - DNA, 141 bp, unidentified; identical to SEQ ID NO: 13416
  source 1..141: mol_type = other DNA
  misc_feature 1..141: note = Synthetic

SEQ ID NO: 14424 - DNA, 84 bp, unidentified; identical to SEQ ID NO: 6983
  misc_feature 1..84: note = Synthetic
  source 1..84: mol_type = other DNA

SEQ ID NO: 14425 - DNA, 84 bp, unidentified; identical to SEQ ID NO: 6983
  source 1..84: mol_type = other DNA
  misc_feature 1..84: note = Synthetic

SEQ ID NO: 14426 - DNA, 84 bp, unidentified; identical to SEQ ID NO: 6984
  source 1..84: mol_type = other DNA
  misc_feature 1..84: note = Synthetic

SEQ ID NO: 14427 - DNA, 63 bp, unidentified; identical to SEQ ID NO: 6985
  source 1..63: mol_type = other DNA
  misc_feature 1..63: note = Synthetic

SEQ ID NO: 14428 - DNA, 21 bp, unidentified
  source 1..21: mol_type = other DNA
  misc_feature 1..21: note = Synthetic
atgccttttagcgtagtgtaa

SEQ ID NO: 14429 - DNA, 162 bp, unidentified; identical to SEQ ID NO: 12751
  source 1..162: mol_type = other DNA
  misc_feature 1..162: note = Synthetic

SEQ ID NO: 14430 - DNA, 990 bp, unidentified
  source 1..990: mol_type = other DNA
  misc_feature 1..990: note = Synthetic
atgaaccccgtttcggcatcgggcgccccggcccctccgccgcccggcgacgggagttatttgtggatccccgcctctcattacaatcagctcgtcaccgggcaatccgcgccccgccacccgccgctgaccgcgtgcggcctgccggccgcggggacggtggcctacggacaccccggcgccggcccgtccccgcactacccgcctcctcccgcccacccgtacccgggtatgctgttcgcgggccccagtcccctggaggcccagatcgccgcgctggtgggggccatcgccgccgaccgccaggcgggtgggcttccggcggccgccggagaccacgggatccgggggtcggcgaagcgccgccgacacgaggtggagcagccggagtacgactgcggccgtgacgagccggaccgggacttcccgtattacccgggcgaggcccgccccgagccgcgcccggtcgactcccggcgcgccgcgcgccaggcttccgggccccacgaaaccatcacggcgctggtgggggcggtgacgtccctgcagcaggaactggcgcacatgcgcgcgcgtacccacgccccctacgggccgtatccgccggtggggccctaccaccacccccacgcagacacggagacccccgcccaaccaccccgctaccccgccaaggccgtctatctgccgccgccgcacatcgcccccccggggcctcctctatccggggcggtccccccaccctcgtatcccccagttgcggttacccccggtcccgctcccccgctacatcagccctcccccgcacacgcccacccccctccgccgccgccgggacccacgcctccccccgccgcgagcttaccccaacccgaggcgcccggcgcggaggccggcgccttagttaacgccagcagcgcggcccacgtgaacgtggacacggcccgggccgccgatctgtttgtgtcacagatgatggggtcccgctaa

SEQ ID NO: 14431 - DNA, 606 bp, unidentified
  source 1..606: mol_type = other DNA
  misc_feature 1..606: note = Synthetic
attttttgcgagtctgtatttcaaaaatgtacaaaggtacaaaaaaagtcaaacttccatgtgtctaataaacttattcatttgagaaatgtattgcggagattattgtctcatcaatgttctggagaaattatttcggaactcttggatatcatggaaaaaaatcaaatatctacggatgatgtagatgcaaactttgtatctagttttcttaaggctaacgagagaataaataaaaaggattataagttagtctttgaaataatcaatcaagtaaaagatgagaaactgaatctgagtactgaaaagattaatgaagtagtagaaatatttaagcacttggtattcttttgccaagaaaacactccttctaagacaattaattactcattctttttggataaaatattcgatatcacttctgtaactaaaaatctaaaacctcaaactgttaaaaattatacgaaaaataatagtaaccaattagtatgggaaaactttttagcacatatgagatctaaaaaacgtgttactatggtagaggattatggtcacgattatgtttttgtggacgagcgtttttccacgtgctcattagaagtataa

SEQ ID NO: 14432 - DNA, 24 bp, unidentified
  misc_feature 1..24: note = Synthetic
  source 1..24: mol_type = other DNA
atgatccgcgaacgatatttgtga

SEQ ID NO: 14433 - DNA, 582 bp, unidentified
  misc_feature 1..582: note = Synthetic
  source 1..582: mol_type = other DNA
atgtccattctcatctcgcccagtaataacaccggttggggcctgcgcgcgcccagcaagatgtacggaggcgctcgccaacgctccacgcaacaccccgtgcgcgtgcgcgggcacttccgcgctccctggggcgccctcaagggccgcgtgcggtcgcgcaccaccgtcgacgacgtgatcgaccaggtggtggccgacgcgcgcaactacacccccgccgccgcgcccgtctccaccgtggacgccgtcatcgacagcgtggtggccgacgcgcgccggtacgcccgcgccaagagccggcggcggcgcatcgcccggcggcaccggagcacccccgccatgcgcgcggcgcgagccttgctgcgcagggccaggcgcacgggacgcagggccatgctcagggcggccagacgcgcggcttcaggcgccagcgccggcaggacccggagacgcgcggccacggcggcggcagcggccatcgccagcatgtcccgcccgcggcgagggaacgtgtactgggtgcgcgacgccgccaccggtgtgcgcgtgcccgtgcgcacccgcccccctcgcacttga

SEQ ID NO: 14434 - DNA, 1149 bp, unidentified
  source 1..1149: mol_type = other DNA
  misc_feature 1..1149: note = Synthetic
attgaagacgacttcaaccccgtctacccctatgacacctcctcaactcccagcattccctatgtagctccgcccttcgtttcttccgacgggttacaggaaaaccccccgggagttttagcactcaagtacactgaccccattactaccaatgctaaacatgagcttactttaaaacttggcagcaacataactttacaaaatgggttactttcggccaccgttcccactgtttctcctccccttacaaacagtaacaactccttgggtttagccacatccgctcctatagctgtgtcagctaactctcttacattggccaccgccgcaccactgacagtaagcaacaaccagcttagtattaacactggcagaggcttagttataactaacaatgccgtagcagttaatcctaccggagcgttaggctttaacaacacaggagctttacaattaaacgctgcgggaggaatgagagtggacggcgccaacttaattcttcatgtagcatacccctttgaagcaatcaaccaactaacactgcgattagaaaacgggttagaagtaaccaacggaggaaaactcaacgttaagttgggatcaggcctccaatttgacaataacggacgcattaccattagtaatcgcatccagactcgaggtgtaacatccctcactaccatttggtctatctcgcctacgcctaactgctccatctatgaaacccaagatgcaaatctatttctttgtctaactaaaaacggagctcacgtgttaggtactataacaattaaaggtcttaaaggagcactgcgggaaatgaacgataacgctttatctgtaaaacttccctttgacaatcagggaaatttactcaactgtgccttggaatcatccacctggcgttaccaggaaaccaacgcagtggcctctaatgccttaacatttatgcccaacagtacagtgtatccccgaaacaaaaccgccgacccaggcaacatgctcatccaaatctcgcctaacatcaccttcagtgtcgtctacaacgagataaacagtgggtatgcttttacgtttaaatggtcagccgaaccgggaaaaccttttcacccacccaccgctgtattttgctacataactgaacaataa

SEQ ID NO: 14435 - DNA, 66 bp, unidentified; identical to SEQ ID NO: 6995
  misc_feature 1..66: note = Synthetic
  source 1..66: mol_type = other DNA

SEQ ID NO: 14436 - DNA, 15 bp, unidentified
  source 1..15: mol_type = other DNA
  misc_feature 1..15: note = Synthetic
atgttaacattgtga

SEQ ID NO: 14437 - DNA, 147 bp, unidentified; identical to SEQ ID NO: 7000
  source 1..147: mol_type = other DNA
  misc_feature 1..147: note = Synthetic

SEQ ID NO: 14438 - DNA, 45 bp, unidentified; identical to SEQ ID NO: 7001
  misc_feature 1..45: note = Synthetic
  source 1..45: mol_type = other DNA

SEQ ID NO: 14439 - DNA, 21 bp, unidentified
  misc_feature 1..21: note = Synthetic
  source 1..21: mol_type = other DNA
atggacatgttcagcacgtag

SEQ ID NO: 14440 - DNA, 537 bp, unidentified
  misc_feature 1..537: note = Synthetic
  source 1..537: mol_type = other DNA
atgcgcgtgatctgcgtgagttcgtccttggtcatcaccggcgtgctggtggacttcaggatcaggcgccggtacagctgttttttgtccatttatagggttacaaatggcagacgctaccacgctctccgtgaacgggctggaactgcagtacgtgcgcgcgcacgagcgcgccagcgtgcgctacgcgcgcgtctccaccgtgtgctttttcttgctggtgctgctggcgagcagcgtgctcttcctctaccagacctccgacaacaacgtgctcgcggagctggcgcgctacgcgcgcatcaagagcgccgtgcgcagctggaagccgctgctgctagccaaggcgcgcatcgagcgcgagcgcggacgcgcgctggccagcacgcgccccgacgtcttcgagttccgctgcctagacttcggccccttcttcgtcccggtgcggctggaccgcgccagcttcctgccgcaggccgtgcgccgcgggcgcggcgacggctggatggtgaacaaggcgtcgcaggtggaccctag

SEQ ID NO: 14441 - DNA, 51 bp, unidentified; identical to SEQ ID NO: 7005
  misc_feature 1..51: note = Synthetic
  source 1..51: mol_type = other DNA

SEQ ID NO: 14442 - DNA, 6540 bp, unidentified
  misc_feature 1..6540: note = Synthetic
  source 1..6540: mol_type = other DNA
atggagacaatcaagagcattgcagatatggcgaccggtgtaactaaaaccattgatgccacaatcaattctgttaatgagatcatcactaacacagataatgcttcaggtggagatatattgactaaagttgctgatgatgcttcaaatattttagggcccaactgttatgcgacaacatctgagccagaaaacaaggatgtggtgcaagcaaccaccactgtgaacaccactaatctgacacagcacccatcagcaccaacgttaccatttacaccagacttttcgaatgttgacacgtttcattcaatggcttatgatactacaactggtagtaagaaccctaataagttagttaggttaacgacacatgcttgggctagtaccctacagaggggtcatcagattgatcatgttaatctaccagttgacttctgggatgaacagaggaaaccagcttatggccatgctaaatattttgcagctgttcggtgtggatttcattttcaagtacaggtcaatgtgaatcagggaactgctgggagtgctttggtagtgtatgaaccaaagccagtagttgattatgataaggatttggaatttggagcatttaccaatttaccacatgtgttaatgaacttggccgagactacccaggccgacttatgtatcccctatgttgcagatacaaactatgtgaagactgattcatctgacttagggcaattgaaagtttatgtgtggactccccttagcattccatcaggctcatctaaccaagtggacgtgactatattgggtagcttattacaattggatttccaaaacccaagggtgtatgggcaaaatgttgacatttacgatacagcaccctctaaaccaattccattgaggaagactaaatatttgactatgagcacaaaatacaaatggacaagaaataaagtagacatagctgaaggtccaggttcaatgaacatggcaaatgtacttagtacgacagcagcacaatcagtagcattggttggggagagggctttttatgatcccaggactgctggtagcaaatctagatttgatgacttagtaaaaatctcacagttgttttcagttatggcagattccaccactccatctgccaatcatggaatagaccaaaagggttatttcaaatggtctgccaattctgatccacaggcaatagtgcatagaaacttagttcatttaaatctatttccaaatttgaaggtctttgaaaacagttattcatacttcagaggttctcttataatcaggttaagtgtttatgctagtacattcaacagaggccgtttgaatgggttctttccaaattccagtacagatgaaacttctgaaattgataatgccatctacaccatatgtgatattggatctgacaatagttttgagattactatcccttattcattttccacttggatgaggaagacacatggtaaacctattggcctattccagattgaagtcctaaataggttaacatacaattactccagtccaaatgaggtatactgcatagtgcaaggtaaaatgggacaagacgccaaatttttctgccccactgggtctttagtaactttccagaattcatggggttcccaaatggacttgactgacccgctttgcatagaagattcagtagaagattgtaagcaaaccattacaccaacagaattgggactaacctcagcacaagatgatggccctttaggaaatgacaaaccaaattattttcttaactttaagtctatgaatgttgatatctttactgtcagtcacaccaaagtagacaatatttttggacgtgcttggtttgcccatgttcatgacttcactaatgatggcctatggagacagggattggaatttccaaaggaagggcacggtgccctatcacttctgtttgcctactttactggtgaattaaacatccatgttctatttcttagtgataggggttttctcagagttggacatacatatgacactgagacaaacagaaccaattttttatcatccagtggcataattacagtaccagcaggagaacagatgacactatctgtcccctcttattccaacaagccattacggacagttagatcatccaatgctttaggttatttactgtgtaaaccattgctaactggtaccagctctggtagaatagagatattccttagcttgagatgtccaaatttcttctttcccttaccagcaccaaaaccagcaacacgtaaatatagaggagatttggcaacatggtctgaccaaagtccctatggtcgtcaggggaaaaaacagctgatgaaactggcttatttagatagaggtttttacaagcactatggaattgttgtaggtgatgatgtttaccagttggattcggatgacatttttaagacagctttaactggtaaggccaaatttactaaaacaagattaacaccagattgggttgtggaggaagagtgtgaattagactatttcagaattaagtatttggaatcttctgtcaattctgaacacatcttttctgtagacaacaattgtgagaccatagcgaaggacatatttggttcacattcattaagtcagcaccaacaaatagggttaatcggaacaatactcttaactgctggccttatgtcaaccattaaaacaccagtaaatcctaccacaatcaaagagttctttaatcatgctatagaaggtgatgaacaaggattgtccttgcttgtgcaaaaatgtactacatttttctcatctgcagcaactgagttattggacaatgacttagtcaagtttattataaaaatattggttagaatactctgttatatggtactttactgccataagccaaacattttaacaactgcctgtctatccactctattagttatggatgttacatcatcttctgtgttatccccgtcatgtaaggccttgatgcaatgcctgatggatggggatgtaaagaaattagctgaggtggttgcggagtcaatgtccaatacagacgatgatgagatcaaggaacagatttgtgacacagtgaaatatactaaacaaattctttccaaccaaggaccattcaaaggcttcaatgaaatatctactgctttcagacatattgattggtggatacaaactttgttgaaaattaaggatatggtactatcagtatttaagcccagtgtggagaagagagcagttgaatggttggaaagaaataaagagcatgtgtgcagtatacttgattatgcttctgacattatagttaagtcaaaggaccagacaaaaatgaaaacacaagaattttatcagcgttacaatgattgtttgtctaaatttaaacccattatggcaatgtgctttagaagctgtcacaatagtattagtaacacagtctacagattattccaggaattagctagaatacccaacagaatggccacacaaaatgacttaatccgagtagaaccaattggaatttggatccaaggtgagcccggtcagggcaaatcattcctaacacacacactttctaaacaactacaaaagacttgtggattacagggtatttataccaacccaactgcaagtgaattcatggatggatatgataatcaggatatacatttgattgatgatttgggccaaacaaggaaggagagggacattgagatgttgtgtaattgtatatcatcagatcccgatatagtccctatggcccaccttgaggaaaaaggcaaattctacacaagcaaattagttatagccaccacaaataaacctgatttttccagtacagtcttattagattcaggtgctctgaggagaaggtttccatacattatgcatattagagctgctaaacattatagcaaatcaggcaaactaaatgtctcccaagctatgccacatatgtcaaccggcgagtgttgggaagtctctaagaatggtagagactgggaaactttgaaactgaaagagctaatagataagatcacagttgactacaaagagagaattgcaaattacaacacttggaagaagcagttagaggaccagaccctcgatgatttggatgatgcagtttcatacatcaagcacaactacccagatgcaattccgtatattgatgaatatctgaatattgaaatgtcaacactaattgaacaaatggaagcttttattgaaccaaaacctagtgttttcaaatgttttgccagcagagttggagataaaattaaagaagcttctagggaggttgttaaatggttctcagataaattaaaatctatgctaaattttgtagaaaggaacaaggcatggttaactgtggtttcagcagtaactagtgccattggtatcctcttactggtcaccaaaatttttaaaaaagaagaatctaaagatgagagggcttacaaccctacattaccagtggccaaaccaaaaggcactttccctgtttcacagagggagttcaagaatgaagcgccatatgatggccaactggagcatatcatctcccagatggcatacatcactggctcaaccacaggccacataacccattgtgcaggttaccagcatgatgagatcatactgcatggacactcaatcaaatatttagaacaagaagaagaactgacattacattataagaataaagttttcccaattgagcaaccatctgtcactcaggtaacgcttggtggtaaacctatggatttggccattgtaaaatgtaaattgccattcagattcaagaaaaactctaaatattatactaataaaattgggactgagagcatgttgatctggatgactgagcagggtatcatcacaaaagaagttcagagggtgcatcattctggtggcattaaaactagagaggggactgaaagcactaagaccatcagctacacggtgaaatcttgcaaaggtatgtgtggtggacttttgatctcaaaagtggaaggcaattttaagattcttggtatgcacattgctgggaatggtgagatgggtgtagctatcccctttaattttcttaaaaatgacatgtctgatcagggaattgttactgaagtcacacccatacagcccatgtacattaacaccaaatcccaaattcacaagagcccagtttatggtgctgtggaagttaaaatgggcccagctgtactgagtaaatcggacactagactagaagaaccagtggattgtttggtcaagaagtcagcatcaaaatatagggtcaataaatttcaggtcaacaatgagctatggcagggggttaaagcttgtgttaagtcaaagtttagagaaatatttggtgttaatggtattgttgacatgaaaacagctatattaggaacttcccatgttaactcaatggatctcagtacttctgcaggatattcatttgtcaaatctgggtacaaaaagaaagatctaatttgtttagaaccattctcggtgagcccaatgttagagaaattagtacaagagaaattccacaacctcctaaaaggaaatcagattacaaccatttttaatacatgtctcaaggatgagttgaggaagctggataaaatcgcaaccggtaaaactcgatgtattgaggcttgtgaaatagactattgcattgtttacagaatgattatgatggagatatatgacaaaatttaccaaactccatgttactattcagggcttgctgttggtatcaatccgtacagagattggcacttcatgattaatgcactcaatgattacaattatgaaatggactactcccaatatgatggatcacttagttcaatgctattgtgggaggctgtgcaggtcctagcctattgccatgattcacctgatctcgttatgcaactacacaaaccagtgattgactctgatcacgtggtctttaacgagaggtggctgatacatggtggtatgccttcaggatctccctgtaccacagttctgaattcactttgtaatctgatgatgtgcatctacactacaaatctaattagccctgggattgattgcttaccaatagtttatggggatgatgtcatcttatcccttgacaaggaaatagaaccagagagactgcaaagtatcatggcagaatcatttggagctgaagtgaccggttcacgcaaggacgaaccaccatcattgaaaccaaggatggaggttgaattccttaagcgcaagccaggttactttccagagtctacatttatagtaggtaaattggacactgaaaacatgatacaacatctaatgtggatgaaaaatttcagcacatttaagcagcaactccaatcctacttgatggagttatgcctccatggaaaggacacttaccaacactacgtcaaaatcttgaatccttatctcaaggaatggaatattccagtggatgattatgaagtggttattggtaagttggtgcccatggtgtttgattaa

SEQ ID NO: 14443 - DNA, 645 bp, unidentified
  misc_feature 1..645: note = Synthetic
  source 1..645: mol_type = other DNA
attgctacttgcatgatggctgagcccacaggctccggcgagcaggagctcagggccatcatccgcgacctgggctgcgggccctacttcctgggcaccttcgataagcgcttcccgggattcatggccccgcacaagctggcctgcgccatcgtcaacacggccggccgcgagaccgggggcgagcactggctggccttcgcctggaacccgcgctcgaacacctgctacctcttcgaccccttcgggttctcggacgagcgcctcaagcagatctaccagttcgagtacgagggcctgctgcgccgtagcgccctggccaccgaggaccgctgcgtcaccctggaaaagtccacccagaccgtgcagggtccgcgctcggccgcctgcgggctcttctgctgcatgttcctgcacgccttcgtgcactggcccgaccgccccatggacaagaaccccaccatgaacttgctgacgggggtgcccaacggcatgctccagtcgccccaggtggaacccaccctgcgccgcaaccaggaggcgctctaccgcttcctcaactcccactccgcctactttcgctcccaccgcgcgcgcatcgagaaggccaccgccttcgaccgcatgaacaatcaagacatgtaa

SEQ ID NO: 14444 - DNA, 606 bp, unidentified
  source 1..606: mol_type = other DNA
  misc_feature 1..606: note = Synthetic
attttttgcgagtcggtatttcaaaaatgtacaaaggtacaaaaaaagtcaaacttccatgtgtctaataaacttattcatttgagaaatgtattgcggagattattgtctcatcaatgttctggagaaattatctcggaactcttggatatcatggaaaaaaatcaaatatccacggatgatgtagatgcaaattttgtatctagttttcttaaggctaacgagagaataaataaaaaggattataagttagtctttgaaataatcaatcaagtaaaagatgagaaactgaatctgagtacagaaaagattaatgaagtagtagaaatatttaagcacttggtattcttttgccaagaaaacactccttctaagacaattaattattcattctttttggataaaatattcgatatcacttctgtaactaaaaatctaaaacctcaaactgttaaaaattatacgaaaaataatagtaaccaattagtatgggaaaactttttagcacatatgagatctaaaaaacgtgtaactatggtagaggattatggacacgagtatgtttttgtagatgagaggttttctacttgctcattagaagtataa

SEQ ID NO: 14445 - DNA, 108 bp, unidentified; identical to SEQ ID NO: 7011
  misc_feature 1..108: note = Synthetic
  source 1..108: mol_type = other DNA

SEQ ID NO: 14446 - DNA, 7767 bp, unidentified
  source 1..7767: mol_type = other DNA
  misc_feature 1..7767: note = Synthetic
gtgacaatggcaggaaacatgatttgcaacgtgttcgctggtcttgctactgaaatttgctcccctaaacaaggacctctccttgacaacgaattgccccttccacttgaattggctgaatttccaaacaaagacaacaactgctgggttgcggcactgtctcactattacaccctgtgtgacgtgaccaatcacgtgactaaggtcactccaaccacttctggcattcggtattatctcacggcttggcagtccattctccagacagatttgtttaacgggtattatcctgctgcttttgccgttgaaacaggactttgtcacgggcctttccccatgcaacagcacgggtatgttaggaatgccacctcccacccctacaacttttgtctttgctctgaacccgtccctggtgaagactattggcatgcagtagttaaggtggacttgtctagaactgaggcacgtgtagacaaatggctttgcattgatgatgaccggatgtacctttcaggccctccaactcgtgtcaagctggcttcctcttacaaaatccctacttggatagagtccttggctcaattttgtttgcagttgcacccagttcagcaccgccgcacgctcgcaaactccctgcggaatgagcagtgtcgtggtgccggacactcccgccccgagggcgggcacaacaatgagtctggcaacaacggcactatagtcaacaactattatatgcagcactaccaaaattcagtggacttggatggcatgacttcacaaaacattggtggtcaaccaggctcaagttccaaccctttttcttccatcttggacattctcggaactgcgtcatctgtggcactgcttgaccaggacactgaggacgtaacacgacaacctgacagaattgtcactgttcttgacgggaacaccagtcgcacgacccagtcatcagtgggcattttgcgtggctacaactacgcaccaggcaaacacacccagccctccagtgctcaagacacccccagcaaggctgagcagtccgttgagcgaggatttacgtttcagcttgcacagtgggagacatccagaaacatttgggaccatttgacaatccctcttcccatgtgccctggtcttattaaggtctctggaatgtacaaagctttcattgaaacccacgcctacattaagaatgggtggaagattcaggtgcagtgcaatgccagccagttccacagtggctgccttttggttgccatgattcctgagtaccttagcactgcacaacaggattttcttggttcgtggcgagacaaaaccacggattctacacccggcacgtgggtgtggaacacatatgaggcttttccccccggttttcctcctcagcagattaccctgtttccccatcaatttttaaatttgagaactaacacaacggttgaccttgaggtcccgtatacaaattttgccccttcttcaagtcctactttgcattgtccttggactcttgtcatagttgtggtttcacccctgcaatttggcactggagctccaacacaggttcaaatcacaacaaccatcactcccactgattttgtggcgaacggcttgcgccaagctgtcgcacagggcattcccggcacccagccgtatgacaggcaatttgtgtccagtgaaccttctgcgcctccaccagtatacacaccatcttggttgccggagcgcagttttatacctggaaagttcactgatttcctgcaagtagctgttataccaactttggctgaagtttctgttcaaaactacaaaccagtgccttcctttccagtgagtaatgttttacagactaagcctcttgtaaatactgatttgacttttacttctatgactttccgcaacacttatgtgtctgcgctttctcttcagtacacccagtatagaggttccatttgtatggatttactttttacaggaagtgctatgtgtcaaggaaaatttgttgtgtgttatgtgcctcctggtcgggaacctcagtctttggatgaggccatgcagggcacttattctatttgggatttgggattaaactcaagttttaaatttgttgtgccctacatttctgcatcagcttacaggtttactcatgaggatgatcagccttcagccttgaatgcagtcggctggttgcaaatttaccaactcactaatttgactttcccaccaaatgttccaacacgggctgatgttttagtcttcttttctgctggttctgacttttgtttgcgttttccggtggacacttacccccgcacggagggcacagaaaacatggagactggagcagttggaccctccgacccctcagaaaccagcgactcccattcatttgctatgcccaatgttgtttcacatactaatttggaatttttgtttgataggtacttcttttctggttttgccaactcatgtgatgtgacagccaatactacccacacacacagcggcgacacccagttgaatccttttgtgacaccaaattttaaattggacaaaactgtgcgtgactacatgttacgcgccttcacttactttactgctgacttgggagtggctgttcaacccacctctgtctcctcaaagcctttgcctgccgtggactattgggtcggttggcgccccgttggcgcgccggagccaaaacttttggccttttctgcccccagtcctggtgacactgtcacagcggtgaagcgctcctctgtactgagtggaggcttctgcccaattatacactctgtgatagggcaaggtttgaatcaggtccagatgtcaataccctatactacacctttgagtgctattccaaccagttattgtggctatgcagactacaagaaaaaacccagactttttggacaccctccagctgcgcactttgggactctttccattcgggtgcgcaatgttgatctgttacctgaacagaccaagaaggaggacgaccctcttgttgacctccggtttgcattgtttactaggtttagaaatcttaaggcatacgctcccaggccttttacccgtgtgcctaattctcctcatgagcaaggaactgcttcgcgtacactcgtgcgcactaaccacataacagcagaatttgtggagaaaacacccctgaatggtttggctgcagtttttacgtcattgtctactagtggttattctactaagcttgtttctgaacccatccccgaagcaactttgtctaccattctgtctgagggtgccacaaatttttctttgttgaagttagcaggggatgttgaacttaaccccggcccaactatttggtcagtgatgcccggtggtgaactcattgaatttgctacaaaggtctctcaagtttacaagaccatcaaagaaaaatgcactgaccctaccacttggattaaagcagttcgcagactcctacggcttttggctgttgtgtctgcttggaagcatggtgattggttttccatgatttgtcttcttgttgatcttggttttgatttggctcaactttcttacaaaactttttggcaatatttgaccaaaccttttgcagatgctgggctgaaatttgactttgctagagacctcacccgtcgcttccgccgcgagcaaccccgtgcgccggaagtttctcccgaggagcagcgcatggcgtatggtgcagactttcgccaagctgtgcagtatcaggagaatcttcaggcgccccgtcggtcgtggcgagaacgcgcacaagacacctacaggtctatccggcgcacctttttcgacgactcgtcatccgagtccgaagatggagaaccggaggttcctcaattcagaccccaggtctaccctaggccacgcagtatgagagtagtcagacatcccatgacagcgcgacgcgcccaacgcgtcattgacatgggatactctgattatgaaaccgctgttgaaaatccattctttatttcagacctttcttctccagaggaggaagaaccaatcccctatgaacaagctcgcagacaagtcccgcgggttcactttcgtgaaagccgcggccctgagcccactcttcgtccgcgccctgggttgatgcatcgactcgcccagcgcgttcattgcgaggagaatcaggcccttttgtccgaggggatttcctccactctctcagttttgaatggtttcttcaatcttttcaaaaatgtgcaatggtttttggatttcctcaaaagctgctatggcaaactttccaagcaattgaaaccaatgcagtctctccgcgacaaggtgttacaaacatacgcggattccatagcagaatttatgacacccagtgcccagaagaaggagctgtacctccagaaccactatgatgctgttgaggctggacttaattcaatagctgcagcatggaaagacttggccaacaaatgctatgcttactcccgacccgaaccagtgtgtattcttttaaagggtcgcgctggtcagggaaagagtgttgcggccactgtcatcgccaaggcagtatccatagtgaacacaggcaaggaatcagtttggactcttcccacggattcagacttctttgacgggtacgctggtcaaaacgtcgtcatcattgatgaccttggccagaaccccgatgggaaagactttaggaacttttgccagatggtttcttccacagtgtttcttccccccgttgcagacttggcacacaagggtattcctttcaccagtccggtgattattgcaaccaccaacaaaaatgagaactttttacctgtcacagtttcagaccaagaagcggtcactcgccgctattggaaggtgattgatgttagcgcagatgatcagtataaaactgtggatggcaggctggactacgccaaagccacgcaacctacccagattccccctgaattggctgtgttcaaaactcatgtccctcttttgaagggcgctctgcgtgactgtcaacgaacaaatcgcagtggcgcgcgagtgcttaacctgtatgacgtgatctcggcaatttgcgttgaggttgacaggcgtgaacaattgcgctcgaacctcggtggcatctttgcccaatcacgtgacagacactaccagagagacagggaatattatgacgaatacggaactgctgaacatcgcagacgcttcgtcgaacaaaatccaacttttcattttaaggaaactgaagctgacttttatgaacgtgttgcattcctttctggcattcatggtcgaaagcaatccattcttaagaaaatcaaggagtggttcgcggacggcgtgcgtgtcagaaatcttcttggagatgcagcattggccctttctcttttgacctctattctttcattttctctcgtgatttactcgggagtgaaaacttatcaggaattctcgcgcaaacacaaacctgtgcgccaaccggtgtacaacgcgtgggaagactttgatgaggattgcatttttgagcagtcacgtgcttacaacattcctaatgtgagacaacgactgcgcaagcagctcgctgttcgtgcggagaacctctgcccctcacacgacgtcacgcctgacgtcgaggcccacattccacaagggccagtgtgcgaggtggatccaggtgtaccgctcgtagcacaaggagctagcacaggactcacagtaaattctctttcacttcttaacaatgtggttccagtgacagtgtcgaccgtaattgaaacagaaaacggtccactgtcccaaattgtttccgagtgctgtggcacatatctctacaataaagtaatgattatgcctagacacattctcataaaggactggacacacattacagctggacgcaattctgcaactcgcgaccagctggaggcagtggatgtaattgatcagtttgacatgccaagtgacgctgtcgcggttaagtttccagacaagcgcggctcctcctacaaaaacatcatgcaccaccttgcctccaccctccctattcgtggaaaaccagtttttattcttgttaacaacaatgtggcaggaagagccgtggtgcacggcacatacattggatgtacccaaaagattactacgcttgatgggtttaccttcccaaatgttagctcatacaaggctacaacccaccttggaatgtgtggtgcaccagtgattgccaatgagaatggcaatggtaaaataattggctttcactgtgctgggactggacttgttggttatgccagcaacttgacaaagatgtccgcaaacaacatctgcaaagtttggggtgacccagtcgcccagggctggacgtattttgacaccactcacactccagttcatgtcccacgcaaaaccaaattgagacccactgtcgcaatcaacacttttgagtgcgacgtggaaccagccgtcctgtccaaattcgacagacggctcgaggaacctgacagttttgagttgacccttctgcacaagaatgacaggcgctatccagaggacacttctatggacaagcacctggaggctgctgttgaggcttatgcttcctcattgtttgcacagattggtactgacaatggaatcatttcagagtatgaagctgttactggcattgagaatttggactcagtggagacaacaacgtcacctggactaccctacacgacagcggggattccaagagaggcgctgtttgacccagacaaaactcaattgattggccccgccgccgagaggctccaggagttcctccgcggtgacttttcaaagcatgtgtttcagacttttctcaaagatgagctccggagtaaggccaaagtccgggcaggcaataccagagtggtcgaggtggccgccgttgaccacgtggtggcaggccgaatgctgcttggaaaatttacagctaaaatgcatgctaacaatggattaggcattggttcagccgttggttgcaatccagatgtagactttactagatttgcttaccaaatcttggaatgggactatgtttatgacattgattacaaaaattttgatgcttcacattctccaaaagtatttcagtacctaaagaaactcttgtcccccgagaatgggttcgatgtgagactccaaaaatacattgattcattgtgttattcaaaacaccaatttggagacacttactacgaatgtgaaggggcgctgccgtctggttgcagtgctacgtcaattctaaattgtttgatgaacaacattgtgctgcgtgccgcagcgtatgatgtcttcaccaattacgaagagggcgatctcgcttttcttacgtatggtgatgatgtactactctgtgctaatcagccactgcctctggagcgctttcgcaaatcacttgcgaagcttggatacaccattactccagctgataagagttctgttttcccagaagtttcaactttggcagacgttgtgtttctcaaacgtcgatttaaacctgatgaagaattcccattcctgttcaaaccagtgatggatgtgcgcaacttacaagaccacttgcgctacgcgaagccgggcacactgcgagagaagctgctgtcaaccacggacttggcggttcatcttggaccgctggagtacgcgaggcttttccgcccatttgtggaagttgggtactgcgtgcgtgccttcggggacgcgcgcagagcttggctccgcaattttgacttgtga

SEQ ID NO: 14447 - DNA, 6561 bp, unidentified
  source 1..6561: mol_type = other DNA
  misc_feature 1..6561: note = Synthetic
attgttaatattgacattatggagacaattaagagtattgcagatatggctactggtgttgtaagttctgttgattctaccatcaatgcagtcaatgaaaaggtagaaagcgtcggtaatgaaattggaggtaatttgttaactaaagtagctgatgatgcttccaatatcctaggaccaaattgttttgcaacgactgctgaaccagagaacaagaatgtagttcaagccactactactgttaatactaccaacttgactcaacatccatcggcacctacgatgcccttttcaccagatttctccaatgtcgacaattttcactctatggcttatgacatcacaactggggacaaaaatcccagtaaattggttcgtcttgaaacccatgagtggacgccatcttgggcaagaggataccagattacacatgtagaattacctaaagttttttgggatcaccaagacaagcccgcatatggacaatcacgctactttgcggctgtaagatgtggctttcactttcaagtacaagttaatgtgaatcaaggtactgcaggcagtgccttggtagtatatgaacctaaaccagttgtcacttatgattcaaaactggaatttggagcctttacaaatcttccacatgttttgatgaatttggctgaaaccacacaggctgacttatgtatcccctatgttgctgacacaaactatgtcaagaccgattcgtcagacttagggcagttaaaagtctatgtctggactccattgtcaatccccactggatctgctaaccaagttgatgtcaccatactgggtagcttgttgcaattagacttccaaaatccaagggtatttgctcaagatgtcaacatatatgataatgcaccaaatggtaaaaagaaaaattggaagaaaattatgaccatgagcacaaaatacaaatggaccagaacaaaaatcgatatagcagaaggtcctggttcaatgaacatggcaaatgtcctttgtacaactggtgctcaatcagtggctttagtaggtgaaagagctttctatgatcctagaactgcaggcagtaaatcaagatttgatgatcttgttaagatagcccagttattctcagtgatggcagattcaaccactccatcagaaaatcatggagttgatgcaaaaggatatttcaagtggtcagcaacaacagccccccagagtattgtccacagaaatattgtctacttaagactatttccaaatttgaatgtttttgttaacagttattcatactttaggggttcattagttttaagattgagcgtctacgccagtactttcaatagaggtcgattgaggatgggcttcttccccaatgccacaacggactcaacttccaccttggacaatgctatatacacaatatgtgatataggtagtgacaatagttttgaaattacaatcccttactctttttccacttggatgaggaaaacaaatggccacccaattggattgtttcaaattgaagtcttaaacaggctcacatacaacagttctagtccatcggaggtttattgtatagtccaaggtaaaatgggacaagatgccaggttcttctgcccaactggttctgttgttacattccagaattcatggggttcacagatggatttaaccgaccctctttgtattgaagatgacacagaaaattgcaaacaaacaatgtctccaaatgaactaggactcacttcagcccaagatgatggcccacttggtcaagaaaagccaaattattttctcaattttaggtcgatgaatgtggacatttttactgtatcacatactaaagtagataacctatttgggcgggcatggttttttatggagcatactttcaccaatgagggacaatggagagtgccattggaatttccaaaacaaggtcatgggtccttatcactgttgtttgcttattttactggtgaactgaatatccatgttctgttcctaagtgagagggggtttctgagggttgcacacacatatgacactagtaatgatcgagtcaattttctgtcatcgaacggtgtaataactgtaccagccggagagcagatgacactttcagctccctactattcaaacaaaccattaagaactgtcagagataacaatagtcttggttatttgatgtgcaagcccttcttgactggaacctctactggtaaaattgaggtttatcttagcctgagatgtccaaatttctttttccctcttcctgcccctaaggttacgagtagtcgtgcactacggggtgatatggcaaaccttacaaatcagagtccatatggtcaacaaccacagaatcgtatgatgaaactagcatatttagatagaggtttctacaaacattatggcattatagttggagaccatgtgtaccaactagattcagatgacattttcaagacagcattgacaggaaaagccaaatttactaaaactaagttgacttcagattgggttattgaagaagagtgtgaattagactactttagaatcaaatatcttgaatcagctgtggattcagagcacattttttcagtagacaaaaactgtgaaaccattgccaaggatatttttggaacccatacactaagccaacatcaagcaatagggttagtgggaaccattttattgactgctggccttatgtcaactataaaaaccccagttaatgctgtgacaataaaagaattctttaatcatgccatagatggcgatgagcaaggtctttccttgcttgtacaaaaatgtactacattcttttcttctgctgcaactgagattttggataatgatttagtcaagttcatagtgaaaatcctggtgagaatactttgctacatggtactttattgccataaacctaacattttgactactgcttgcttatccactcttttaataatggatgttacttcctcttcagtgctgtcaccttcttgtaaagccttgatgcagtgtctgatggatggtgatgttaagaaactggctgaaattgtggcagaatcaatgtccaacactgatgatgatgaagttaaggagcaaatatgtgacacagtaaagtatactaagaccatcctatcaaatcaaggaccttttaaaggattcaatgaagtttccacagcatttaggcatatagactggtggatacatacattactcaaaatcaaagatatggttcttagtgttttcaaacccagcatagaaagcaaggctattcagtggttggagagaaataaggaacatgtttgtagtatccttgattatgcctcagacattattgttgagtcaaaagaccaatctaagatgaagactcaagatttctaccaaaggtattcagattgtttggccaagttcaagccaatcatggcaatttgctttagaagctgccacaacagtatcagcaacacagtttacagacttttccaggagctggccaggatccccaaccgaatcagtaccaataatgatttaattagaattgagcccattggcatttggatccaaggtgagccaggacaaggaaaatctttcttgacccacaccctctccagacaattacaaaaatcatgtaagcttaatggtgtttttactaatccaactgctagtgagttcatggatggttatgataatcaggacattcatttgattgatgacttgggtcaaacaagaaaagagaaagatattgaaatgttgtgcaattgcatttcttctgttccctttattgtgccaatggcacatcttgaagaaaaagggaaattttatactagcaagttagttgttgccaccactaacaagtcagatttttctagcacggtcctccaggattctggggcactgaagaggagattcccttacattatgcacattcgagcagcaaaggcctacagcaaggctggaaagctcaatgtaagccaggccatggcaacaatgtcaactggtgagtgctgggaagtatcaaagaatggaagggattgggaaacactaaaattgaaagacctagttgacaaaattacaatcgattataatgagagggttaagaattataatgcttggaaacaacaattggaaaatcagactcttgatgatctagatgatgctgtatcatacattaagcacaatttcccagatgccataccatatgttgatgagtatcttaatattgaaatgtcaacattaattgaacaaatggaggctttcatagaaccaaagcctagtgtcttcaaatgctttgctaacaaaattggttcaaaaatttctaaagcttctagggaagttgtggactggttttcagataaaattaaatccatgctcagttttgttgagaggaataaggcttggctcacagttgtatctgctgtcaccagtgctattagtatacttttgttggtaacaaagatcttcaagaaagaggaatctaaagatgagagagcttataatcctactttaccggttgccaaacccaagggcactttcccagtttcccagcgggagttcaaaaatgaagctccttatgatggacaattggaacacatcatttctcaaatggcatatattactggttcaacaactggccatatgactcattgcgccggttatcaacatgatgaaattatactccatggtcattccattaagtatttagaacaagaagatgaattgacactacattacaagaataaagttttcccaattgaacaaccatctgttacccaagtgacacttggtggtaaaccaatggatttggctattctcaagtgtaagttgcctttcaggttcaagaaaaactctaaatattacaccaacaagattggaactgaaagtatgctaatctggatgactgagcaaggcattattaccaaggaagtccaaagagtgcaccattcaggtggcatcaagacaagggaaggaactgaaagcacaaagactatcagttatactgttaaatcttgcaaaggaatgtgtggtggcctacttatttcaaaagtagaaggtaacttcaaaatcctgggtatgcatattgctggtaatggtgaaatgggagtagctataccctttaattttcttaaaaatgacatgtctgatcaaggcattgttactgagatcactccaatccagcccatgtatataaacactaaaactcagatccacaagagccctgtctatggtgctgttgaggtgaaaatgggtccagctgtcctaagtaagtcagacaccaggttggaggaacctgtagaatgtcttattaaaaaatcggcttccaagtacagagttaacaaattccaggtgaacaatgaactctggcaaggtgtcaaagcatgtgttaaatctaaattcagagaaatctttggaatgaatggtattgttgacatgaaaactgccattttaggaacttctcatgtaaattctatggatttgagcacttcagctggttatagttttgttaaatctggctacaaaaagaaagatctaatttgcttggaaccattctcagtagccccattgttagagaggcttgtacaggacaaattccacaacttactaaaagggaatcaaataactacaaccttcaacacttgccttaaagatgagttaagaaagctagataagattgcctcaggaaaaactaggtgtatagaggcttgtgaagttgattattgcattgtttacagaatgatcatgatggaaatttatgacaagatttatcaaactccatgttactactcaggactagctgttggaatcaacccatacaaagattggcacttcatgattaatgctctcaatgattacaattatgaaatggactattctcaatatgatggctcccttagttcaatgttgctatgggaggctgtggaagttctagcttactgtcatgattcacctgatctcgtgatgcaactgcacaaaccagtcattgactctgaccatgttgttttcaacgagagatggttgattcatggtggtatgccatcaggatctccatgtactactgtgttaaattcactatgcaatttgatgatgtgtatttacactacaaatttaatcagtcctggaattgattgtctaccaatcgtatatggcgatgatgttattctttcattggacaaagaaattgaaccagagaaactgcaaagtatcatggcagattcatttggagccgaagtgactgggtcacgcaaagatgaacctccttcacttaaaccaagaatggaggttgaattcttaaagcggaaacctggttatttcccagagtctacttttatagtaggtaaattagacactgaaaatatgatacaacatttaatgtggatgaaaaactttagcacatttaagcagcagctccaatcctatttaatggaactatgcctccatggaaaagacacttatcaacactacattaagatcttggaaccatatctacaggaatggaatatcactgtggatgattatgatgtggttataactaagttgatgcccatggtgtttgattaa

SEQ ID NO: 14448 - DNA, 87 bp, unidentified; identical to SEQ ID NO: 6154
  misc_feature 1..87: note = Synthetic
  source 1..87: mol_type = other DNA

SEQ ID NO: 14449 - DNA, 87 bp, unidentified; identical to SEQ ID NO: 6154
  source 1..87: mol_type = other DNA
  misc_feature 1..87: note = Synthetic

SEQ ID NO: 14450 - DNA, 33 bp, unidentified; identical to SEQ ID NO: 6297
  misc_feature 1..33: note = Synthetic
  source 1..33: mol_type = other DNA

SEQ ID NO: 14451 - DNA, 84 bp, unidentified
  source 1..84: mol_type = other DNA
  misc_feature 1..84: note = Synthetic
atggtaacttcgaaaccgttatttatagcagatatagggataggagtaggaatgccacaaatgaaaaaaatacttaaaatgtaa

SEQ ID NO: 14452 - DNA, 6633 bp, unidentified
  source 1..6633: mol_type = other DNA
  misc_feature 1..6633: note = Synthetic
atggctacacaacatacgcaatatccagacgcaaggttatcatcacctatagttttagatcagtgtgatcttgtcactcgtgcttgtggattgtattccgcatactccttaaatccccaactaaagaactgtagactaccgaaacatatataccgactaaaatatgacaccactgttacagagtttttgagtgatgtgccggtagcaacattgccagcggattttttagtacctacatttcttaggactctatcaggaaatggttcttgtccaattgatccaaaatgcagtcaatttttagaagaaattgtcaattatactctacaagatattcgcttcctaaactattacctcaatcgagccggagtgcataacgatcatgtggatagggattttggacaaaaaattcgcaatctaatttgcgacaatgaggttttacatcaaatgtttcactggtatgatcttgcaattctagcacgtagagggcgactaaatagagggaataatcgctcaacatggtttgcaagtgataatttggtagatatcctaggttatggagattatattttttggaaaataccattatcactactaccagtggatacacaaggcctcccacatgcagccaaggactggtatcatgaatcggttttcaaggaggctattcaaggccatacacacatcgtgtccatctctacagcagatgtcttaatcatgtgtaaggacataatcacctgtcgatttaatactttactgattgctgctgtggcaaatctagaggattcagttcattcagattaccctttaccagaaacagtgtctgacctatacaaagcaggagattatttaatctcattgctaggatcagaaggttacaaagtcataaaattccttgagccgttatgcttagcaaagatccaactctgctcaaattacactgagaggaaaggaagattcctcactcaaatgcatttagctgtaaatcatacacttgaggaacttacagggtcccgagaattaaggccacaacagattcggaaggtaagggaattccatcaaatgctgataaaccttaaggcaactcctcaacaactctgtgagttgttttcagtgcaaaagcattgggggcaccctgtcttgcatagcgaaaaggctatccaaaaagtaaagaagcatgcaacagtgataaaagcattgcgcccaataataatctttgaaacatattgtgtgtttaaatacagcattgcaaaacattattttgatagtcagggtacgtggtacagtgtgacttctgacagatgcttaacaccaggcctttcctcttacatcaaaagaaaccaatttcctccactacctatgatcaaagaacttttgtgggaattttatcacttagatcatcctccgttattctccaccaaagtgattagtgatttgagtatctttattaaagatcgtgctactgcagtcgagaaaacatgctgggacgcagtttttgaacccaatgttcttggttataacccaccgaataaatttgctacaaaaagggtacctgagcaattccttgaacaggagaatttctcaatagagagtgtcctacattatgctcaacgtctggaatatcttctcccggagtaccggaacttctctttttcactcaaggagaaggagttaaacattggacgagcttttgggaaattgccatatccaacacgcaatgttcaaactctgtgcgaagctttgttagcagatggtttggcgaaagcattcccaagcaatatgatggttgtgacagagcgcgagcaaaaagaaagccttttgcatcaagcgtcttggcatcacacaagtgatgattttggtgagaatgctactgttagaggcagtagttttgtaacagacttggaaaaatacaatttagcattccgatatgagtttacagctccttttattgaatactgtaatcgttgttacggtgtaagaaatttgtttaattggatgcactacactataccacagtgttatatacatgtgagtgattattataaccccccacatggagtctctctcgaaaaccgagaaaatccaccagaaggtccaagctcttaccgtggtcatctaggcgggattgagggacttcaacaaaaactctggacaagcatctcatgtgcacagatttcattagttgaaatcaaaaccggttttaaactgcgatctgcggtaatgggtgacaatcaatgtataactgtactctctgtatttcccctcgaaactgagtctagtgagcaagaattaagttctgaagataatgccgctagagtagctgctagcttagcaaaagtcacaagtgcctgcggcatctttttaaaacctgatgaaacttttgttcactcaggtttcatttattttggcaaaaaacaatatttgaatggagtacaattacctcaatcactgaaaactgctactagaattgcacccttgtcagatgctatctttgatgatcttcaagggacactagctagcataggcacggcttttgaaagatctatctccgaaactaggcacgtagtcccttgtagagtagcagctgcattccatacctttttttccgtaagaatcttacaatatcatcatcttggcttcaacaagggaacagacctgggtcaattgtcattaagcaagccattagattttggaactataactttggccttggcagtaccacaagtcttgggtggcttatcattcctaaatccagaaaaatgtttttatagaaatctgggtgatcctgttacttcagggctgtttcagctcaagacatatcttcaaatgatccacatggatgatttgtttttacctttgatcgcaaagaacccagggaactgtagcgcaattgactttgtgttaaaccctagtgggttaaacgtaccggggtcacaggatttgacatccttcctacgtcagatagtgcgccgaacaattactctaagtgctaaaaataaattaataaacactttgttccattcttctgctgatttagaagatgaaatggtttgcaaatggttgctttcttctacaccagtcatgagtaggtttgccgccgatatattttctcgcactcccagtgggaaacgtttacagatcttaggttaccttgaagggactagaacattgttagcctctaaaattataaatcataatactgagacacctatcctagatcgattgaggaaaattacgctgcaaaggtggagcctgtggtttagttatctcgaccactgtgatcaagttctggctgatgccctaactcagataacctgcactgtggacttagcacagattcttcgcgagtacacctgggcacacatactagagggaaggcagctcattggagcaacacttccttgtatactagaacaactaaatgtcatctggctcaaaccatatgagcattgccctaaatgtgcaaagtcagcaaaccctaaaggggaaccttttgtttctattgcaattaaaaaacatgtagtaagtgcttggcctgatcaatcacgacttagttggacaattggagatggcatcccttatatcggatctcgaacagaggataagattgggcagccagccatcaaaccaaaatgcccttcagcagccttacgtgaagcaattgagttgacatcaagattgacttgggttactcaaggtggagcaaacagcgacttactagttaaacccttcatagaagcacgagtaaatttaagcgtacaggaaattctccaaatgacaccttctcattactccggcaacattgtgcatcgatataatgatcaatatagtccacactcatttatggcaaataggatgagtaattctgctactaggttagttgtttcgacaaacactcttggagaattttcaggaggaggtcagtcagcaagagatagtaatattatcttccagaatgtcattaattttgctgttgcactttttgatctacgatttaggaacgtggctacttcttctatacaacatcatcgggctcatcttcatttgtcaaagtgttgcacgcgagaggttccagcccaatatttagtttatacatcaacattgccattggaccttacacggtatcgggataatgagttgatttacgatgacaatccattaagaggtggtttaaattgcaatctttcttttgataatccgcttttcaagggccagagacttaacataattgaagaagacttgattagactaccttacttatcaggatgggagctagctaaaactgttatccaatctataatttctgacagcaacaattcatcaacggatccaatcagtagtggggaaacacgatcattcaccactcacttcttgacatatcctaagattggactactatatagttttggtgcactcatcagttattatctaggcaacaccattattagaaccaaaaaattgactcttaacaacttcatatattacctagctactcaaatacataatttacctcatcgctcgttgagaatccttaaacctactttgaaacacgctagtgttatctcgagattaataagtattgactctcacttctcaatttatattggaggaactgctggtgatcgaggactttccgatgcggcaagattgtttcttagaactgccattactgtcttccttcaattcgttagaaagtggatagttgaacgcaagacagctattccactgtgggtcatctaccctctagaaggtcaaagtcctagtccgatcaacagttttctacaccacgtcatcgcattgttgcaacatgagtcctcccacgatcatgtttgtgctgcagaagcccacagtcgagtggagacatttgataatttagtttatatgtgtaaaagcacagcaagtaacttctttcatgcttcattagcatactggagaagtcgatctaaaaatcaagacaaaagagagatgacaaagatattatctttgacgcaaacggaaaagaaaaattcattcggctatacagcacatccagaaagcactgctgttcttggttccctccagaccagccttgctccacctccatctgctgacgaggctacatatgataggaaaaacaaagttttgaaagcttccagacctggcaagtattcccagaatacaaccaaagccccacccaaccaaaccagttgtcgcgatgtatctcccaatatcacaggcacagatgggtgcccttctgccaatgagggttctaacagcaataacaataatttagtctcgcacagaattgtactgccgttttttacattgtctcataattataacgaaagaccctctatcagaaagtctgaggggacaacagagattgtaaggcttactcggcagctgagggcaataccagacaccacaatatattgccgcttcacgggaatagtttcttcaatgcactataagctcgatgaagtcctttgggaatttgataattttaagtctgctataacacttgccgaaggtgaaggttcgggtgcattactcttattacaaaaatataaagtagaaaccttgttttttaatacactagccacagaacacagcattgaagcagaaattatttctggaataactacaccaagaatgcttctccctattatgtctaggttccatggtggacaaataaaagtcactttaaacaattctgcaagccagattaccgatattactaatccaagttggttggcagaccaaaaatctaggatccctaagcaagtagagattataaccatggatgctgaaacaacagaaaacattaatcggtcaaaattgtacgaagcagtccaacagctgattgtctcacatattgatccgaatgcactcaaagttgtggttcttaaagttttcttaagtgacattgatggaatcctatggctgaatgataaccttacccctttgtttgggctgggttacttgatcaagccgatcacctctagcccaaaatctagtgagtggtacctatgtctctcaaaccttctttcaacttcaagacgattacctcatcagagtcatactacttgcatgcatgttattcaaacagcactccagctacaaattcagaggagctcatattggcttagccaccttgtccagtatgccaatcataatttgcatttagattatattaatctcggtttcccttcattggagagggttttataccatagatacaatttagtcgattctcagaaaggccctttgacttccattgtccaacatctagcgcacctgcagaccgagattagggagttggttaatgactataatcaacaaagacaaagtcgaacccaaacatatcatttcattaaaacaataaaaggtcgtattacaaaattggtaaatgattaccttaagttctttctaataatacaagccttaaagcacaattgcacatggcaagaggaactaagagctcttccagatctaattagtgtctgcactcgattctatcatactcgaaactgttcatgtgaaaaccggttcctagtacagactttatacttatcacgcatgcaggattcggaaatcaaactaatagatagattgaccggccttcttagtctatgtccaaatggtttttttcggtaa

SEQ ID NO: 14453 - DNA, 18 bp, unidentified
  misc_feature 1..18: note = Synthetic
  source 1..18: mol_type = other DNA
atgcggcagtggacgtga

SEQ ID NO: 14454 - DNA, 18 bp, unidentified
  source 1..18: mol_type = other DNA
  misc_feature 1..18: note = Synthetic
atgcggcagtggacgtga

SEQ ID NO: 14455 - DNA, 10074 bp, unidentified
  source 1..10074: mol_type = other DNA
  misc_feature 1..10074: note = Synthetic
atgaatagaggaagcttgaagaaggggcctccgggcccaacatccaaccgtccgtcggttggaccgcccgactcggcgggaaaacgagtcaaacaagtggccccaccaccaactaggggtcacatggagagaggactctctctcttaaccaagaacgacaatgtgtcgcgacaggcaaaacggcaacgaaaccctcggcaacagctttctggaatctttggcggtggtgttggcgcctggctgcgtgtgctacacatggacatcggaacggcaatcttatggcttgccctggcaacggcatctctcggacagcgtatgtttaagcaactgaactctcttcgtaagcgcgtgaagcgcctcgaaaaacaacgtagtggaccgaaccttgtcatgatcattgggctcttggctcttggcttatgctatggtgagatgcttcgctatctatcggacggaaaaggagctctcaggctggaacgcgaggatggaagcattgtggacgtggctttttataagctaccgagcgatgcctgccctggtggaacggttattgaaaagcattgtccattggtaatcaggatgagtgatctggaaaatatcgattgtggatcaagcgttgaagggtttcatctacggtatcaccgttgtgtgccccaagtgcgacgtcgacgagctccccaaccacaagtctcaaaccaagttggcttgttggaggaagtggagatgattggcttcaggttctttcgtgaaaatgttcccgtcatcgtggtgtgcttgctagtcgcagctgttgcaatgcgttggccgatgtggagcgtagtgttgatcagcgtcctcacatggaacgtggtcaaggcgtcttccattgagccgttgtataccatctcggcaactggaacctcgctgactcatgctcgtttgctctcgaatgaaatatactcaatctcaactgagcgtgggttgattcacttggacatccacaatgtaacggtgcgtggagaaagaccattcaaaacccttctcacaaagtgtgatgttgtggagagtttctcagaggacacttgccctggcggatcacatttggacatggcccggatcaggcgacacaatcgtacatgcaaagtcgactcattcaatcgcggttggggaactggctgttttgagtggggacttggacaagtcgctacttgtgttgaagtgagttgtgcaagccacacaaatgtctctgtgctcgttgattccatcatccaagcaaaggtgagtatggaaattcatggccatcaggacacccagtccatcgtgagggatgtcccgacccaattccaatttggcgacgttggcaccatcacgctcacgtgtggtgtcacaacagaccgcatagctggacactactatcacattcgtgagggagtcaaagctggattggtacttcgtgaggccgtggattcttggcctggcatgatcaaaatgggtgggttcacttccggcatggacaaaattgtcagatggggaattacaactgctaatgaaataaagatcgatggtctcatcaaccctcaaattgattggcaaacttcggtgcttagggacatacgatccatttctttcacgtgcgaaatgatctttgacaacatctcgttcagcagtcttcccctgtgtgcggcaaatgccagtggcactttcatccaaaatggatatggccaggatggtgttgttgccgtgagtctagaggaagttatggaacaagcgtgtagcttccctctcaagtgcaaagggtgcacactgacatgtcctagtcttgtcattgctgaaaagagccaagttggccgggcgcatgttatctgtggaaatggaacaagccatgtcgagtttggtacaacagtggtgccagtggagtgtctggttacacccgtaacccaggcgtggcggctattgtctcacgtgactggtcgctacacaaaaaccggtgtgacaggactgggaagcgtctgggaggatctgctgggaaacttgcggttctcatggtcttggttcccgagtagctggctggtcatggctttcataggtttggcgctattccttgttttcggaagagttggatcttttgttgtttttgtggtgatcatagctgtgtacgtgcggtcggtttctgctgacgtcggatgcggagtggacacaacaaggaagacaatctcctgcggaagtggcgctttcgtttggaaacaacttggattgggggccacaaaggatcacgcagtggaactggatgattacgagttcaccgatttgtatatcaaggacatgttcgatggaaccaacaaaccttgtctgatatgcgaggactcattgcaatgtgccgctctccgttcagcagcttactcggctgcattccgtatgagcccggccctagtcagtgtgaacgacaccctatcccgcactcgacagtttattgaaaccaggaagcgaactatgactgtcacattgaatttggttgaatataaaattggatcgtatgtcactcatggacggcttgagggggatatgggattgttgccaactctctttgggtcatttcctgagaaaccctctgacaaggttatccggattgtggcgtcaagacctgatatccggcgtctctgtggaaaagcggtttctttccagtttcagtacacagggtttcgacgggctttgtatggatccaatgtccaggtgaaagtgtcaaagaacataaccaatcattgccccacatatcttgctggtgttgtcgtaaaaaatgggcggaccattatcactgatggcatgttttggatggaaagtgaaaacagggatggagtaaagcaaatagtgtctctcgagatgactcagtcacatcgatgtgtgtggccagaggaatacacccctgagacacttcaagatccaagagacatgaacatcttcatccccccggcctggggaggaccgatctcgaaagtcaaccacattcctgggtataagatgcagacagactttccgtggaatgccagtgacatcaccttggtcgaaggtcctgttccaggaactgaagttaaagtcgatgcaagatgcaatggacgcatgcgagcgaaggtagttgacccgaaaggaaatgggtcctggtgttgccagtcatgcaataggatcgtgcatttcaaggttggtgaccagctcgtgtacccaatggagatacagcttggaactatgcctgagataccaaaacctaagccaaaaatcgtggaggagccaataggagatgaatatgaccctgaagttgatgacatcctacacaactacggaaaagctcatgcctgttcggattttcgctcgtcgaactcacggacaggagttgggttcgacaggtccattctgaatctcctgtgtctcgcggtgtctcttcagttgatcggagcgaaaacacgggtttctacactgacgcgcctggttctcaccatcctagccatgctcatatttggaatgcccaacatattttcatctgtggggctttctgcttgggtcttgttggcagcatcatcatctttgcggccgcgcgacgtcctcatgaatctgtggatcattctacaaaccgggagctcagcagtactcctgctggggttcatgatccggaagagaatgtccatcgtgctcgggactcaacacatggtagccctagtgtgtgtgcatttcctcttctcagtggtcgatcggcatcagaaaacactttatggcttgctagaactgtcagcggcagcgattctaatcggggcctacaacggaatatctcagacactcccaccggaagtcttggtattttgcctcgtgatgggttggaagacgtccctggccattctcaccgttgtgtctctgatgttcagtttgcacgcatgctacaggttcgtcgtgaaatttcacagcacgaaaaacgggtacagggactatggggcgagttcgtggttctggattgtctccttcgcgagcgctggggcgatttgggccgcggaaagagcgcagcaaccaacaatagcagcgactctagcctttaccatgatagttctgtttctgttcatggaccagtccagcgtgagtatgaatcttgaatttctgtccaaaggtgaaatccccgaaggtgttcgaattgaagatgatgaaggtagagatctcgccgacctgcgaggacgttacggagatgagggaatcgtggtgggcacacagcagacctccatgcatttgcctgaaatggtgattgtcgtcctggtcggatgtgcgttaacctctgtatccttctttcttggagccttgtacgtagttgtagcttccagcacaaatctaccacttcatgtggtgcgctacatccgcataagactttcggagcagaacagatctgacgatcttcttggcattggagtgtccggcggtcctgagctcttgaccagcttcggtgagctccccaatggggtctatcgaatcacggtgaggagcctttttggaactcgacaaaggggagtgggctttgcaaagaacggagtttttcacacactaatgcatgtcactagaggtgaaccattgaattggcgtggaaaagctgttatcccccactctgggagtgctttacgggatgtagtttcgtatggcggtccatggcaactcgagacccctaccgcaaccgatgacatagtcttgatggcttgtagaccagatggaactgtggagtatcgccgatacagacctggactaatgtccattgatgacgaatccgtgatgtttgttagtgatgactttggaaaaggatcatccggctcaccattcttcattaatggtgaccccgttgggttctatggtttcgggttttatgtggatggtatctaccgttcgatcgtggccggtggaaagcccactgatgtcaatgaacctatcggtgacgatgccaccaggcgtttcatcacatggcatcccggaaaaggcaagacgcgccgggtcattgtcgaggaaaccaaacagaattacgcggccaacctgcgaaccatcatcctgaccccaacccgagtcgtcatggctgaggtgattgaagcattgaaaaactacgacatcaagtgtgacaaaaatttgtcgtactgcacaagaaaccttgtcacagttgcctgccacgcgaccttcaccaaattcgtcttgagccatggagtcaagaaggtgcgggtggctctgataatcatggatgaatgtcacttcatggaccccatgtcaatagccgctcgaggcataatggaacaccttcatggtttgggaacaaagctcatgtatctcagcgcgacccctccgggtcacacccctgactctggatcaaattatccgatatgtgaccaagccatcaatttcccggcgtggctcagtgctgcgtgggtaaacaatgtgcgcaagaccaccgggtcaaagaaaacaatcatgtttgttccctctcacaaccaggccaatgcattggcagctgcgatccccggtgcggtcccactgcatcgtgcaaatttctctgccaactatgcccaggccagtagtgaagagacaaccttggtcgtgtcgacggatatctcggagatgggagccaaccttggagtcgacctcgtcattgatactcggaaagcgttacgaccaatggtggactcagcgacgagggttaagctagaggaaacgcccataacaacatcatcgatggtacagcgtagaggcagaaccggcagacgggaacctggaatgtacgtgtacccagtggacagtaggacagaggagaatcctgtctcgtgggtgtgttggccagaggcacaaatgatattggatcaacttggaatgacctttatgctagaggaggccacttttagccagcccccaggtaggtttaccttagttggggaggatcgtctccgtttctctaaattgatggacagagacgacatcccaatatggttggcctggaactgggctgaagctggtgaccgacgccactccgcattattccaaggaaaaagcactggacaaatcctcgagagtcgctttggaaagcaggagtataagccacagtacgttgatgacaggtttgaaaacctcgaatgggacacaagaaagctgtccattgaattctatctcaactgccgtagctcgcaaactttctatgacctgttcaagagtattgactgggctaacatatggaagaaaactctctcagcactctgggacattcgagatacattcagtgggacattgaaggaccaggtcatggccgagcggtccctgaccactgggatggcctttagcctgggaatactccttgtcttggcggttatcgtggtcgtgtggatcctggggtttctggtagcaatgctcaagcccacgaagatgtcttatgagtcgatgccgtctggggaccctttcaatggtggcatggtactcacagcccctagcgtcctccactacatgggagttcctctcggattctgtgtcatcatctttcttgctatgttcattgtgtatccggtcctctataaggctataggcaaccgcagttacatggacagtgaccttgtcaaatgggtgatcattggatcatgttttgtctgtggggttctcgcatgggaaatgcgcttgtttcctaacatacgtggggatatcatggagatggcttctgccatgaaggaaccacaggaaactcaaagtcaagcatctactatctcggggtcattcttcacttctcgcgttaggggggagagggccacgatgttggactcgctgcaggtcttcttcttcgtaactgtgctaatgaatgaattcatcatctgggtgcaggagaactggatcgcacagatgtacgtgatgaaacaccccgaaatggtgagcactgtgggcggattcagacttgacagaattccgttcagagccgtgcttccatctggtttcgccatagtcaccacatccagcttgtccagctcactcgtcggtcttgcagcgtcaagcttgttcctaaccatcgcgtattatcagaacaagtggaacgcaacacccaaaataatctccgctatggacgcccgtgatcaaaaacatgaccgtcccacggacattacaaaccgagtcccactggacaacaccagatccgtcatgtatgcttttgggatgttttttagcatggcttgggtgttctgcacccggtctcgatgggatgctggcctttgcaccctggttgtcattgcatgcatgtggcaaattctgcacccacgctcacgtgtgcatgatgtgatggactttggatcaatgttgtcggcgattggaatttttgagttggatttcctgttctataagttcatccacatcgctgctcgtgggttgggcgggatgcctccattcaatcagtttcgcgctctggagaaatccacagctgtaggccttggtataaaatggaaaactctgcttaactctctggacaaggacaccttcgacaagtacaaggtccgaggggtcaatgagaccgaacgaggagactatgtgtctagaggtggcttgaaactggatgaggtcattcggaaatacaattggaaaccaaacggacgggttgttgacctgggttgtggtagaggcggatggagtcagagagttgtcatggaggagtccgtgtcgtctgtgtatggatacacagttggaggacaagaaaaagaagtaccccagaagttcctgactaagggctacaacttgactaacctcaaatctggagtagacgtgtacaggctccccccaactcgttgtgacacaatcatgtgtgacataggcgaaagtgatccgaatcctgctaaggaaaaaacccgaaccctcaaggttctcgagttgctcgagaactggttgagtgtgaatcccagcgctgaatttgtgtgcaagattctctccccgtattcgttggaagtgctgcggaagatcgaaactttgcaacagaagcacaagggtcgcctagtacgcttaacgtatagccggaacagcactgcagaaatgtactacgtgtctggcagcagatccaacgcagtaagggatgtgtacatgactctggctgcccttgttgcacgattttctcggcacttggatagtatcgtcctgccccctcccgatttactcaagggaacccgagccgacccaactgccagcgtagcttctatggatgtgagtgatatggaggatcgtgtcaaacgaataaaacatgaaaaccagaccacctggtttgtcgatccagaacatccgtacaaaagcttcaagtactttggatcatttgtgactgatgatgttaaggttggtgggcaggcaattaacccgctcgtaagaaaaatcatgtggccttgggaagcgataacttcggttgttggattcctcatgaccgacgtctccacatactcgcaacaaaaagtattgcgggaaaaagtggacacagtgatcccacctcatccaccacaagttcgagaagttaacaaactcatcacccaacatctggtgaaactcttccggtcacgcaatctccaacctcgcatcctgtccaaggaggagttcatcgcgaacgttcggaatgatgcggccataggatcatggagcaagaatgtaccgtggagagatgtccaggatgccgttcaagatcaagccttctggaacctcgtcggacaagagcgacgccttcatctccaagggaaatgcgagatgtgtctttacaacactatgggaaagaaggagaagaaaccgagcctggctggtgaggccaagggatctcgaaccatctggtacatgtggctaggaagccgtttcctcgaatttgaggctcttggtttccttaacgctgaccactgggtgagccgggaaaacttccccggtggtgttggaggtctaggagtgaactacttcggatattacctaaaagacatcgctggtcgaggtaaatatctctttgctgacgacatagctggatgggacacaaaaatcagctctgaggaccttgaagatgaggagaccttgttaaccgagctcacagccaatccataccataaagctctaattagagccaccatgaagctcgcttaccagaacatcgttgccatgttcccacgaacccattcaaagtatggtagtgggacggtcatggatgtggtgggacggcgagatcaacgaggctctgggcaagtagtgacatatgccttgaacactgtgaccaatggcaaagtacaagtcgctagggtattggagagcgaaggattgctcaacgctgacatcaatgtgattgacaagtggcttaccaagaacatggaaaacgtcctgagtaacatggttatagcaggggatgatgtagtcgtctctactgacaacagagagttctcatcctctctcgagtaccttgagctgacgggaaagacgcggaagaacattccccaaggtgcaccctcccgaatggagtgcaattgggaaaaagtcgaattctgctcccatcattaccatgaaatgtacctaagagatgggcgtaatctaattgtgccgtgtcgacatgaagatgagatcgttgggcggagcaggctacagaaaggaggggttgtcagcttagccgaaagtgcttgcatggcaaaggcatacgcccaaatgtgggccttgtacttctttcaccgacgtgatcttcgcttaggatttgtagccattacctcttctgtccccacaaactggtttcccattggacgcacctcttggtcaattcaccaacatcatgagtggatgacaacatgcgacatgctacgtgtgtggaatgacgtgtggatccacgacaacccatggatgaccatgaaggagcccatcaatgcctgggaagatatcccctatcttcataaaaaacaagacattgaatgtggcagtcttattggttccaaggaaagagccacctgggctcgcgacatggagaacagcgttctgagtgtccgcaagatcctggactccgaaacaggaaccaataattcgtacaaggatgagctctcggtgatgagtcgtttccggaaggggaatgacgtcatttga

SEQ ID NO: 14456 - DNA, 4110 bp, unidentified
  source 1..4110: mol_type = other DNA
  misc_feature 1..4110: note = Synthetic
atgaatagaggaagcttgaagaaggggcctccgggcccaacatccaaccgtccgtcggttggaccgcccgactcggcgggaaaacgagtcaaacaagtggccccaccaccaactaggggtcacatggagagaggactctctctcttaaccaagaacgacaatgtgtcgcgacaggcaaaacggcaacgaaaccctcggcaacagctttctggaatctttggcggtggtgttggcgcctggctgcgtgtgctacacatggacatcggaacggcaatcttatggcttgccctggcaacggcatctctcggacagcgtatgtttaagcaactgaactctcttcgtaagcgcgtgaagcgcctcgaaaaacaacgtagtggaccgaaccttgtcatgatcattgggctcttggctcttggcttatgctatggtgagatgcttcgctatctatcggacggaaaaggagctctcaggctggaacgcgaggatggaagcattgtggacgtggctttttataagctaccgagcgatgcctgccctggtggaacggttattgaaaagcattgtccattggtaatcaggatgagtgatctggaaaatatcgattgtggatcaagcgttgaagggtttcatctacggtatcaccgttgtgtgccccaagtgcgacgtcgacgagctccccaaccacaagtctcaaaccaagttggcttgttggaggaagtggagatgattggcttcaggttctttcgtgaaaatgttcccgtcatcgtggtgtgcttgctagtcgcagctgttgcaatgcgttggccgatgtggagcgtagtgttgatcagcgtcctcacatggaacgtggtcaaggcgtcttccattgagccgttgtataccatctcggcaactggaacctcgctgactcatgctcgtttgctctcgaatgaaatatactcaatctcaactgagcgtgggttgattcacttggacatccacaatgtaacggtgcgtggagaaagaccattcaaaacccttctcacaaagtgtgatgttgtggagagtttctcagaggacacttgccctggcggatcacatttggacatggcccggatcaggcgacacaatcgtacatgcaaagtcgactcattcaatcgcggttggggaactggctgttttgagtggggacttggacaagtcgctacttgtgttgaagtgagttgtgcaagccacacaaatgtctctgtgctcgttgattccatcatccaagcaaaggtgagtatggaaattcatggccatcaggacacccagtccatcgtgagggatgtcccgacccaattccaatttggcgacgttggcaccatcacgctcacgtgtggtgtcacaacagaccgcatagctggacactactatcacattcgtgagggagtcaaagctggattggtacttcgtgaggccgtggattcttggcctggcatgatcaaaatgggtgggttcacttccggcatggacaaaattgtcagatggggaattacaactgctaatgaaataaagatcgatggtctcatcaaccctcaaattgattggcaaacttcggtgcttagggacatacgatccatttctttcacgtgcgaaatgatctttgacaacatctcgttcagcagtcttcccctgtgtgcggcaaatgccagtggcactttcatccaaaatggatatggccaggatggtgttgttgccgtgagtctagaggaagttatggaacaagcgtgtagcttccctctcaagtgcaaagggtgcacactgacatgtcctagtcttgtcattgctgaaaagagccaagttggccgggcgcatgttatctgtggaaatggaacaagccatgtcgagtttggtacaacagtggtgccagtggagtgtctggttacacccgtaacccaggcgtggcggctattgtctcacgtgactggtcgctacacaaaaaccggtgtgacaggactgggaagcgtctgggaggatctgctgggaaacttgcggttctcatggtcttggttcccgagtagctggctggtcatggctttcataggtttggcgctattccttgttttcggaagagttggatcttttgttgtttttgtggtgatcatagctgtgtacgtgcggtcggtttctgctgacgtcggatgcggagtggacacaacaaggaagacaatctcctgcggaagtggcgctttcgtttggaaacaacttggattgggggccacaaaggatcacgcagtggaactggatgattacgagttcaccgatttgtatatcaaggacatgttcgatggaaccaacaaaccttgtctgatatgcgaggactcattgcaatgtgccgctctccgttcagcagcttactcggctgcattccgtatgagcccggccctagtcagtgtgaacgacaccctatcccgcactcgacagtttattgaaaccaggaagcgaactatgactgtcacattgaatttggttgaatataaaattggatcgtatgtcactcatggacggcttgagggggatatgggattgttgccaactctctttgggtcatttcctgagaaaccctctgacaaggttatccggattgtggcgtcaagacctgatatccggcgtctctgtggaaaagcggtttctttccagtttcagtacacagggtttcgacgggctttgtatggatccaatgtccaggtgaaagtgtcaaagaacataaccaatcattgccccacatatcttgctggtgttgtcgtaaaaaatgggcggaccattatcactgatggcatgttttggatggaaagtgaaaacagggatggagtaaagcaaatagtgtctctcgagatgactcagtcacatcgatgtgtgtggccagaggaatacacccctgagacacttcaagatccaagagacatgaacatcttcatccccccggcctggggaggaccgatctcgaaagtcaaccacattcctgggtataagatgcagacagactttccgtggaatgccagtgacatcaccttggtcgaaggtcctgttccaggaactgaagttaaagtcgatgcaagatgcaatggacgcatgcgagcgaaggtagttgacccgaaaggaaatgggtcctggtgttgccagtcatgcaataggatcgtgcatttcaaggttggtgaccagctcgtgtacccaatggagatacagcttggaactatgcctgagataccaaaacctaagccaaaaatcgtggaggagccaataggagatgaatatgaccctgaagttgatgacatcctacacaactacggaaaagctcatgcctgttcggatttttcgctcgtcgaactcacggacaggagttgggttcgacaggtccattctgaatctcctgtgtctcgcggtgtctcttcagttgatcggagcgaaaacacgggtttctacactgacgcgcctggttctcaccatcctagccatgctcatatttggaatgcccaacatattttcatctgtggggctttctgcttgggtcttgttggcagcatcatcatctttgcggccgcgcgacgtcctcatgaatctgtggatcattctacaaaccgggagctcagcagtactcctgctggggttcatgatccggaagagaatgtccatcgtgctcgggactcaacacatggtagccctagtgtgtgtgcatttcctcttctcagtggtcgatcggcatcagaaaacactttatggcttgctagaactgtcagcggcagcgattctaatcggggcctacaacggaatatctcagacactcccaccggaagtcttggtattttgcctcgtgatgggttggaagacgtccctggccattctcaccgttgtgtctctgatgttcagtttgcacgcatgctacaggttcgtcgtgaaatttcacagcacgaaaaacgggtacagggactatggggcgagttcgtggttctggattgtctccttcgcgagcgctggggcgatttgggccgcggaaagagcgcagcaaccaacaatagcagcgactctagcctttaccatgatagttctgtttctgttcatggaccagtccagcgtgagtatgaatcttga

SEQ ID NO: 14457 - DNA, 1632 bp, unidentified
  source 1..1632: mol_type = other DNA
  misc_feature 1..1632: note = Synthetic
atgggtcaaatatcagtatatctaattaatagcgtgctattattgctggtatatcctgtgaattcgattgacaatacactcattgccccaatcggagttgccagcgcaaatgaatggcagcttgctgcatatacaacatcactttcagggacaattgccgtgcgattcctacctgtgctcccggataatatgactacctgtcttagagaaacaatcactacatataataatactgtcaacaacatcttaggcccactcaaatccaatctggatgcactgctctcatctgagacttatccccagacaagattaattggggcagttataggttcaattgctctcggtgttgcaacatcggctcaaatcactgctgcagttgctctcaagcaagcgcaagacaatgcaaggaacatactagcactcaaagaagcactgtccaaaaccaatgaggcggtcaaggagcttagtagtgggttacaacaaacagctattgcacttggtaagatacagagttttgtgaatgaggaaattctgccatctatcaaccaactgagctgcgaggtgacagccaataaacttggggtgtatttatctctgtatctcacagaactgaccaccatattcggtgcacagctgactaaccctgcattgacttcattatcatatcaagcgctgtacaacctgtgtggtggcaacatggcaatgcttactcagaagattggaattaaacaacaagacgttaattcgctatatgaagccggactaatcacaggacaagtcattggttatgactctcagtaccagctgctggtcatccaggtcaattatccaagcatttctgaggtcactggtgtacgtgcaacagaattagtcactgttagtgtaacaacagacaagggtgaagggaaagcaattgtaccccaatttgtagctgaaagtcgggtgactattgaagagcttgatgtagcatcttgtaaattcagcagcacgaccctatattgcaggcaggtcaacacaagggcacttcccccgctagtagctagctgtcttcgaggtaactatgatgattgtcaatataccacagagattggagcattatcatcccggtatataacactagatgggggggtcttagttaattgtaagtcaattgtttgtaggtgccttaatccaagtaagatcatctctcaaaatacaaacgctgcagtaacatatgttgatgccacaatctgcaaaacaattcaattggatgatatacaactccagctggaagggtcactatcatcagtttatgcaagaaacatctcaattgagatcagtcaggtgaccacctccgggtctttagatatcagcagtgagataggaaacatcaataatacggtgaatcgtgtggaggatttaattcaccaatcagaggaatggctggcaaaggttaacccacacattgttaataatacaacactaatcgtactctgtgtgttaagtgcgcttgctgtgatctggctggcagtattaacggctattataatatacttgagaacaaagttgaagactatatcggcattagctgtaaccaatacaatacagtctaacccctatgttaaccaaacgaaacgtgaatctaagttttga

SEQ ID NO: 14458 - DNA, 582 bp, unidentified
  source 1..582: mol_type = other DNA
  misc_feature 1..582: note = Synthetic
atgtccattctcatctcgcccagtaataacaccggttggggtctgcgcgcgcccagcaagatgtacggaggcgctcgccaacgctccacgcaacaccccgtgcgcgtgcgcgggcacttccgcgctccctggggcgccctcaagggccgcgtgcggtcgcgcaccaccgtcgacgacgtgatcgaccaggtggtggccgacgctcgcaactacacccccgccgccgcgcccgtctccaccgtggacgccgtcattgacagcgtggtgtccgacgcgcgccggtacgcccgcgccaagagccggcggcggcgcatcgcccggcggcaccgtagcaccaccgccatgcgtgcggcgcgagccttgctgcgcagggccaggcgcacgggacgcagggccatgctcagggcggccagacgcgcggcttcaggcgccagcgccggcaggactcggagacgcgcggccacggcggcggcagcggccatagccagcatgtcccgcccgcggcgagggaacgtgtactgggtgcgcgacgccgccaccggtgtgcgcgtgcccgtgcgcacccgcccccctcgcacttga

SEQ ID NO: 14459 - DNA, 591 bp, unidentified
  source 1..591: mol_type = other DNA
  misc_feature 1..591: note = Synthetic
atgtccattctcatctcgcccagcaataacaccggctggggtcttactaggcccagcaccatgtacggaggagccaagaagcgctcccaacagcaccccgttcgcgtccgcggccactttcgcgctccctggggcgcttacaagcgcgggcggacctctgcccccgccgccgtgcgcaccaccgtcgacgacgtcattgactccgtagtcgctgacgcgcgcaactacacccccgccccctccaccgtggacgcggtcattgacagcgtggtggctgacgcgcgcgactatgccagacgcaagagccggcggcgacggattgccaggcgccaccggagcacgcccgccatgcgcgccgcccgggctctgctgcgccgcgccagacgcactggccgccgggccatgatgcaagccgcgcgtcgcgccgccgccgcacccacccccacaggcaggactcgcagacgagcggccgttgccgccgccgcggccatctctagcatgaccagacccaggcgcggaaacgtgtactgggtgcgcgactccatcacgggcgtgcgcgtgcccgtgcgcacccgtcctcctcgtccctga

SEQ ID NO: 14460 - DNA, 459 bp, unidentified
  source 1..459: mol_type = other DNA
  misc_feature 1..459: note = Synthetic
atgaccatgagactgcttgtttgcgcgaagcatgtgacggcctcttggatacacggcatttggagaatgagcagccatcaaatcatcacaagatgggcaggcgcggaaccctgtgccctcgtgctcgcacacgcgtgctgcggcgccgcgcagcacgcgtggatctcaggtaatagcagcggttgtatctcagcgcgcgcacgggtgccggcgccggggactatacagcgcgcgggcactcgtgtgcgtaaaatcgttccggggacaccggaagtatcttgggattggcgtcacgtcacgacacggcaccttgccggccccgtgtcgtggcgtgcccgcgagcgcgccgtgctgcggcgtgcgcagcacggcgagctccggctgtgtctagatggaaaagggaaagtaagcacccccaaaggactacacttggtgccgggaacgtcttccctcttctga

SEQ ID NO: 14461 - DNA, 54 bp, unidentified; identical to SEQ ID NO: 7038
  source 1..54: mol_type = other DNA
  misc_feature 1..54: note = Synthetic

SEQ ID NO: 14462 - DNA, 24 bp, unidentified
  source 1..24: mol_type = other DNA
  misc_feature 1..24: note = Synthetic
atgccgcataaaaaaaaacaataa

SEQ ID NO: 14463 - DNA, 54 bp, unidentified; identical to SEQ ID NO: 7046
  misc_feature 1..54: note = Synthetic
  source 1..54: mol_type = other DNA

SEQ ID NO: 14464 - DNA, 54 bp, unidentified; identical to SEQ ID NO: 7046
  source 1..54: mol_type = other DNA
  misc_feature 1..54: note = Synthetic

SEQ ID NO: 14465 - DNA, 5055 bp, unidentified
  source 1..5055: mol_type = other DNA
  misc_feature 1..5055: note = Synthetic
atggattcctccaacgttaaagttactggtcccctagccgctaaagctagcgatccagattccaccttcgccaagcttaaggcgaagttttctgccctccgcaatccacagcctcctgaccccccggaggcaccgcggctggaaacaccccccatggccgcgcctcccctgggcagccccccaatcgccctccccaccggttgggaacccgcagagccccatcgagagcaggcagatcaattcccagtgcgctactcccggggcgccgttgacctcgacgtccaccccccccatgtcgccccagggcccgcctggaatggctgtcccctgccaccagtcgagcagcggagcacggagcctcctgccgagccgcctgtggggacggttctagagttttatgagggctacattttccactacgccatctatgttggtaacgggaagacaattggcgtccactccccccagatggccctctcagttccaaagatttcagttcagaacctctcggcctggtggcgcgtagcctacatcccacgcgaccccccgccccgagaccagctcctgtcactcgagggcgagcgatggccgtacgcctccgtgactagcaattgctacaccttctgctgcaaggttctggaccttgatgacgattggttgtcccgccggctcgtccgctcaggcccttaccaccaccccagtcagccctggaatagggcggtcccggagttccaccaggacggcaaaatggagctggtccgggacgccatcctaacagcactgaacgccctggtttcacaaccaatgcgcgaactgatcaacgtcatcaaacccctcaatgttctgtccattctctcccattgtgactggactttcaccggcattgttgaggctgctgtcctattagcggaactctttggcatcttgtggcagcctccagacgtggccagctttctagccaacctcacaccggagtgtgttctgcagggcccagaggaccttgctaaggatatcatcccggtgatacttggtgggatcgggctggccctcggcttcaccaaagacaaggccacaaagctcctgaagtcagccgcagacggtctccgcgcggccagcagcctcggtcagtatgggatagagatattcaacataattaagaaatacctttttggggattctactggccagacactcaagcgtgttgagaatgccgtcatcgaccttgaagtcctcgcctcaaacaatatcacggaggtggtgagagaccgccagtccaccctagcctacatcaaaaccctggacatggaagaggagcgggtccgagagctctcatcaaggtcctccgacccccatgtcgtctcctcagttaatgcgcttctcggcaggattgccatggctcggtccgccttggccaaggcccagtctgagatgtccaatcgggtgcgcccagtcgtcatcatgctcagcgggccccccggcattgggaaaaccaagttggcagaacgcatcgcccatcaattggccaaagccatccgtccaggtggcaaggtaggcctcgtccctcgcgaggccgttgaccactgggacggttacaagggtcaggaagtaatgctgtgggatgactacggcatggccaacattgccgctgactgcaacaaactccaggccattgcggacactgccccagtctcgcttaactgtgaccagattgagaacaaaggtatgacttttactcctgaggccatagttatcaccaccaatgcccctgggcccgcccccctagaccacatgaacctggggccagtttgccggcgagtcgactttctggtctattgcaactcgcaagacattgagaaccaccgccggcagaagcctggggacactcaaggcctaaaccagctctttaagaaggacttcacccatcttcaactccagcttgcgcctcaaggtgggttcgactgtcttggaaacacgccttatggcaagggtgccatgtccaagacctcgcttccccgtctcttggcggccgcaaccgccctcgcccttgagcggcttgaggacttccaactccaggcccctgagtacgactttgataagaaccgtgtcgtggctttctctagaatggccaatgacaacgggcttggcatgctctcagccatgagggtggccaacaaattgaagggcgtgacctctgtgagtgagctcgaagaggcacttgcaggatttgccatcgccccttgcaccatcatctggcgggggacccactatgaactccaatctgacgggaacaatttgaccatcaatcaacttgccaccccacagcccactgttgaaatcaactacgccctaaagcggctggctgcggctcgtgcagtgacgtactggtcacttgcagccaatcttgtgaccactgccatccaagccgccagctctgctctcgtcatccacagggctgttcaacggattcgggctccgtccacccagctagagtcccacaactgccggtaccatcgggcagagcaagagaaccgcactgtcggtggcgttggagtcattggccacaagggcatggtggacaaatatggcctgtgcgagtctgacaccgagatgccagcccctcaagagggcaaggagaagaaagcccaagcccccacccagctagagtccaagaagggcaggaggaaggtcaatgccttctccaggcgtggcctctctgatgaagagtatgatgaatacaagaagatcagagaggagcggggtggcaactattctatccaggagtatcttgaggaccgcgagcgctatgaacgcgagttagctgagcgccaggctgatgatgactcctatgatgacagttccatacgccagaagtactttggccgtgggaaggccgccaaggcccagaggagaaagattgattggaacccaactggtccctcctgggcggacgatgagcgggaggttgactacaatgaggtaatagaattccaggcccccccctcaatatggtcgcggatccaacgcttcggctccggctggggctgctgggtttcccccaccctcttcatcaccgcgacacatgtcatccctgagggttgcaccgaggcctttggggttccagttagtgaaattgcggtcagctcccatggtgagttcacccagttccgcttcccccgacccatacgaccagacgtgagtgggttggtgcttgaggagggagcccctgagggcaccgtggcctcagttctcatcaaacgcccgacaggtgagctcatcccccttgctgtccgcatgtcaaccacaacaagcaccaaggttcaaggcaaggtcatcaacggtcaaaccgggatgctgctcactggttcaaacgctaagggtatggaccttggcacccttcctggtgactgcgggtgcccctactttttcaagcggggcaatgactgggtagtctttggcgtgcacgccgctgcaacgcgctccggcaacacgatcatctgcgccatcccaaactcccaggagtcggtcgcgctcgagggtgggcacggcacgtatgttggccaccccatcattggccaggggtcggcccccaagctgtcaactaagaccaaattttggaggtcctccccggcacagctgccgccaggcacttatgagccagcctaccttggtggaaaggaccccagggtccagggtggtccctcccttcagcaggtgatgcgggaccagctagcccagttctcagcgccccgcggcaagctcccccggcctgaacttctgaaggccgccgtcgagacagtcaccaactgccttgaacaagtcatggaccaaccaaagccatggagctaccaggatgcctgcatgtccctggacaaaactaccagctctggctacccccattataagagaaagaatgacgactggaatggcactgcattcattggggcgttgggcgagcaggcaaaccacgcaaacaacatgtaccgccagggcaagagtcagcgcccccgctacacggcggcgctgaaggatgagctggtggcccccagaaagatctatgaagttcagaagaagcgcctgctttggggagctgatctctctactgtgattcgggccgccatggcctttgggcccttctgcgacgccataaaggaacacgtggttgagctccccatcaagatcggaatgaatgccattgaggatgggcctgtcatataccagagacactcaaactataaatattcctttgacgctgactattcagcgtgggacagcacccagcagcgcgagatcatgcgcctgagcttagacatcatgaccaaactcaccgctgagcctgagcttgctcgcgtggtcgcggaggatcttcttaaaccttcgcacctcgacgtgggggactttctggtagcagtgcacgaaggcctcccatcaggcttcccgtgcacgtcccaagtcaattccatcaaccactggatcctgaccctctgtgccctttcggaagtcacaaaccttgacccggatgtagtgcaggctaacagctacttctctttttatggtgatgatgaaattgtgtcaaccgaccttgaatttgacccagataagcttaccaaggttctcaaggggtacggcctgaagcccacccggccagacaaggccgaaggcccaattgagctccgtcgtcaggttgacggcctggtcttcctccggcgcacgatctcgcacgatgccaagggattccaaggccgcctcgaccgggagtcgatactccgacagctctattggactcgtgggcccaatcacgacgacccgagtgagaccctggttcctcacagcaaccggaaggtccagctgctctgcctccttggcgaggcggccctccacggtgagaagttttaccgccgagttggctctatggtgactgcagaggccaaagaggggggaatggagatctttgtgccatcacaccgctccatgtttgcttggatgaggtttcatgatctgtcactgtgggaaggtagtcgcgacacccttcccgattttgtaaatgaagatgactga

SEQ ID NO: 14466 - DNA, 5055 bp, unidentified; identical to SEQ ID NO: 14465
  source 1..5055: mol_type = other DNA
  misc_feature 1..5055: note = Synthetic

SEQ ID NO: 14467 - DNA, 5058 bp, unidentified
  misc_feature 1..5058: note = Synthetic
  source 1..5058: mol_type = other DNA
atggcgtctaacgacgctagtgttgccaacagcaacagcaaaaccattgctgccaacaacaccacgacccctaaacaagggggcgtgtttgcaaacatgaagattgggctcaagaaagttcttgaacccaaatctgagacacccacggtaagaccaaaagacgtgggtaaaccggggggcaccagtccaccggatgaccccccaggtgtcacgatcaagtacgatgctcagagtgacaccattgaagggctccctaacctgtccactgttccacaaccagaggcgcgccaggttaagtgtgttccacccatggcggagagggaggtcaagaatgcggcggaaccacaaaccggctccctgctagaaatgtatgatgggtcattctatcattatgccatctacattgagaatggcctagtcgctgggataaatcgcccttctaaggctctcacaaccgccacagtcgacgttgaaccgattgggttgtggtggagagtggtctacactccaccattctcagtctccacgtcggccctctaccatctacaaggtgagaaattcccatataacgcctttgacaacaactgttataacttctgctgtcaggtgttggaactggatgattgctggatgcgcaggaagttcgtccagcgaaccactggtttctttgacccataccaaaggtggaacccaaaaccctcacagtatgtggctgattcaaagttggagagagtaggggacgctcttctcactgcgctgggggcactcttctccaagccaataaagaacataattgggaagctcaaacctttgaatttcttgaatttactatcgtcctgtgattggacgttccccagcattgttgaaaccataatcctgattgcagagctctttgacgtctattgggaaccaccagacgtcacagggttcttaatgccactcctggatgactacgaattccaggggcctgaggatttggctgcagaaatagtcccattgatcctagggggtatagggatggtagtgggtttcaccgcagagaaggcaggaaagctgttgtcctccgctgcagcaacactgagggcgacaagggagcttggcaattatggcctagagatcgtgaaactagtgatgaagtggtttttccctaagaaggagagtgacatgaatgcaatggtcagaaacatagaggatgctgtactagatctggaagcagttgagagcaaccatatcactcacctactcaaagataaggaaaacatggcagtcttccttcgcaccttggaccttgaggaagaaaaggccaggaaactatccactaaggctgcttcccccaacataattgcatctgtcaatgccttgctcgcccgcatcgctgccgtcaggtcccttgcgtttaaagcgaaagaggagatgtgcgcccggcagcggccagtggtggttatgctgtcaggtcgaccaggcattggcaagacacactatgccagagagcttgcttctaggatctccaagctgctcagttcagatggtcgcgttgggctcgtgccaagaaatggagttgaccattgggactcctataggggggaaccagtggtcgtttgggacgactatggcatgggaaacatcattaaggatgccatgatgcttcaagaattggctgacacctgcccccttacactcaattgcgaccgtatagagaataggggtaaaatgtttgaaagcgatgtcatcgtcttgaccaccaattcgcccaacccaagcccgatggattatgtcaacatggaggccgtcgctagaagggtggatttcttggtgtatgctgagtccccggatgttgagaaggcaaaaagggactttccaggcgatcccaaagcctggaagcctttcttcaaagatgatcactcccacctcgttctcacattagctccacaaggtgggtttgacaagagtggtaacaccccccacggaaaaggtatgactagaaacatcacaccaaatggactagtcgccagagcggttgcgttggctgtggaacgtaaggatgagttccagctccagggcccagatccaatcacctacaactttgattcctcacaggtggctgcatttcgaaagcttgcagctgacaacaagtacggccttgctgaaactctccgcgtgggcaacaaactgaggaatgtgacaactatagagggcttcaagaaggccgtgggggatgtcagatttaaaaagtgcaggatcatctggaaaggcgtaacttacgaccttgagtcagatggtaagggatcagtcaccattgacagggtgcagtcacagatggtacagacaactggggagattcaccaggctgtcctgcgcttacgccaagctcgggtgcggtattacgtcatgactgctcagaatgtcacctacgggctccttcaggccgccggcgcagcattcgtccttaacaggatattcaggcgtgcagagaacccattctcacgcctagtcaaagtggaggaggacaaggacgaagatgcacgcatggctatcatccccaaaaaggtagagattgttgaatccaatctagaggaagaagggaaaaagaaagggaagaacaagcaaggcagaggccgtaagcacacagctttctcctccaaaggactgagtgacgaggagtacgaagagttcaagcagctcagagaggagaagggaggaaagtactcaatccaagaatacctcgaagaccgtgaccgtttcgaggaagaggtcgcgtatgcacaggcctgtggaggtgactgtgatgacatcgaaatcagccgcatacgcaactccattttccgcccaagtaggaaacagagaaaggaggagagagttaagcttggcctggtcaccggttctgagatcagaaaacggaagcctgatgacttccagccaaaagggaaactgtgggcagatgacgagagaaccgttgattacaacgaaaagctggactttgaagcacccgcttccatctgggcgcgtatagttcagcttggtacaggttggggcttttgggtctcacccaatctcctcatcacatcaacccatgtcataccaaagggtgttgaagagttatttggggttccaatcaagcaagtacaaatacacaggtgtggcgagttcaccagacttaggttctcgaagatgatcaggccagatgtgactggtatgatacttgaagatggggcacccgaaggtgtcgtttgtagcatactggtcaagagaccaacaggtgagtgcctgccactagcagtcaggatgggaacccaagctaccatgaagatacaagggaaagtggtctcgggccaactggggatgttgctgactggctccaatgcaaagaacatggacctggggaccacccctggtgactgtggatgcccttacgtgtacaaacgtggtaacgactatgtggttgtgggtgtgcacactgccgcgggcagaggcgggaatacagtcatctgcgcggtgcaaacaggtgatggtgaagccgtactagaaggaaacactgataacggcacatactgcggcgccccaatagtgtcaaaaggtaatgcaccccagctatcctcaaagacaaaattctggaggagctctgtcgagcctctcccgcctggcacgtttgagcccgcctacctcgggggtcgcgaccccagagtcgacggtgggccctcactttaccaggtgatgagggaccaacttaaacatttcacagctcctcgtgggagaccagtcaaaccccacctcttgcaggctgcagtcaagacaatcgagaacgtgctggaacagaccattgaccccccaacaccatggacatatgcccaggcttgccagtcgcttgacaagacaacgtcgagtggctggccccaccatgtgcagaaaaacacccattggaatggtgaagcatttacaggacccttggccgaccaagccagcaaggccaatctaatgtatgaacaagggaagtccatgaccccccagtacactgctgcccttaaggatgaactagtgaaaccagacaaagtgtacaaaaaggtcaagaaaaggctgctgtggggtgcagatctcggaaccatggtccggtgcgccagagcattcggcccgttcactgacgcacttaagaagtgctgcacccaacttccagtcaaagttggactcaacattaatgaagagggacccatcatctttgagaaacacgcccaatatgagctccactatgatgcagattattcgcggtgggattccacccagcaacgggaggtcctcgccgccgcacttggcatcatgacaaaattcactgctgagccacagctggcctccgttgtggcagaagacttgatttccccaagtatgcttgatgttggcgactatgtcgtccaggtcaatgaagggctaccctctggtgtcccctgcacctcacagttaaacagtattgcccattggatcatcacccttacatccatggctgaggccactggcctggatcctgacatcgtccaggctaacagctacttctccttctatggtgatgatgaaattgtgtcaacagacataaaattcaatccagaggtcctcaccctgaaacttaaagcaattggccttgtcccaacccgcccagacaagacagaaggcccattggtggtgtcaaacaaattagaaggtctgacttttctgaggcgcaccataactagagacaaagtgggcttctttggtcggttggataaggattccattctcaggcaaatgtactggaccaagggcccgaaccatcaagacccatctgaaagcatgttaccccaccagaatcgcgccacacaattgatggccctgttgggcgagtcagcactccatggtcaaaacttctacaaaaagattagtggcatggtaatcaaagaagtgaagaatggtgggcatgagttctatgtgccaaagtttgagtccatgtacaagtggatgcggttctcagacttgagcacttgggagggggatcgcgatctcgctcccgattttgtgaatgaagatggcgtcgagtga

SEQ ID NO: 14468 - DNA, 5058 bp, unidentified; identical to SEQ ID NO: 14467
  source 1..5058: mol_type = other DNA
  misc_feature 1..5058: note = Synthetic

SEQ ID NO: 14469 - DNA, 5094 bp, unidentified
  misc_feature 1..5094: note = Synthetic
  source 1..5094: mol_type = other DNA
atggcgtctaacgacgcttccgctgccgctgctgctaacagcaacaacgacaccgcaaaatcttcaagtgacggaatgctttctagtatggctgtcacatttaaacgagccctcggggcacggcctaaacagcctcccccgagggaaataccacaaagacccccacgaccacccaccccagaactggtcaaaaagatccctcctcctccacccaacggggaggatgaaccagtggtttcttacagcgtcaaagatggcgtttccggcttgcctgagcttaccactgtcaggcagccgggtgaaaccaacacggcgttcagtgttcccccactcaatcaaagggagaatagggacgccaaggagccactaactggaacaatcctggaaatgtgggacggggagatctaccattacggcctgtatgtggaacgaggtcttgtacttggtgtgcacaaaccaccggctgccatcagcctcgccaaggttgaactaacaccactctctctgttttggagaccagtgtatacaccacagtatctcatctctccggacactctcaggagactgcacggagagtcgtttccctacacagcctttgataacaactgctatgccttctgttgttgggtcctggacctaaacgactcgtggttgtgcaggagaatgatccagaggacaactggtttcttcaggccctaccaagactggaataggaaaccccttcccaccatggatgactccaagttgaagaaggtagctaacatattcttgtgcgcgctatcttcgctattcactaggcccatcaaagacataataggaaagttgaggcctctcaacatccttaacatcttggcttcatgtgattggacttttgcaggcatagtggaatctttgattctcttggcagagctctttggagttttctggacacccccagatgtgtctgcgatgatcgcccctttactaggtgactacgagctgcaggggcccgaggaccttgcagtggaactcgttccaatagtgatgggggggattggtttggtgctagggttcaccaaagagaagatcgggaaaatgttgtcatctgctgcatccaccttaagagcttgtaaagaccttggtgcatacggactggaaatcttaaaattggtcatgaagtggttcttcccaaagagagaggaagcaaatgagctggctatggtgaggtccatcgaggatgcggtgttggacctcgaggcaattgaaaacaaccacatgactgccctcctcaaagacaaagacagcctggcaacctatatgagaactcttgacctcgaggaggagaaagccagaaagctttcgaccaagtctgcttcacctgatatcgtgggcacaatcaacgctctcctggcgagaatcgccgctgcacgctccctggtgcatcgggcgaaagaggagctctccagcagaccaagacctgttgttgtgatgatatcaggtaagccagggatagggaaaacccaccttgccagggaattggccaagaaaatcgcagcttctctcacaggggaccagcgtgtgggtcttatcccgcgcaatggtgttgatcactgggacgcatataagggagaaagagtcgttctatgggacgactatggaatgagtaaccccatccacgacgccctcaggttacaagaacttgctgacacctgccccctcacgctaaattgtgataggattgagaataaaggaaaggtctttgacagtgatgccataatcatcaccactaacctggccaacccagcaccactggactatgtcaattttgaagcatgctcgaggcgtatcgacttcctcgtgtatgcagatgcccctgaagtcgagaaggcgaaacgtgatttcccaggtcaacctgacatgtggaagaacgctttcagtcctgacttctcgcacataaaactgatgctggctccgcagggtggcttcgacaagaacggaaacaccccacatgggaaaggcgtcatgaaaaccctcactactggttccctcatcgctcgagcatcagggctactccatgagaggttagatgagtacgagttacagggcccaacccccactaccttcaactttgaccgcaacaaggtgcttgcgttcagacagcttgctgctgaaaacaagtacgggttgatggacacaatgagagtcggaaaacagctcaaggatgtcaggaccatgccagagctcagacaagcactcaagaacatctcaatcaagagttgccagatagtgtatggtggctgcacctatatgcttgagtctgatggcaagggtgatgtgaaagttgacagagttcagaacgccactgtgcagaccaacaatgaactggccggcgccctacaccatcttaggtgtgccaggattagatattatgtcaagtgcattcaggaggccctgtattccatcatccaaattgctggagctgcatttgtcaccacgcgcattgtcaagcgcatgaacatacaagacctttggtccaagccacaggtggaagatacagaggagactgctagcaaggatgggtgcccaaaacccaaggatgatgacgagttcgttgtttcatccgacgacatcaaaaccgagggcaagaaaggaaagaacaagtctggccgtggtaagaagcacacagcattctcaagcaaaggcctcagtgatgaggagtacgatgagtacaaaagaatcagagaagaaagaaacggcaagtactctatagaggaataccttcaggacagagataagtattatgaggaggtggccatcgccagggcgaccgaagaggacttctgtgaagaagaagaggccaagatccgacaaaggatttttaggccaacaaggaagcaacgcaaagaggagagggcctctctcggcttggtcacaggttctgaaatcaggaagaggaacccagacgacttcaagcctaaaggaaagctgtgggctgatgacgacaggagtgttgactacaatgagagactcaattttgaagccccaccaagcatttggtcgaggatagtcaactttggttcaggttggggtttttgggtttcccccagcctgttcataacatcaactcatgtcataccccagggcgcacaggagttctttggggtttccatcaagcaaattcagatacacaaatcgggtgaattctgtcgcttgaggtttccaaaaccaatcagaactgatgtgacaggcatgatcctagaagaaggtgcgcccgaagggaccgtggtcacattactcatcaagagaccaactggagaactcatgcccttggcagccagaatgggaacccatgcaaccatgaagatacaagggcgcactgttgggggtcaaatgggcatgctcctaacaggatctaacgccaagagtatggacctgggcaccacaccaggtgactgtggctgtccctacatttacaagagagggaatgactacatagtcattggagtccacacggctgctgcccgtggaggaaacactgtcatatgtgccacccaggggagcgagggggaagccacacttgaaggcggtgacaacaagggaacctactgcggtgcaccaatcttaggtccagggagtgccccaaagctcagcaccaagactaagttttggagatcatccacagcaccactcccacctggtacctatgaaccagcctatcttggcggcaaggaccccagagtcaagggtggcccctcattgcaacaagttatgagggaccagctgaaaccattcactgagcccaggggcaaaccaccaaaaccaagtgtgttagaggctgccaagaaaaccatcatcaatgttcttgaacaaacaattgacccacctcaaaaatggtcattcgcgcaggcatgcgcatccctcgacaagaccacttccagcggccacccgcaccacatgcggaagaacgactgctggaacggggagtccttcacaggcaaattggcagaccaggcttccaaggctaacctgatgttcgaagagggaaagaacatgaccccagtctacacaggtgcgcttaaggacgagctggtcaagactgacaaaatttatggcaagatcaaaaagaggcttctctggggctcggatctggcaaccatgatccggtgtgctcgagcgtttggaggcctgatggaggaactcaaagcacattgtgtcacactacccgtcagagtaggtatgaatatgaatgaggatggccctatcatctttgagaggcactccagatataagtatcattatgatgctgattactcccggtgggactcaacacaacaaagagccgtgttagcagcagccttagaaatcatggttaagttctccccagaaccgaatctggcccaaaaggttgcagaagaccttctctctcccagcgtgatggacgtaggtgacttcaaaatatcaatcaatgagggcctcccctccggggtgccctgcacctcccaatggaattccatcgcccactggctcctcaccctctgtgcgctttctgaggttacaaacctgtcccctgacattatccaggctaattccctcttttccttctacggtgatgatgaaattgtgagcacagacataaaattggacccagagaagttgacagcaaaacttaaggaatacgggttgaaaccgacccgccctgacaagactgagggaccccttgttatctctgaggacctggatggcctaaccttcctgcggaggactgtgacccgcgacccagctggctggtttggaaagctggaacagagctcaatacttaggcaaatgtattggactaggggccctaaccatgaagacccatctgaaacaatgataccacactcccaaagacccatacaattgatgtctttgctgggcgaggctgcactccacggcccagcattctacagcaaaatcagcaagctggtcattgcagagctgaaggaaggtggcatggatttttacgtgcccagacaagagccaatgttcagatggatgaggttttcagatctgagcacgtgggagggcgatcgcaatctggctcccagttttgtgaatgaagatggcgtcgagtga

SEQ ID NO: 14470 - DNA, 5094 bp, unidentified; identical to SEQ ID NO: 14469
  source 1..5094: mol_type = other DNA
  misc_feature 1..5094: note = Synthetic

SEQ ID NO: 14471 - DNA, 5370 bp, unidentified
  misc_feature 1..5370: note = Synthetic
  source 1..5370: mol_type = other DNA
atgatgatggcgtcaaaagacgtcgttcctactgctgctagcagtgaaaatgctaacaacaatagtagtattaagtctcgtctattggcgagactcaagggttcaggtggggctacgtccccacccaactcgataaagataaccaaccaagatatggctctggggctgattggacaggtcccagcgccaaaggccacatccgtcgatgtccctaaacaacagagggatagaccaccacggactgttgccgaagttcaacaaaatttgcgttggactgagagaccacaagaccagaatgttaagacgtgggatgagcttgaccacacaacaaaacaacagatacttgatgaacacgctgagtggtttgatgccggtggcttaggtccaagtacactacccactagtcatgaacggtacacacatgagaatgatgaaggccaccaggtaaagtggtcggctagggaaggtgtagaccttggcatatccgggctcacgacggtgtctgggcctgagtggaatatgtgcccgctaccaccagttgaccaaaggagcacgacacctgcaactgagcccacaattggtgacatgatcgaattctatgaagggcacatctatcattatgctatatacataggtcaaggcaagacggtgggtgtacactcccctcaagcagccttctcaataacgaggatcaccatacagcccatatcagcttggtggcgagtctgttatgtcccacaaccaaaacagaggctcacatacgaccaactcaaagaattagaaaatgaaccatggccgtatgccgcagtcacgaacaactgcttcgaattttgttgccaggtcatgtgcttggaagatacttggttgcaaaggaagctcatctcctctggccggttttaccacccgacccaagattggtcccgagacactccagaattccaacaagacagcaagttagagatggttagggatgcagtgctagccgctataaatgggttggtgtcgcggccatttaaagatcttctgggtaagctcaaacccttgaacgtgcttaacttactttcaaactgtgattggacgttcatgggggtcgtggagatggtggtcctccttttagaactctttggaatcttttggaacccacctgatgtttccaactttatagcttcactcctgccagatttccatctacagggccccgaggaccttgccagggatctcgtgccaatagtattgggggggatcggcttagccataggattcaccagagacaaggtaagtaagatgatgaagaatgctgttgatggacttcgtgcggcaacccagctcggtcaatatggcctagaaatattctcattactaaagaagtacttcttcggtggtgatcaaacagagaaaaccctaaaagatattgagtcagcagttatagatatggaagtactatcatctacatcagtgactcagctcgtgagggacaaacagtctgcacgggcttatatggccatcttagataatgaagaagaaaaggcaaggaaattatctgtcaggaatgccgacccacacgtagtatcctctaccaatgctctcatatcccggatctcaatggctagggctgcattggccaaggctcaagctgaaatgaccagcaggatgcgtcctgtggtcattatgatgtgtgggccccctggtataggtaaaaccaaggcagcagaacatctggctaaacgcctagccaatgagatacggcctggtggtaaggttgggctggtcccacgggaggcagtggatcattgggatggatatcacggagaggaagtgatgctgtgggacgactatggaatgacaaagatacaggaagactgtaataaactgcaagccatagccgactcagcccccctaacactcaattgtgaccgaatagaaaacaagggaatgcaatttgtgtctgatgctatagtcatcaccaccaatgctcctggcccagccccagtggactttgtcaacctcgggcctgtttgccgaagggtggacttccttgtgtattgcacggcacctgaagttgaacacacgaggaaagtcagtcctggggacacaactgcactgaaagactgcttcaagcccgatttctcacatctaaaaatggagttggctccccaagggggctttgataaccaagggaataccccgtttggtaagggtgtgatgaagcccaccaccataaacaggctgttaatccaggctgtagccttgacgatggagagacaggatgagttccaactccaggggcctacgtatgactttgatactgacagagtagctgcgttcacgaggatggcccgagccaacgggttgggtctcatatccatggcctccctaggcaaaaagctacgcagtgtcaccactattgaaggattaaagaatgctctatcaggctataaaatatcaaaatgcagtatacaatggcagtcaagggtgtacattatagaatcagatggtgccagtgtacaaatcaaagaagacaagcaagctttgacccctctgcagcagacaattaacacggcctcacttgccatcactcgactcaaagcagctagggctgtggcatacgcttcatgtttccagtccgccataactaccatactacaaatggcgggatctgcgctcgttattaatcgagcggtcaagcgtatgtttggtacccgtacagcagccatggcattagaaggacctgggaaagaacataattgcagggtccataaggctaaggaagctggaaaggggcccataggtcatgatgacatggtagaaaggtttggcctatgtgaaactgaagaggaggagagtgaggaccaaattcaaatggtaccaagtgatgccgtcccagaaggaaagaacaaaggcaagaccaaaaagggacgtggtcgcaaaaataactataatgcattctctcgccgtggtctgagtgatgaagaatatgaagagtacaaaaagatcagagaagaaaagaatggcaattatagtatacaagaatacttggaggaccgccaacgatatgaggaagaattagcagaggtacaggcaggtggtgatggtggcataggagaaactgaaatggaaatccgtcacagggtcttctataaatccaagagtaagaaacaccaacaagagcaacggcgacaacttggtctagtgactggatcagacatcagaaaacgtaagcccattgactggaccccgccaaagaatgaatgggcagatgatgacagagaggtggattataatgaaaagatcaattttgaagctcccccgacactatggagccgagtcacaaagtttggatcaggatggggcttttgggtcagcccgacagtgttcatcacaaccacacatgtagtgccaactggtgtgaaagaattctttggtgagcccctatctagtatagcaatccaccaagcaggtgagttcacacaattcaggttctcaaagaaaatgcgccctgacttgacaggtatggtccttgaagaaggttgccctgaagggacagtctgctcagtcctaattaaacgggattcgggtgaactacttccgctagccgtccgtatgggggctattgcctccatgaggatacagggtcggcttgtccatggccaatcagggatgttactgacaggggccaatgcaaaggggatggatcttggcactataccaggagactgcggggcaccatacgtccacaagcgcgggaatgactgggttgtgtgtggagtccacgctgcagccacaaagtcaggcaacaccgtggtctgcgctgtacaggctggagagggcgaaaccgcactagaaggtggagacaaggggcattatgccggccacgagattgtgaggtatggaagtggcccagcactgtcaactaaaacaaaattctggaggtcctccccagaaccactgccccccggagtatatgagccagcatacctggggggcaaggacccccgtgtacagaatggcccatccctacaacaggtactacgtgaccaactgaaaccctttgcggacccccgcggccgcatgcctgagcctggcctactggaggctgcggttgagactgtaacatccatgttagaacagacaatggataccccaagcccgtggtcttacgctgatgcctgccaatctcttgacaaaactactagttcggggtaccctcaccataaaaggaagaatgatgattggaatggcaccaccttcgttggagagctcggtgagcaagctgcacacgccaacaatatgtatgagaatgctaaacatatgaaacccatttacactgcagccttaaaagatgaactagtcaagccagaaaagatttatcaaaaagtcaagaagcgtctactatggggcgccgatctcggaacagtggtcagggccgcccgggcttttggcccattttgtgacgctataaaatcacatgtcatcaaattgccaataaaagttggcatgaacacaatagaagatggccccctcatctatgctgagcatgctaaatataagaatcattttgatgcagattatacagcatgggactcaacacaaaatagacaaattatgacagaatccttctccattatgtcgcgccttacggcctcaccagaattggccgaggttgtggcccaagatttgctagcaccatctgagatggatgtaggtgattatgtcatcagggtcaaagaggggctgccatctggattcccatgtacttcccaggtgaacagcataaatcactggataattactctctgtgcactgtctgaggccactggtttatcacctgatgtggtgcaatccatgtcatatttctcattttatggtgatgatgagattgtgtcaactgacatagattttgacccagcccgcctcactcaaattctcaaggaatatggcctcaaaccaacaaggcctgacaaaacagaaggaccaatacaagtgaggaaaaatgtggatggactggtcttcttgcggcgcaccatttcccgtgatgcggcagggttccaaggcaggttagatagggcttcgattgaacgccaaatcttctggacccgcgggcccaatcattcagatccatcagagactctagtgccacacactcaaagaaaaatacagttgatttcacttctaggggaagcttcactccatggtgagaaattttacagaaagatttccagcaaggtcatacatgaaatcaagactggtggattggaaatgtatgtcccaggatggcaggccatgttccgctggatgcgcttccatgacctcggattgtggacaggagatcgcgatcttctgcccgaattcgtaaatgatgatggcgtctaa

SEQ ID NO: 14472 - DNA, 5370 bp, unidentified; identical to SEQ ID NO: 14471
  source 1..5370: mol_type = other DNA
  misc_feature 1..5370: note = Synthetic

SEQ ID NO: 14473 - DNA, 411 bp, unidentified
  source 1..411: mol_type = other DNA
  misc_feature 1..411: note = Synthetic
atgagcgggacgacggacggcaatgcgtttgaggggggagtgttcagcccatatctgacatctcgtcttccttcctgggcaggagttcgtcagaatgtagtgggctccaccgtggacggacggccggtcgcccctgcaaattccgccaccctcacctatgccaccgtgggatcatcgttggacactgccgcggcagctgccgcttctgctgccgcttctactgctcgcggcatggcggctgattttggactatataaccaactggccactgcagctgtggcgtctcggtctctggttcaagaagatgccctgaatgtgatcttgactcgcctggagatcatgtcacgtcgcctggacgaactggctgcgcagatatcccaagctaaccccgataccgcttcagaatcttaa

SEQ ID NO: 14474 - DNA, 186 bp, unidentified
  source 1..186: mol_type = other DNA
  misc_feature 1..186: note = Synthetic
atgggttctccggaagatgatttgacagactttatagaaattgttaaatctgttctaagtgatgagaaaactgtcacatcaactaataataccggttgttggggttggtattggttaattattattttttttatagttcttattctactactattgatatatttgtatttaaaagttgtttggtga

SEQ ID NO: 14475 - DNA, 51 bp, unidentified; identical to SEQ ID NO: 2564
  source 1..51: mol_type = other DNA
  misc_feature 1..51: note = Synthetic

SEQ ID NO: 14476 - DNA, 51 bp, unidentified; identical to SEQ ID NO: 2564
  misc_feature 1..51: note = Synthetic
  source 1..51: mol_type = other DNA

SEQ ID NO: 14477 - DNA, 51 bp, unidentified; identical to SEQ ID NO: 2563
  misc_feature 1..51: note = Synthetic
  source 1..51: mol_type = other DNA

SEQ ID NO: 14478 - DNA, 51 bp, unidentified; identical to SEQ ID NO: 2563
  source 1..51: mol_type = other DNA
  misc_feature 1..51: note = Synthetic

SEQ ID NO: 14479 - DNA, 774 bp, unidentified
  misc_feature 1..774: note = Synthetic
  source 1..774: mol_type = other DNA
atacgcatggcatcgcgggggctagacctctggctggatgagcacgtgtggaagaggaaacaggagattggtgtgaaaggagaaaatctgcttctccccgacttatggctagatttcctacaactcagccccatcttccagcgcaagcttgctgccattattgcctgtgtccgacgcctgcggactcaggccaccgtctacccggaggaggacatgtgcatggcctgggcccgcttttgcgacccctctgatattaaggtggttattttgggccaggacccctatcacgggggtcaagcaaacggcctggcattcagcgtcgcatacggctttccagtcccccccagcctgaggaacatctacgcggagctgcaccggagtctgccggagttttctcccccagatcacggctgtctagacgcgtgggcctcccagggggtgttgctactcaacaccatcctgaccgtgcaaaagggcaagcccggctcgcacgcagacattggctgggcgtggtttactgaccacgtaatttcattgctctctgagcggttaaaagcgtgcgtgtttatgctgtggggtgcgaaggcgggagacaaagcttcactaatcaactccaagaagcatctggttctgacctctcagcatccctctcccctggcccagaacagcacccgaaagagtgcccagcagaagttcctgggcaacaaccactttgtcctcgctaacaactttttgcgtgagaaggggctcggtgagatagattggaggctgtag

SEQ ID NO: 14480 - DNA, 105 bp, unidentified; identical to SEQ ID NO: 7056
  misc_feature 1..105: note = Synthetic
  source 1..105: mol_type = other DNA

SEQ ID NO: 14481 - DNA, 105 bp, unidentified; identical to SEQ ID NO: 7056
  source 1..105: mol_type = other DNA
  misc_feature 1..105: note = Synthetic

SEQ ID NO: 14482 - DNA, 627 bp, unidentified
  misc_feature 1..627: note = Synthetic
  source 1..627: mol_type = other DNA
attttggtcagactggagacgcagactcagtacctgacccccagcctctcggacagccaccagcagccccctctggtctgggaactaatacgatggctacaggcagtggcgcaccaatggcagacaataacgagggcgccgacggagtgggtaattcctcgggaaattggcattgcgattccacatggatgggcgacagagtcatcaccaccagcacccgaacctgggccctgcccacctacaacaaccacctctacaaacaaatttccagccaatcaggagcctcgaacgacaatcactactttggctacagcaccccttgggggtattttgacttcaacagattccactgccacttttcaccacgtgactggcaaagactcatcaacaacaactggggattccgacccaagagactcaacttcaagctctttaacattcaagtcaaagaggtcacgcagaatgacggtacgacgacgattgccaataaccttaccagcacggttcaggtgtttactgactcggagtaccagctcccgtacgtcctcggctcggcgcatcaaggatgcctcccgccgttcccagcagacgtcttcatggtgccacagtatggatacctcaccctga

SEQ ID NO: 14483 - DNA, 171 bp, unidentified
  source 1..171: mol_type = other DNA
  misc_feature 1..171: note = Synthetic
atgattgcaaaatgtaccttgtgttggacagtatttgttcacgcgctaatcattttaatgatacttttattaattcttcgttctctaattggatttaacaacgatctttggtcgcaatcacaactagcttttacttgtctgaataaaagtttatctcatgttccagcataa

SEQ ID NO: 14484 - DNA, 366 bp, unidentified
  source 1..366: mol_type = other DNA
  misc_feature 1..366: note = Synthetic
atggattccaacacgataacctcgtttcaggacattttacagaggatgtcaaaaatgcaattggaatcctcatcggtggacttgaatggaatgataactcaattcgagcgtctgaaaatatacagagattcgcttggggaatccatgatgagaatgggggaccttcactccctccaaaacagaaacgctacatggcgaaacgagttgagtcagaagtttgaagagatcagatggctcattgctgaatgtagaaatatactgacaaagactgaaaatagctttgaacagataacatttttgcaagcattgcaactcttacttgaagttgagagtgagataaggaccttctcttttcagcttatttaa

SEQ ID NO: 14485 - DNA, 693 bp, unidentified
  source 1..693: mol_type = other DNA
  misc_feature 1..693: note = Synthetic
atggattccaacacgataacctcgtttcaggtagattgttatctatggcacataagaaagctactcagtatgagagacatgtgtgatgccccctttgatgacaggctccgaagagaccaaaaggcattaaagggaagaggcagcacacttggactcgatttaagagtggctacaatggaggggaaaaagatcgttgaggacatcctgaagagtgagacaaatgaaaacctcaaaatagccattgcttccagtcctgctcctcggtatatcaccgatatgagcatagaggagatgagccgagaatggtacatgctgatgcctaggcagaaaataactggaggccttatggtgaaaatggaccaagccataatggataaaagaattatccttaaagcaaatttctcagttctatttgatcaactagagacattagtctctctgagggcattcacagaaagtggtgctattgtggctgaaatatttcccattccctccgtaccaggacattttacagaggatgtcaaaaatgcaattggaatcctcatcggtggacttgaatggaatgataactcaattcgagcgtctgaaaatatacagagattcgcttggggaatccatgatgagaatgggggaccttcactccctccaaaacagaaacgctacatggcgaaacgagttgagtcagaagtttga

SEQ ID NO: 14486 - DNA, 1863 bp, unidentified
  source 1..1863: mol_type = other DNA
  misc_feature 1..1863: note = Synthetic
ctgtcaatctgttccactacgctcctgactttggcatccgatgtcatgttgaggatgaacccggggctgggctcgtccatatcagtgcacccttccgagctgtccatctccctctttgagatcctgcaaggcaagtattcttatgtcagaggtcagactctacactgcagcctgcgaaacccgggtgtttttttcagacagctatttatccacctgtacaagaatgcattggccaactgtagctacgaccacgtcttgtccgactggaggacatacgagtcctcagcaaaaaccaggtggccagaaaaggaagcacagtgggggtcttacagaaggtcaaccttcgactcctgggcccagactatgcgcatgacattagaccacctgcttctcaatgccatcaaccgggtcctctacgccaagacacagctctcgtatgagagatacgtagactgggtggtcacggtaggaatggtaccagtcgtcaagcacacacccgaccacaagctggttaactctatccaggaacagctgatgaaagattgccagcgtctggcctctggtgaaaaaaccataggccggatactcaccagcgtgactcaggagattagcaacctggtgtctagtttaagcgccctctatattccgggctactcagaggtgagcatagactatgactgtgttaaaaacactttcgtgggattgtataagcagaaaagggttcatgtggaggtgattactatgcccgccatcttggctgggcgggtgatctttgacagccccattcagaggatgtataccagcattatgagctgtcaccggacggcagagcacgcaaaactttgccagctcctgaacacagcccccaccaaggccctcgttggaagcgcctgtaacaatgtgtacaaagacatcatgacccacctggagcaggcctctcagagaacagaccccaagcgagagctcctcaacctgctcatgaaactggcagaaaacaagacagtgagcggtgtcaccgacgtcgtggaggactttgtcaccgacgtgtcccaaaacatagtagacaagaataaactattcggcacaggccaagagacgaccactcaggggctcaggcgccaggtgtccaacagcgttttcaagtgtctcaccaaccagataaacgaacaatttgacacaataactcaacttgaaaaggagagggagctctgcatgaagaggctaaaatgtattgagacacagctgtcacaccaacagcccggtgacgcaaagggtcccgggagtgtgaatctgctgaccgccaacacatttcaatctctgggacgtttacaggacccctctctgcagctaacgtcttcccatatcccatcgggcagtgccgtgctaaatagctttttctcttcttacatacccccagtgagagaaagcatgaaagatctcacgaacctgtgggaaagcgagatgtttcaaacctacaagctggctcccgttgttgacaaccaagggcagcggctcagcgtcacctattctcaggacaccatatccatcctgcttggtccattcacgtatgtgatcgcggacctgcttcagatggagctcattagtcactccttcgtatcctccagcttgcaggacatcgcggcctatttatatcagactagcagactctttgtgtatataaccgacgtgggacagaaatactgtctagttacaccacccttcgagaatgtccctggaaagggccctggcgagactgactggagtgccaatgagtactcatgccccgaagactcgcgagtcagaagaggcctgtcccgtatacccccaccctgtggtgccccgccttgtcctggaagtgcatag

SEQ ID NO: 14487 - DNA, 1863 bp, unidentified
  misc_feature 1..1863: note = Synthetic
  source 1..1863: mol_type = other DNA
ctgtcaatctgttccactacgctcctgactttggcatccgatgtcatgttgaggatgaacccggggctgggctcgtccatatcagtgcacccttccgagctgtccatctccctctttgagatcctgcaaggcaagtattcttatgtcagaggtcagactctacactgcagcctgcgaaacccgggtgtttttttcagacagctatttatccacctgtacaagaatgcattggccaactgtagctacgaccacgtcttgtccgactggaggacatacgagtcctcagcaaaaaccaggtggccagaaaaggaagcacagtgggggtcttacagaaggtcaaccttcgactcctgggcccagactatgcgcatgacattagaccacctgcttctcaatgccatcaaccgggtcctctacgccaagacacagctctcgtatgagagatacgtagactgggtggtcacggtaggaatggtaccagtcgtcaagcacacacccgaccacaagctggttaactctatccaggaacagctgatgaaagattgccagcgtctggcctctggtgaaaaaaccataggccggatactcaccagcgtgactcaggagattagcaacctggtgtctagtttaagcgccctctatattccgggctactcagaggtgagcatagactatgactgtgttaaaaacactttcgtgggattgtataagcagaaaagggttcatgtggaggtgattactatgcccgccatcttggctgggcgggtgatctttgacagccccattcagaggatgtataccagcattatgagctgtcaccggacggcagagcacgcaaaactttgccagctcctgaacacagcccccaccaaggccctcgttggaagcgcctgtaacaatgtgtacaaagacatcatgacccacctggagcaggcctctcagagaacagaccccaagcgagagctcctcaacctgctcatgaaactggcagaaaacaagacagtgagcggtgtcaccgacgtcgtggaggactttgtcaccgacgtgtcccaaaacatagtagacaagaataaactattcggcacaggccaagagacgaccactcaggggctcaggcgccaggtgtccaacagcgttttcaagtgtctcaccaaccagataaacgaacaatttgacacaataactcaacttgaaaaggagagggagctctgcatgaagaggctaaaatgtattgagacacagctgtcacaccaacagcccggcgacgcaaagggtcccgggagtgtgaatctgctgaccgccaacacatttcaatctctgggacgtttacaggacccctctctgcagctaacgtcttcccatatcccatcgggcagtgccgtgctaaatagctttttctcttcttacatacccccagtgagagaaagcatgaaagatctcacgaacctgtgggaaagcgagatgtttcaaacctacaagctggctcccgttgttgacaaccaagggcagcggctcagcgtcacctattctcaggacaccatatccatcctgcttggtccattcacgtatgtgatcgcggacctgcttcagatggagctcattagtcactccttcgtatcctccagcttgcaggacatcgcggcctatttatatcagactagcagactctttgtgtatataaccgacgtgggacagaaatactgtctagttacaccacccttcgagaatgtccctggaaagggccctggcgagactgactggagtgccaatgagtactcatgccccgaagactcgcgagtcagaagaggcctgtcccgtatacccccaccctgtggtgccccgccttgtcctggaagtgcatag

SEQ ID NO: 14488 - DNA, 6765 bp, unidentified
  misc_feature 1..6765: note = Synthetic
  source 1..6765: mol_type = other DNA
atggctaattgccgtccgttgcctattgggcagttgcccaacaggatttttgacaccccacgactcaccccagggtgggtgtgggcgtgcacgagtgaagccacgtttaagttggaatggcttcaggatccggtggtcattcgacccccggacgtgtttgtggcgcaaggggtggtggatgatttcttccgccccaagcgcgttttgcagggcgacccgcaactcatcgcacaggtcctgcttggtgacgccaatggaccactggttggccctgtgtccatgcagcaactgacatcactgttgcatgaggtgtcgcaggccctaagtgaccacaagcacccactggccaacagatacactagggcctctttgcagaggtatgctgacaccttgtccaattacatacctcttgtggacattctaacaggaccaaaggaccttaccccacgtgacgttcttgaacagctcgcagcaggacgtgagtgggagtgtgtgccagatagtgctctgaagaaggttttcagggacatgtggcagtacatttgtgaggggtgcgacagtgtgtacataaagcttcaggacgtgaagcgcaaaatgccacacattgacaccactgtgctgaaacaattcattatcacactgacagataccatctccatggcaacagccttagacaccaaaacgtggcttgcgcacattctgggttggctcaaacccacctgtttggtgatgatcatgcaacaacatgtcaactccccccaggggtgggctgccacgttaactgctttggcagagctgtattatggcatcatgccattaacagaaacacttggttctgttgccagctgggtgactgacaaatttgctgacatggcgactagcacctggggcaaattcaaatcctggtgggacagcctctacacgccgcaggcaggcaatgatctcatcatattggggggcgttgttgggctggtgtacttcatggtgtttggcgatgcacccacccaaatgttcaccaagaagctgatgagggtgtgtggttttatcacctcgacggtggctgccattaaagctgccatgtggatagtggactacttcaagcagcgtgagcacgagcaccaagtccgcatcaccctagcaagatgggccgcactccaggaggtgataaagcagaacaggtgtgctggtcttagcgaggtgactaagttgaaggaatgttgtgaagtgctgctgaacgaggtcaccgaattgatgtataagctgggggcttcacctctggctgggttgatacgcagcacctctgatgtgatacaaaccaccatcaatgagctggcccagttgatggcttatgatacccagcgtaaaccacccgccatggtggtgttcgggggtccaccgggcataggtaaaactcggctggtggaggccctagccaagcaactgggagaggtcagccacttcaccatgactgttgaccactatgacacgtacacaggcaacacagtagcaatttgggacgagtttgatgtggactcaaaacaggctttcatcgaagccactattggcatcgtgaattgtgccccttaccccttgaactgtgatcgccccgaagcaaagggcagggttttcacatctaaatatgtgttggctaccaccaattgccccaccccagtcatgcctgaccatccaagggctatggctttttggcgtcgcataacttttattgacgtgacagcccccacaattgaacaatggctggtggacaacccagggcgcaaagcccctacaagtctctttaaggatgacttttcccatctgcaatgctcagtacgcggctacactgcctatgatgagaagggcaacacactcagtggtaaggtggccagggccagatatgtgtcagtcaacaacctccttgatctgattaaagagaagtacaacagcgaggccgctgatgtcaaacatctatggttcaccgtcccacaggccatccataagcaagcgcgtgacatcatactgggctggttgcggttccactcctacccgaacacagtcgcagacaacatacccctttctgaggtcagagaccccacgtgttttgggtatgtggtgatttctgatgtggatccaccacgacatgtagctgagcatgttgcccacatagaagtggagtcaatattgcgcactgacattgtgggcttgttgagggagggtggtggaggcctgttcagagctctcaaagtcaagagtgccccccgcaactgtattatcaacaaggtcatgatgcaggcacaccacaccaccttgcaagtgctcaccagtcaagaaccacacccaccaaacttaccacggcccagacgcttggtgtttgttgagtcgccaattgacatcatcagcgccctacggcaccacgtcggcttttgcaccatccctggcatcgtcaaattgatcacctctggggtggggttgggcgttgaaaacttgggcaattttctccaatccattgctggcaatgttcggttccctttgcagtctgagtgctcactgctcaggacgccaagtggtgacgtcctcttttacacctcaggacaggctgccgtctgggccacacctgcgcgctttccaatagttacgccaggagaggcgtcagttggcaaggaggtttgttcagagtcctcctggtgggacattctcaaagcactcttcagcacactggtggtggcgtttggacccattgccacactagtgttgacagcccacaacttggcctacttgaacacccgtgaaaacacgcttagcgaggcgaaagggaaaaacaaacgcggacgtggtgctcgcagggccattgccctcagggatgatgagtatgatgagtggcaggacatcatccgtgactggcgcaaggaaatgactgttcaacagttcctggatctcaaggaacgcgcactgtcaggcgcatcagaccctgactcccaaagatacaacgcttggcttgaactgcgcgcaaagaggctgagcgctggggcctaccaacacgcggttgtggacatcatcggcaagtcaggccacaggcgtgaggtgattcgcacacaggtcatgcgtgcgccacgtgagccaaaaggtgacacctatgacagtgaggggcgtggatacgtggtacccatgactgcccaagagaagcacacaggttgggcggtccacatcgggaatgggcgcctggtcacttgcacgcatgtggccaacatgtgtgaccgtgtagccgaggtggagttcaaggtcgcagaaacagaccgcgacacctgcatcatcactgcccccctcggccacctgcctagcgttgcgcttggtaatgggccaccagcattttacacaaccaacttccaccccatccgggtgctggatgagggcagctgggacaccacaaccacccgtgtgacagggtggcgcgtggtcatcaacaatggcacaacaacggccccaggcgactgcggtcaaccctatctcaatgcgcgacgacaactggttggagtgcacgccgcaactagcacgtgtggggtgaagaagcttgtgtcaagggtgcaaaccaagaagaccgcaaaagccaccttcccatggaagggcttgccagtaacaaccatgcctgatgctggcggattacccaccgggacccggtatcaccggtccatcgcatggccaaaattgctcccagaagaaacccatgcacctgcgccctatggcgtgaatgacccaaggcaccccttctcacaacaccaaatgattgccaataatctacaaccttatatcaacacaccagttgctttggatcaaaccctgttgcaacgtgcagtcaaacacaccaaaggctaccttgaccaaatcattgggacccatagatcaccaaacttgacctatgctgctgcggtcgaatcaatggcccatgacacggcgtgcgggccaaacttgcctggccggaaaaaggattatatgacagaccaaggggagccaattggacctttgaaacaaatgttagaagaagcctgggatatggcgcaccgtggtgttccacgcagacacgagtacaagctcgcactcaaggatgagcttcgccccatagaaaagaatgaccaaggcaaaaaacgcctgctgtggggctgcgatgctggcgtgtcaatgatagccaacgctgttttcaaacctgttactgagcgcctcgtggacaccgtgcccatgcaccctgtggctgttggcatatgtatggatagccctcagattgaacaaatgaaccaagccttaactggtagggtgctctattgcctggactacagcaagtgggattccacacaaaatccggccgtcacctgtgccagtgttgacatcctggcctcctatgctgaggacacacctttgtcctcggcagccatagccaccctgtgctcaccagccgtgggcaggttggatgacatcggcttgactgtgacatcagggctcccctctggcatgcccttcaccagtgttataaactctgtgaatcacatgatctactttgccatggctgtgctcgaggcctacgaggaattcaaggtgccttatatggggaacatctttgacaatgagactatttacacctacggggatgattgtgtgtatggcttaacaccagccacagcctccatcatgcctgtggtggtcaagaacctgactagctatgggttggtccccactgctgcagacaaatctcaaagcattgagccaacagacactcctgtgttcctcaagcgcaccttttcccaaaccccttttggtctgcgtgcgctactagatgagactagtctggcgcggcagtgttactgggttaaggctaaccgcaccacagaccttttcgagccggcggccgttgatgtggacatcaggaaaaaccaactggaagtgatgcttgcatatgcaagccaacacccaagatcggtgtttgacaagctggcaggcatggctgaggtcactgcaagtgctgagggctaccagcttgtgaatgttaattgggccaacgcagtggcaacgtacaacgcatggtacggtggcactgacggtggccgtgctcccaccaatgaagatgaagagccagaagtgttcgtgatggaggcgcctgccccaacccgttcggttgcgagcaacccagagggcactcaaaatagtaatgagtccagaccagtccagccagctgggcccatgcccgtggctgcggcccaggctctggaaatggccgttgccacagggcaaatcaatgataccatccccagtgtggtcagagagaccttcagtacctacaccaatgtcacctggaccacacgccagcctacaggaactcttcttgcccgaatgtccctggggccaggcttgaacccctacacgctccacttgtccgccatgtgggccggctggggtgggtcatttgaaatcaaggtgataatatcagggtctggcatgtatgcgggcaaattgctgtgtgcgctcataccacccggtgttgatcccagtgctgtagaccaacctggggccttcccgcatgcacttgtggacgcgcgcatcactgacggcgtcaccttcaccttgggggacgtcagggcggtggattatcacgagacaggagttggtggggctatagcaagtttggcactttacgtgtaccaaccgctcatcaacccttttgaaaccgccgtgtcagctgccatggtgacaattgagacccgccctggcccagattttggattcaccctgctcaagcctccaaaccaagccatggaggtaggattcgaccctaggtcgctcctgccccgcacggcaagaacactacgggggaataggtttggcagacccatcacagctgtggtcatagtaggtgtggcacaacaaatcaacaggcacttttcagctgagggcaccacgctcggctggtccacggccccgattggcccttgtgtggcccgtgtcaatggaaagcacactgacaacacaggtagggcagtgtttcagttgggacccttgagcaatgggcccctttaccccaacatcatcaaccactacccagatgtggctgcatcaacaatattcaacacaggaactgccgtaaatgacaacacgacaggtgggggaggacctatggtgatcttcaacgatgtgggtgatgtggtggaggacgtggcctaccaaatgagattcatagcctcacacgccacttcccaaagtcccacactcattgatcaaatcaatgcaacatcaatggcagtatgcagctttggcaattcccgggcagacctcaaccaaaaccagctcaatgtgggcattgaattgacctacacctgtggcaacacagcgattaatgggattgtcacctcatttatggaccgccaatacacatttggcccacaggggcctaacaacatcatgctttgggtggagtctgtgctcggcacacacacaggtaacaacactgtgtacagttcgcaaccagacactgtgtctgctgcactgcagggccagcccttcaatataccagatgggtacatggccgtgtggaacgtcaatgcagacagtgctgatttccagatagggctgagacgcgatggctacttcgtcaccaatggggccatcggcacgcgcatggtcatctcagaagacaccaccttcagtttcaacggcatgtacaccctaaccactcccctcattggaccaagtgggacatcaggaaggtccattcacagctcacgatga

SEQ ID NO: 14489 - DNA, 222 bp, unidentified
  misc_feature 1..222: note = Synthetic
  source 1..222: mol_type = other DNA
aagacattgccttttgcacagtgtgccgagagcatgctgtctctgtccctgcatacacttcctgctagaatgcgtgtggtgactcgccgtgtgatcaagagcacaggccgcacgtcttctcggacctttttgcgccgagtctcacttgtccccgcagacacttgcgcctgcgaaaacgcgtgtggttgctttcccggaagcgagacttgccatctcctctag

SEQ ID NO: 14490 - DNA, 30 bp, unidentified; identical to SEQ ID NO: 7073
  source 1..30: mol_type = other DNA
  misc_feature 1..30: note = Synthetic

SEQ ID NO: 14491 - DNA, 1338 bp, unidentified
  source 1..1338: mol_type = other DNA
  misc_feature 1..1338: note = Synthetic
ttgaggccagagacgagctgcgacaggccctcgagccatttgaggaacatggatgtgaatatggctgcggagttgagcccgacgaactcctccagcagtggcgagttgagtgtctccccagaaccccctcgagagacccaggcctttttggggaaggtgactgtcattgattacttcacctttcagcacaaacacctgaaggtgaccaacattgatgacatgacggagaccctctatgtaaagctgccggagaacatgacgcgctgtgatcacctccccattacctgcgagtatctgctggggcgggggagctacggggccgtgtatgcacatgcagataatgccacggtcaaactctatgactctgtgacggagctgtatcacgagctcatggtgtgtgacatgattcagattgggaaggccacggccgaggatgggcaggacaaggccctggtggactacctgtcggcctgcacgtcctgccacgccctgtttatgccccagttcagatgcagtctccaggattatggccactggcatgatggtagtattgagcccctggtgcggggctttcagggcctcaaagatgccgtttactttctgaatcggcactgcggcctcttccattcggacattagccccagcaacatcctggtggatttcacagacaccatgtggggcatgggtaggctggtcctgactgattatgggactgcttccctccacgaccgcaacaagatgctggatgtgcggctaaagtcttctaagggccggcagctctatcgcctctattgccagagggaaccattttctatagccaaggacacctataagcccctctgccttttgagcaagtgctacatcttgaggggggctgggcacatccctgacccctcggcgtgtggccccgtgggggcgcagacggcccttcgcctggatctgcagtcgctcggctactcgctgctctatggtatcatgcacctcgctgactccacccacaaaatcccctaccccaaccctgacatgggatttgaccgatccgacccgctctactttttgcaatttgcagccccaaaggtggtgctgttggaggtgctgtcgcagatgtggaacctgaacttagacatgggcctgacctcgtgtggcgagagtccgtgcgtggatgtcacggcggagcatatgagtcaattcttgcagtggtgccggagccttaaaaagaggttcaaggagagctacttcttcaactgtcgcccacggtttgagcaccctcatcttccaggtctggtagctgaactcttggcagacgacttctttggtccagatggccgacgtggatga

SEQ ID NO: 14492 - DNA, 1338 bp, unidentified; identical to SEQ ID NO: 14491
  source 1..1338: mol_type = other DNA
  misc_feature 1..1338: note = Synthetic

SEQ ID NO: 14493 - DNA, 1338 bp, unidentified
  source 1..1338: mol_type = other DNA
  misc_feature 1..1338: note = Synthetic
ttgaggccagagacgagctgcgacaggccctcgagccatttgaggaacatggatgtgaatatggctgcggagttgagcccgacgaactcctccagcagtggcgagttgagtgtctccccagaaccccctcgagagacccaggcctttttggggaaggtgactgtcattgattacttcacctttcagcacaaacacctgaaggtgaccaacattgatgacatgacggaaaccctctatgtaaagctgccggagaacatgacgcgctgtgatcacctccccattacctgcgagtatctgctggggcgggggagctacggggccgtgtatgcacatgcagataatgccacagtcaaactctatgactctgtgacggagctgtatcacgagctcatggtgtgtgacatgattcagattgggaaggccacggccgaggacgggcaggacaaggccctggtggactacctgtcggcctgcacgtcctgccacgccctgtttatgcctcagttcagatgcagtctccaggattatggccactggcatgatggtagtattgagcccctggtgcggggctttcagggcctcaaagatgccgtttactttttgaatcggcactgcggcctcttccattcggacattagccccagcaacatcctggtggatttcacagacaccatgtggggcatggggaggctggtcctgactgattatgggactgcttccctccacgaccgcaacaagatgctggatgtgcggctaaagtcttctaagggccggcagctctatcgcctctattgccagagggaaccattttctatagccaaggacacctataagcccctctgccttttgagcaagtgctacatcttgaggggggctgggcacatccctgacccctcggcgtgtggccccgtgggggcgcagacggcccttcgcctggatctgcagtcgctcggctactcgctgctctatggtatcatgcacctcgctgactccacccacaaaatcccctaccccaaccctgacatgggatttgaccgatccgacccgctctactttttgcaatttgcagccccaaaggtggtgctgttggaggtgctgtcgcagatgtggaacctgaacttagacatgggcctgacctcgtgtggcgagagtccgtgcgtggatgtcacggcggagcatatgagtcaattcttgcagtggtgccggagccttaaaaagaggttcaaggagagctacttcttcaactgtcgcccacggtttgagcaccctcatcttccaggtctggtagctgaactcttggcagacgacttctttggtccagatggccgacgtggatga

SEQ ID NO: 14494 - DNA, 27 bp, unidentified
  misc_feature 1..27: note = Synthetic
  source 1..27: mol_type = other DNA
atgtcaaaatcttgccgatgctcctga

SEQ ID NO: 14495 - DNA, 27 bp, unidentified
  misc_feature 1..27: note = Synthetic
  source 1..27: mol_type = other DNA
atgtcaaaatcttgccgatgctcctga

SEQ ID NO: 14496 - DNA, 27 bp, unidentified
  misc_feature 1..27: note = Synthetic
  source 1..27: mol_type = other DNA
atgtcaaaatcttgccgatgctcctga

SEQ ID NO: 14497 - DNA, 60 bp, unidentified; identical to SEQ ID NO: 7076
  misc_feature 1..60: note = Synthetic
  source 1..60: mol_type = other DNA

SEQ ID NO: 14498 - DNA, 60 bp, unidentified; identical to SEQ ID NO: 7076
  source 1..60: mol_type = other DNA
  misc_feature 1..60: note = Synthetic

SEQ ID NO: 14499 - DNA, 60 bp, unidentified; identical to SEQ ID NO: 7076
  misc_feature 1..60: note = Synthetic
  source 1..60: mol_type = other DNA

SEQ ID NO: 14500 - DNA, 822 bp, unidentified
  source 1..822: mol_type = other DNA
  misc_feature 1..822: note = Synthetic
ttggggatggcctcgtgctcaccgccgcggagagtgtcgccggacctgctcgtcagcagcgagctacgcagacggaatatctggaggagagttacgtgtgtcacaggagagcgcgggtctccggcggtaacgacggcggtgtcgtcgacacgtgtgcggcctgctgtgctctgcggaaaagcgccggtctcggagaccgtggacgaaaaagagaacggagcagctaccgctggcggcggcggcgttaatgctgccgttgatgttagacgttgtgagtactcggaaacagcggtgaggcagaagctcgatccttcagggaacgacagtcgatgtgtggtagccgcagcagatagttccacggacagcgacggcaagtccataatcgccggtgtgcaagtggtggaccacgacgaagatatcatcgcgccgcagagtttgtggtgcacggcgttcaaggaagccctctgggatgtggctctgttggaagtgccgcgttgggcgtggcagggctggaagaggtggcgcaacagcgagtctgggcgtcgatggagtgctgggtctgcgtcggcttccagcttgtctgacttggcgggcgaggccgttggagaattggtgggatcggtcgtcgcgtacgtgatccttgaacgtctgtggttggcagccaggggctgggtgtgcgaaaccggtgtggaagccgaggaggctatggcgcggcggcgacagcgcatgctgtggcgtatgttctctcgtggaggcgacggcgaatgcagcagacggtgttcgatggagatggcgtgcgaggaagaaagcgccgtgttgtga

SEQ ID NO: 14501 - DNA, 348 bp, unidentified
  misc_feature 1..348: note = Synthetic
  source 1..348: mol_type = other DNA
acggagtcgtctacgaacacggcagccgggtctcggctgtgctgcgcgaggcgcgctccggacgcgagtccgcgttcgtgttctccgcagtgctgctggacggcgtccccgccgagaagaaggacgagaaaaaggacgagggcgggaaggctgcggagaaggagacgcccgcgagccccgccgccgaaaactagcattattgggccgcgcgaaccttcgataaatgcgcacgtacacgtcgctgctctcgaagctgctcaagagcaaccgtcggctcgggagcacgcgcgtcttccgcgacccgctgcagcacatcagcgcgaccgcctttgtgcaccggcgcattga

SEQ ID NO: 14502 - DNA, 30 bp, unidentified; identical to SEQ ID NO: 7087
  source 1..30: mol_type = other DNA
  misc_feature 1..30: note = Synthetic

SEQ ID NO: 14503 - DNA, 15 bp, unidentified
  misc_feature 1..15: note = Synthetic
  source 1..15: mol_type = other DNA
atgaacaagaaatag

SEQ ID NO: 14504 - DNA, 1290 bp, unidentified
  misc_feature 1..1290: note = Synthetic
  source 1..1290: mol_type = other DNA
gtgggggtgtcacgatacccgagccgcgcgcgctgcagagcacgctcaggctctgcgagcacgcgtgcgtggcgatcatcttggagaataatcactctaataaattctcggcatgaacggcgcgcagttcgagctgctgcgcgagtacctgggcaggccgcccacgctcaaccagtacttcatcttcaagccgcaggcgcgcgccatccagcgcatcatgcgcttcgataccgacgttttctttgcgctcatcaagaagaacaagaagcgcttctttgcgcgcatcggcggcagcgccagcgagatcaacgcgcgcgtgctgtcctacttcgtcaagcagcgcgccaccaccaaggtggggcgcatcctctccatcatcgagctgcagagcgtgctggtcaacagctacaccgagatcatgggcgtgctcacgctgcccgcgccgcccgtgtacaactcggtggtgcgcctgcactactgctccatggagcgccttgccgaggaggtgctctggtcctacaacgtggccttccgcagcggcaaggtcatgggccgccactgcgtgtccaacctggtggtgcacgtgaacaagctcatgagcgagtacctgcgccgccacaaccgcacggccatctgctacggctcctactcgctgcaccttctcaacagccgcatcgagtacggcgacatcgacatcctgcagaccaacgcgcgcctgtttctgatcaacctggctttcctcatctacttcatcaccggcaggaacgtgctcctgctcaaggtaccctacctcaagagctacatcgtcatgcaggacgaagagggccgccacatcatcgacagtttcaacatccgccagggcaccatgcaaaacgtgcccaaggtgctggtggacaacatctacatcatcgaccccgtggtgcagctcatgaatacgctcaagatgctctcgcaaatcgaccgcctggaggacctgggcgagcgcatggccaagatgcgcctgcgcctggccacgctactcgaatacgcgcgctaccaccactgcgtgtccttcggcggcggcgcgcgcttgcgcctgcacatgcggctggacgcgggcgcgcgcatcgtgctggtggacacgcgctgctacgggctgggctaccgcgagtgccgctgctacctggacgaggcgcgcctcctgcaggacatctccaagctcaacgccgacgccgccgtggtcgacttcgaggccgtctccaactccgtcttcttaattcaccagggcatcatgtacacgtatttttctaa

SEQ ID NO: 14505 - DNA, 75 bp, unidentified; identical to SEQ ID NO: 7092
  misc_feature 1..75: note = Synthetic
  source 1..75: mol_type = other DNA

SEQ ID NO: 14506 - DNA, 66 bp, unidentified; identical to SEQ ID NO: 7093
  source 1..66: mol_type = other DNA
  misc_feature 1..66: note = Synthetic

SEQ ID NO: 14507 - DNA, 462 bp, unidentified
  misc_feature 1..462: note = Synthetic
  source 1..462: mol_type = other DNA
atggagaagcgagaagttaataaagctctgtatgatcttcaacgtagtactatggtgtacagttccgacgatactcctcctcgttggtctacgacaatggatgctgatacacggcctacagattctgatgctgatgctataatagatgatgtatcccgcgaaaaatcaatgagagaggataataagtcttttgatgatgttattccggttaaaaaaattatttattggaaaggtgttaaccctgtcaccgttattaatgagtactgccaaataactaggagagattggtcttttcgtattgaatcagtggggcctagtaactctcctacattttatgcctgtgtagacattgacggaagagtattcgataaggcagatggaaaatctaaacgagatgctaaaaataatgcagctaaattggctgtagataaacttcttagttatgtcatcattagattctga

SEQ ID NO: 14508 - DNA, 39 bp, unidentified; identical to SEQ ID NO: 7096
  source 1..39: mol_type = other DNA
  misc_feature 1..39: note = Synthetic

SEQ ID NO: 14509 - DNA, 234 bp, unidentified
  misc_feature 1..234: note = Synthetic
  source 1..234: mol_type = other DNA
atgccacaaggaccctcccagacggatatacgttcgtcgaggagggtctccttgacatgtttggtacaaaggcccctgacagtgttcaagaaggtacactgttccgggagctgttcggggttgaccaaaccgagcagttccctttgtccctcgcagacctggccaagttgcaaggggaacttgttgacgcaactcgcaccccaggacatgcattgcgtcaaaagtatacaatga

SEQ ID NO: 14510 - DNA, 369 bp, unidentified
  source 1..369: mol_type = other DNA
  misc_feature 1..369: note = Synthetic
atggttcttcctgttcttccctctccctccgtcaccgaaacccaacaaaattgcatcatctggctgggtctggcccattccaccgtggccgatgtgatcagagccatcagagcggatgggattttcatcacccaagaggctcaggagatactgcacgctctgagggagtggctgttctataacttcaacaccgagcgctcgaagcgccgagaccgtcgccggcgagcggtgtgcagtgcccgtaccaggttctgcttcgtgaagtacgaaaatgtcaggaaacagctccatcatgacacgatccagaacacgattagcgtcatcccgccatcatccgtaccaaccgccggcccccttacctcgctgtga

SEQ ID NO: 14511 - DNA, 48 bp, unidentified
  misc_feature 1..48: note = Synthetic
  source 1..48: mol_type = other DNA
atgggattttcatcacccaagaggctcaggagatactgcacgctctga

SEQ ID NO: 14512 - DNA, 369 bp, unidentified
  source 1..369: mol_type = other DNA
  misc_feature 1..369: note = Synthetic
atggttcttcctgttcttccctcccccgccgtcaccgaaacccaacaaaattgcatcatctggctgggtttggcccattccaccgtggttgatgtaatcagagccatcagggcggatgggattttcatcacccaagaggctcaggagatactgcacgttctgagggagtggctgttctataacttcaacattgagcgctcgaagcgccgagaccgtcgccgacgagcggtgtgcagtgcccggaccaggttctgctttgtgaaatacgaaaatgtccggaaacagctccatcatgacacgatccagaacacgattagcgttatctcgccatcatccgtaccaaccgccggccaccttacctcgctgtga

SEQ ID NO: 14513 - DNA, 276 bp, unidentified; identical to SEQ ID NO: 11223
  misc_feature 1..276: note = Synthetic
  source 1..276: mol_type = other DNA

SEQ ID NO: 14514 - DNA, 561 bp, unidentified
  source 1..561: mol_type = other DNA
  misc_feature 1..561: note = Synthetic
attggaacaaaatatattttcaaggtgatcatgataattggcatagagcagctggaaaagttgatattaatggactctattttgaggatgcaaacggggacaaaagttattttgttgtgtttgcatcagatgcccaaagatatggtactactggagaatggacagtacattataaaaatgaaacaatttcttccacttctcttagttctcaaaggtcgctctccaccatctcttctcaaggatcagtcagttcctccagggactccattcctgccaagaagggtcagtctaccagacgacaccagagcgaagagggaattgctgacagctcatcatcatcaacctcctcgtcgccgtctgcagtacgacgaggacgaagaagaccccaacaaggagaacacacctccagaggtggtggaacaagagcgaagagacaacgaacggaagaagtttctactacagtatctcctgacgaagttggaagaggaaatacaagtgttccaagaacaaatcttacacgacttgaacgacttgcgaaagaagctcgagatcccccaatag

SEQ ID NO: 14515 - DNA, 234 bp, unidentified
  source 1..234: mol_type = other DNA
  misc_feature 1..234: note = Synthetic
ctgatatgcggcgtgctgctgctgacggccgcctgcgtcttcgccttcgtggatttcagcaagaacaccagcaacatcaccgactacgtgtggcgcgcgctgtgcgtaacctgcttcatagtgggcgccgtgctgctgctcgggctgttcgtgttcagcatgtacaggaagtgctccggcagcgtcccgtacgcccggctaaacaacaccgacattgagctcaccgcccggtaa

SEQ ID NO: 14516 - DNA, 222 bp, unidentified
  source 1..222: mol_type = other DNA
  misc_feature 1..222: note = Synthetic
ctgcagaagctgcgcgtgtacacggacttggtggacgcgcggctgcgcgagatgcggcacaagaccaacctcgtggacgcggtgtcgcgtctcgtgtgtccgtgcgcgctgccgccggaggtggtgcgcggcatcctcgtgcacgtgccgacagacagcctgcggcacacgttgaccctcggcgtggcacaggcctcgcgtttccttccctcgcataaatga

SEQ ID NO: 14517 - DNA, 750 bp, unidentified
  misc_feature 1..750: note = Synthetic
  source 1..750: mol_type = other DNA
atgagaatgctgccggatttttttaccgggaactgggatgacatgttccaggggttgctggagactgaatatgtgtttgatttccctgaaccttctgaggcttctgaagaaatgtcgcttcatgatctttttgatgtggaggtggatggtttcgaagaggacgccaaccaggaagcggttgatggtatgtttcccgagaggttgctgtccgaggctgagagcgctgcagagagcggttcgggtgattctggggttggcgaagagttgttgccggttgatctggatttgaaatgctatgaagacggtttgcctcctagcgatcctgaaactgatgaggctacagaggcggaagaagaggcggctatgccgacttatgtgaatgaaaatgaaaatgagctggtgctggactgtccagagaaccctgggcgaggttgtcgggcttgtgatttccatcggggcactagtggcaatcctgaagctatgtgtgctttgtgttatatgcgtttaactggacactgtatctacagtccaatttcagatgcggaaggggagtctgagtcggggtcgcctgaggacactgattttccccaccctttaaccgccacgccgccacatggaattgtgagaaccatcccgtgcagagtttcttgtagacgacgcccagctgttgagtgcatagaagatttacttgaggaagatccaacagatgaacctttgaacctgtccttaaagcgccccaagtgctcctga

SEQ ID NO: 14518 - DNA, 90 bp, unidentified; identical to SEQ ID NO: 7109
  source 1..90: mol_type = other DNA
  misc_feature 1..90: note = Synthetic

SEQ ID NO: 14519 - DNA, 2346 bp, unidentified
  source 1..2346: mol_type = other DNA
  misc_feature 1..2346: note = Synthetic
atggatctggagccacaggaaagcttaaccgcccccaccgctcccgccattggcgctacggctgtcatggagaaggacaaaagtctactcataccccaagacgcaccggttgagcagaacttgggctacgagactccccccgaggaatttgaaggctttcttcaaatccaaaagcaaccaaatgagcaaaacgctgggctcgaggaccatgactacctaaacgagggagatgtcctgtttaaacatctacagcgacaaagcactatcgttcgcgacgccatatctgatcgctcttcaataccagtttcaattgcagaactatcttgcatctacgaacgcaacctgttctccccacgtgtgccccctaaacggcaagccaacggcacatgcgagccaaatcctcgccttaacttctacccagtttttgcagtgccagaagcactggcaacataccatattttctttaaaaatcacaaaatacccctatcctgtcgagctaaccgcagccgcgcagatgagcttcttgctttaagggctggcgcttccatacctgggattgtgtccttggaagaggtgcctaaaatttttgaaggtttaggtcgggatgaaaaacgagcagcaaatgccctgcaaaaagaaaatgaacaaaatcaccatgggaatagtgctctaatagaactggaaggtgacaatgcccgcctggcagttttaaagcgcaatattgaggttactcactttgcctacccggcagtaaatcttccgccaaaggtaatgagcgcagtgatgaatcagctactaattaagcgagcccaacccattgacaaagatgcaaacttgcaagacccggaggcaacagatgatggaaagccggttgtaagcgacgagcaattaactaagtggttgggaacagacaattccaacgaactacaacagcggcgtaaactcatgatggccgccgtacttgtaactgtggaactcgagtgcatgcatcgttttttctccgacatcaccacattgcgcaaaattgaggaatgtcttcactacactttccgccatggctacgtgcgccaagcctgtaaaatttctaatgtggagctgagcaatctagtttcttacatgggcatcttgcatgaaaaccgattgggacagaacgtgctacactcaacactacgcgatgaagcacgcagagattacgtgcgagactgcatttaccttttcctgttacatacctggcaaactgggatgggtgtttggcagcaatgcttggaagaaaaaaaccttcgagaactaaacaaactgttagacagagcactaaaatccctatggaccggttttgacgaacggacagtagctgcagagctagctgacataattttcccagaaaggttaatgataaccttgcaaaacggcttgcctgactttatgagtcaaagtatgctgcacaattatcgctcttttatattagagcgttctgggatgcttcctagcatgtgttgtgcacttccttcagattttgtgcctatatattttagagagtgcccccctcccctgtggagccactgctacttactacgacttgctaactacctagcttaccactcagaccttatgacagattcaagcggcgaaggcctaatggagtgtcactgccgctgcaatctttgcaccccccaccgttctttggtttgcaatactgaactattaagtgaaagtcaagtcattggtaccttcgaaatgcagggaccgcagtctgacagcaatttcacgacgaacctaagacttacccctgggctttggacttctgcctacctgcgcaaatttgaaccccaagattaccacgcccacagtatcaatttttacgaagaccaatccaaacccccaaaagcgccactaacggcttgcgtcattacgcagggaaaaattctagcccaattgcatgctattaagcaagcgcgcgaagagtttttacttaaaaaaggacacggagtgtaccttgatccccaaaccggcgaggaactaaaccttccatcacctttgtgtgctactgcgtctccccattcgcagcatgtccccgaaagccgcaaaacaggctattgcgcagcaacgctcaaagaaacagcagcaacggcaggaaatctgggaggaagaatcttgggagagtcaggcagaggacgaggtcgaggacttggaagaatgggaggaggaggaggcggacagcctagacgaggatccagaggaggaggaggaaggttccaaggacggagcgaccgccgccaaaccgtcgctttcaaccaagccctctccaatgaaacccgctgtgagcaaatctcagaaagccaaccgtag

SEQ ID NO: 14520 - DNA, 147 bp, unidentified
  misc_feature 1..147: note = Synthetic
  source 1..147: mol_type = other DNA
aggacaaaagtctactcataccccaagacgcaccggttgagcagaacttgggctacgagactccccccgaggaatttgaaggctttcttcaaatccaaaagcaaccaaatgagcaaaacgctgggctcgaggaccatgactacctaa

SEQ ID NO: 14521 - DNA, 108 bp, unidentified; identical to SEQ ID NO: 7113
  source 1..108: mol_type = other DNA
  misc_feature 1..108: note = Synthetic

SEQ ID NO: 14522 - DNA, 15 bp, unidentified
  source 1..15: mol_type = other DNA
  misc_feature 1..15: note = Synthetic
atgtatcaattttag

SEQ ID NO: 14523 - DNA, 717 bp, unidentified
  misc_feature 1..717: note = Synthetic
  source 1..717: mol_type = other DNA
atgtcgcagggcgccatgcgtgccgttgttcccattatcccattccttttggttcttgtcggtgtatcgggggttcccaccaacgtctcctccaccacccaaccccaactccagaccaccggtcgtccctcgcatgaagcccccaacatgacccagaccggcaccaccgactctcccaccgccatcagccttaccacgcccgaccacacaccccccatgccaagtattggactggaggaggaggaagaggaggagggggccggggacggcgaacatcttgaggggggagatgggacccgtgacaccctaccccagtccccgggcccagccttcccgttggctgaggacgtcgagaaggacaaacccaaccgtcccgtagtcccatcccccgatcccaacaactcccccgcgcgccccgagaccagtcgcccgaagacaccccccaccattatcgggccgctggcaactcgccccacgacccgactcacctcaaagggacgacccttggttccgacgcctcaacataccccgctgttctcgttcctcactgcctcccccgccctggacaccctcttcgtcgtcagcaccgtcatccacaccttatcgtttttgtgtattggtgcgatggcgacacacctgtgtggcggttggtccagacgcgggcgacgcacacaccctagcgtgcgttacgtgtgcctgccgtccgaacgcgggtag

SEQ ID NO: 14524 - DNA, 69 bp, unidentified
  misc_feature 1..69: note = Synthetic
  source 1..69: mol_type = other DNA
acgtctcctccaccacccaaccccaactccagaccaccggtcgtccctcgcatgaagcccccaacatga

SEQ ID NO: 14525 - DNA, 24 bp, unidentified
  source 1..24: mol_type = other DNA
  misc_feature 1..24: note = Synthetic
atgccgagtcatatgcggaagtga

SEQ ID NO: 14526 - DNA, 33 bp, unidentified; identical to SEQ ID NO: 7119
  misc_feature 1..33: note = Synthetic
  source 1..33: mol_type = other DNA

SEQ ID NO: 14527 - DNA, 615 bp, unidentified
  source 1..615: mol_type = other DNA
  misc_feature 1..615: note = Synthetic
ctgattatccgcaagaacctgggatgcagcgtttccgtccggaacatgtgctcggccaacgccggcgcgcagctggacgccgtcatgaaggccgtgagcagcaccttcaacgacctctcgtcggaccagaaggcctacgtgcccgggctgctcacggccgcgctcaacatccagaccacggtgaacaccgccgtcaaggacttcgagacgtacgtgaagcagacctgcacggcggacgcagtcattcacaacaaaatcaagatccaaaacatcgtcatggaagagtgcgcctctctgccggggagtccggccacgcacctggagttcgtgaacaccggcacggccgcgggcaactgcggcgtgaaggccgtgatggacgtgctcgcgaaggccagcaccaccgtgcgcaacaaccaggaggccggcaagggctaccagaccatcatcatcgcgatcgtggtcgccatcctggcggccatcttcgcctggtacgcgcggcacatgctgttcatgtccacctccgacaaaatcaagctcgagctcgccaagaagcccgtggtgcactggaccacctacctggacaccttctttacggaatttccgccgtccgtctag

SEQ ID NO: 14528 - DNA, 90 bp, unidentified; identical to SEQ ID NO: 7125
  misc_feature 1..90: note = Synthetic
  source 1..90: mol_type = other DNA

SEQ ID NO: 14529 - DNA, 321 bp, unidentified
  misc_feature 1..321: note = Synthetic
  source 1..321: mol_type = other DNA
atgacgagtttccggatctacaagatcctccagatgaggcctaagcaaaggtgtagaagtgtgtccccctccattccacccactgatatacgcccgacaataaagttgatgatattgaattccacacctactcgtgtttgtgattttatttcatattccatgagagagacctcgcatatttgcagagggtcactgaaacattttatcttaaaacagttacacctgaaaaatgaagaaagcgtggctcagcagagcacagcaagccgatgccgggggggcatctggctccgaggacccaccagattatggagatcaaggtaa

SEQ ID NO: 14530 - DNA, 24 bp, unidentified
  source 1..24: mol_type = other DNA
  misc_feature 1..24: note = Synthetic
atgaaaagtaatattcatgtgtag

SEQ ID NO: 14531 - DNA, 372 bp, unidentified
  source 1..372: mol_type = other DNA
  misc_feature 1..372: note = Synthetic
atagttaaattactaagcatgaggactctacttattagatatattctttggagaaatgacaacgatcaaacctattataatgatgattttaaaaagcttatgttgttggatgaattggtagatgacggcgatgtatgtacattgattaagaacatgagaatgacgctgtccgacggtccattgctagatagattgaatcaaccagttaataatatagaagacgctaagcgaatgatcgctattagtgccaaagtggctagagacattggtgaacgttcagaaattagatgggaagagtcattcaccatactctttaggatgattgaaacatattttgatgatctaatgattgatctatatggtgaaaaataa

SEQ ID NO: 14532 - DNA, 66 bp, unidentified; identical to SEQ ID NO: 7136
  source 1..66: mol_type = other DNA
  misc_feature 1..66: note = Synthetic

SEQ ID NO: 14533 - DNA, 24 bp, unidentified
  misc_feature 1..24: note = Synthetic
  source 1..24: mol_type = other DNA
atgacggcgatgtatgtacattga

SEQ ID NO: 14534 - DNA, 867 bp, unidentified
  source 1..867: mol_type = other DNA
  misc_feature 1..867: note = Synthetic
atgtggcgctcctcaattatgttaatcccaacaccggccgggttctgtttgaggccaagctgtatgctaatggctttctcaccgtcaaccttggcgcctcggaccaggcgatcctgcccgtggacgggatatttaaatttgtttcttgggtttctttctattaccagttgcggcccgtgggaaatattagtgttggccgccgccttccccgtcttgatggcttctgagctcttctcctcactccctggcggggttgcctccgctgccatttctgccggggctcaggctgccttgcaggaccaggcctaccggcagagtttggagttgcaggcccgctctttttcccatgattccgccatgttgcagcagcaagtccaggccacccagatggcccgctcccagtggtttgatttccaacgggctgccctgcagggcgctggcttttctgacgctgacgccacgcgtctggtcctgggggcttctcccacaaccctggtcgactggaacggcactcggctcgctgccccgcaagcccgggtgactacctccttttctggtggcttcctccccagcatgccccaggctggcgcacagagatcccaaagtcctgaaccatctgccccgggcgcccccactcgagtatcttcttggctgtcttctattgagcctttccacccctctgcattacagacagtttgggttactccccctggatccacggccacttctcaggtctcttcccagcggccttcccgctcttctgcctcttctgtggctagtagtgcctcctatactagctcttttaatcaagggtggtttaatacagatcggatgccattgttcgcaaaccttggcagacgattttga

SEQ ID NO: 14535 - DNA, 867 bp, unidentified; identical to SEQ ID NO: 14534
  misc_feature 1..867: note = Synthetic
  source 1..867: mol_type = other DNA

SEQ ID NO: 14536 - DNA, 909 bp, unidentified
  misc_feature 1..909: note = Synthetic
  source 1..909: mol_type = other DNA
atcaactttttgaaatctaccgtgcgcctcgccatcatggacgcgcgcgcggtggccaaacggccgcgcgacccggccgacgaggacaatgaactagtgacggcgctcaaagccaaacgcgaggtaaatactatatcggttcgctatctctaccacgccgatcaccaggcgctcacggcgcgtttcttcgtgcccgagggcctggtagagttcgaggcgcagccgggcgcgctgctcatccgcatggagacgggttgcgactcgccgcgacacctctacattagcctttacctgttaggcattcgcgcctccaacgtctcggccagcacgcgctgcctgctcgaaagcgtgtacacggcctcggccgcgcgcgccgcgctgcagtggctggacctgggcccgcatctgctgcaccgccgcctcgagacgctgggctgcgtcaagaccgtctcgctgggcatcacctcgttgctcacctgcgtcatgcgcggctacctttacaacacgctcaaaacggaggtgttcgcgttgatgataccgaaagacatgtacctgacgtgggaagagacccggggacggctgcaatacgtgtatttaatcatcgtctatgactatgacgggcccgaaacacgtcccggcatctacgtgctcacctccagcatcgcacactggcagaccttggtcgacgttgcacgcggaaagttcgcccgcgagcgctgtagctttgtcaaccgtcgcatcacgcgcccgcgccagatccctctgtgtaccggggtcatacaaaagctgggctggtgcctggctgacgacattcacacctcgttcctggtacacaaagaactcaaactgtccgtcgtccgtttggacaactttagcgtcgaattgggagactttcgagaattcgtctga

SEQ ID NO: 14537 - DNA, 408 bp, unidentified
  source 1..408: mol_type = other DNA
  misc_feature 1..408: note = Synthetic
acgaagacgctcgcaagtctgttgtttacgatgcagcgcgacagacggtatcgctacagattggcaccatacaacaagtaccaactaccgccctgtgaggaacagtcaaaagctacgttgagtacttcggaaaattctttatggcctgagtgtaatagtctgactttacataatgataaaatcatggacctggttttggatggggaatgccgcttgagtgactgtgcgggcgagggattcgtttccatcaccgaccctcgctttgcccgtaaagaaactgtgtggacgctaacgccaaaaaacctaagtcgaaatattcaagtgcagttgttttcagctacaaagggggaaagggaggtatacaaggtaaaatgggaaggaggcagtttaaccacgcgtatagtgtaa

SEQ ID NO: 14538 - DNA, 906 bp, unidentified
  source 1..906: mol_type = other DNA
  misc_feature 1..906: note = Synthetic
acgaagacgctcgcaagtctgttgtttacgatgcagcgcgacagacggtatcgctacagattggcaccatacaacaagtaccaactaccgccctgtgaggaacagtcaaaagctacgttgagtacttcggaaaattctttatggcctgagtgtaatagtctgactttacataatgtaagtgaggtaagaggcattccttcatgtgtaggttttacagtgctgcaggaatggccaataccgtgggatatgattctaactgattatgagatgtttattttgaaaaaatacatgagtgtatgtatgtgttgtgccactataaatgttgaagttactcaattattacatggtcatgagcggtggcttattcattgtcattgccagcgtccgggttcactacagtgtatgtcagctgggatgcttttgggacgctggttcaaaatggccgtatatggcgccttaattaacaaaaggtgtttttggtatcgggaggttgttaaccatttaatgcctaaagaggtgatgtatgtgggaagcacctttgttagaggtcgccatttaatttactttaaaattatgtatgatggccatgcctggttagcgttagaaaaagttagttttggatggagcgcctttaattatggaattttaaataacatgttagtgctgtgttgtgattattgtaaagacttaagtgagatacgcatgcgctgttgcgctcgtcgtaccagactgctaatgttaaaagttgttcaagtaattgctgaaaacactgttcgccctctaaaacatagtcggcatgaacgttatcgtcagcaactgctaaagggtttaattatgcatcatcgagcaattttatttggagattataatcaacgagagaatccttgggcggctgatggacactga

SEQ ID NO: 14539 - DNA, 27 bp, unidentified
  source 1..27: mol_type = other DNA
  misc_feature 1..27: note = Synthetic
atgaaattcttgtttagacgtttgtag

SEQ ID NO: 14540 - DNA, 6684 bp, unidentified
  source 1..6684: mol_type = other DNA
  misc_feature 1..6684: note = Synthetic
atgaacatgtctagacaaggtattttccagactgttgggagtggtcttgaccacatcctgtctttggcagacattgaggaagagcaaatgattcaatcagttgataggactgcagtgactggtgcttcttattttacttctgtggatcaatcttcagttcatacagctgaggttggatcacaccaggttgaacctttgagaacctctgttgataaacccggttcaaagaagactcagggagagaaatttttcttgattcattctgcagattggcttactacacatgctcttttccatgaagttgcaaaattggatgtggtgaaattattatacaatgagcagtttgctgttcaagggttgttgagataccatacatatgcaagatttggcattgaaattcaagttcagataaaccctacacctttccaacaggggggattgatctgtgctatggttcctggtgaccagagctatggttctatagcatcattgactgtttatcctcatggtttgttaaattgcaatattaacaatgtggttagaataaaggttccatttatttacacaagaggtgcttaccactttaaagatccacaatacccagtttgggaattgacaattagagtttggtcagaattaaatattgggacaggaacttcagcttatacttcactcaatgttttagctagatttacagatttggagttgcatggattaactcctctttctacacaaatgatgagaaatgaatttagggtcagtactactgagaatgtggtgaatctgtcaaattatgaagatgcaagagcaaagatgtcttttgctttggatcaggaagattggaaatctgatccgtcccagggtggtgggatcaaaattactcattttactacttggacatctattccaactttggctgctcagtttccatttaatgcttcagactcagttggtcaacaaattaaagttattccagttgacccatattttttccaaatgacaaatacgaatcctgaccaaaaatgtataactgctttggcttctatttgtcagatgttttgtttttggagaggagatcttgtctttgattttcaagtttttcccaccaaatatcattcaggtagattactgttttgttttgttcctggcaatgagctaatagatgtttctggaatcacattaaagcaagcaactactgctccttgtgcagtaatggatattacaggagtgcagtcaactttgagatttcgtgttccctggatttctgacactccttacagagtgaacaggtatacaaagtcagcacatcagaaaggtgagtacactgccattgggaagcttattgtgtattgttataacagattgacctctccttctaacgttgcttcccatgtcagagtgaatgtttatctttcagcaattaacttggaatgttttgctcctctttatcatgctatggatgttactacacaagttggagatgattctggaggtttttcaacaacagtttctacagaacagaatgttccagatccccaagttggtataacaaccatgaaagatttgaaaggaaaagctaacagagggaaaatggatgtttcaggagtacaagcacctgtgggagctatcacaacaattgaggatccagttttagcaaagaaagtacctgagacatttcctgaattgaaacctggagaatccagacatacatcagatcatatgtccatctacaagtttatgggaaggtctcatttcttgtgcacttttacattcaattcaaataataaagagtacacatttcctataaccttgtcttcaacctctaatcctcctcatggtttgccatcaacactgaggtggtttttcaacttgtttcagttgtatagagggcctttagatctgacaattattattacaggagcaactgatgtagatggcatggcctggttcactccagtaggtcttgccgttgatactccttgggtagagaaggagtcagctttgtctattgactacaaaactgctcttggagctgtcagatttaacacaaggagaacagggaacattcagattagattaccatggtattcttatttatatgctgtgtctggagcactggatggtttgggtgacaagacagattctacatttggattggtttctattcagattgcaaattacaatcattctgatgaatacttgtcttttagttgttatttgtctgtcacagaacaatcagagttttattttcccagagctccattgaactcaaatgccatgttatccactgaatcaatgatgagcagaattgcagctggagacttggagtcatcagtggatgatcctagatcagaggaagataaaagatttgagagtcatatagaatgcaggaagccatataaagaactgagattagaagttgggaaacaaagactcaagtatgctcaggaagaattgtcaaatgaagtacttccaccccctaggaaaatgaagggactgttttcacaagccaaaatttctcttttttatactgaggagcatgaaataatgaagttttcctggagaggtgtgactgctgatactagagctttaaggaggtttggattctctttggccgcaggcagaagtgtgtggactcttgaaatggatgctggggttcttactgggagactgattagattgaatgatgagaaatggacagaaatgaaggatgacaagattgtttcattgattgaaaagtttacaagtaacaaatattggtccaaagtgaatttcccacatgggatgttggatcttgaagaaattgctgccaattctaaggattttcctaacatgtctgaaacggatttgtgtttcttgctgcattggttaaatccaaagaaaattaatttagcagatagaatgcttggattgtctggagttcaggaaattaaagaacaaggtgttggattaatagcagagtgtagaactttcttagattctattgctggaactttaaaatctatgatgtttggatttcatcattctgtgactgttgaaattataaacactgtgctctgttttgttaagagtggaattttgctttatgtaatacaacaattgaatcaggatgaacattctcacataattggtttgttgagagtcatgaattatgcagatattggttgttcagttatttcatgtggcaaagttttttccaaaatgctggaaacagtctttaattggcaaatggactccagaatgatggagttaaggactcagagtttttccaactggttaagagatatttgttctgggatcaccatttttaaaaacttcaaggatgcaatttattggctttatacaaaattaaaggacttttatgaagtgaattatggcaagaagaaggacattttaaatattcttaaagataaccaacaaaaaatagagaaagccattgaggaagccgatgaattttgcattttgcaaatccaagatgtggaaaaatttgaacagtatcagaaaggggttgacttgatacaaaaattgagaactgttcattcaatggctcaggttgatccaaatttaatggttcatttgtcacctttgagagattgtatagcaagagttcatcagaaacttaaaaaccttggatctataaatcaggcaatggtaacgagatgtgagccagttgtttgttatttatatggcaaaagagggggaggaaagagcttaacatcaattgcattggcaaccaaaatttgtaaacattatggtgttgagcctgaaaagaatatctatactaaacctgtggcttcagattactgggatggatatagtggacaattagtttgcatcattgatgatattggccaaaacacaacagatgaggattggtcagatttttgtcagttagtgtcaggatgtccaatgagattaaacatggcctctcttgaggagaagggtaggcatttttcttctccttttataatagcaacttcaaattggtcaaatccaagtccaaaaacagtttatgttaaggaagcaattgaccgcagactccatttcaaggttgaagttaaacctgcttcatttttcaaaaatcctcacaatgatatgttgaatgttaatttagctaaaacaaatgatgcaatcaaagatatgtcttgtgttgatttgataatggatggacataatgtttcattgatggatttgctcagttctttagtcatgacagttgaaattagaaaacaaaacatgactgaattcatggagttgtggtctcagggaatttcagatgatgataatgatagtgcagtagctgagtttttccagtcttttccatctggtgaaccatcgaactctaaattatctggctttttccaatctgttactaatcacaagtgggttgctgtgggagctgcagttggcattcttggagtgctcgttggaggatggtttgtgtataagcatttctcccgcaaagaggaggaaccaatcccagctgaaggggtatatcatggtgtaactaagcccaagcaagtgattaaattagatgcagatccagtagaatctcagtcaactttggaaatagcaggactggttaggaagaacttggttcagtttggagttggagagaagaatggatgtgtgagatgggttatgaatgccttgggagtgaaagatgattggctgcttgtgccttcccatgcttataaatttgagaaagattatgaaatgatggagttttattttaatagaggtggaacttactattcaatttcagctggtaatgttgttattcaatctttggatgtgggattccaggatgttgttctgatgaaggttcctacaattcctaagtttagagatattactcagcattttattaagaaaggggatgtgcctagagctttgaatcgcctggcaacattagtgacaactgtaaatggaacccctatgttaatttctgagggcccactaaagatggaagagaaagctacttatgttcataagaaaaatgatggtacaacagttgatttaactgtggatcaggcatggagaggaaaaggcgaaggtcttcctggaatgtgtggtggggccttggtttcatcgaatcaatctatacagaatgcaatcttgggcatccatgttgctggaggaaattcaattcttgttgcaaaattggttactcaagaaatgttccaaaatattgataagaaaattgaaagtcagagaattatgaaagtggagtttactcagtgttcaatgaatgtggtctccaaaacgctttttagaaagagtcccatttatcatcacattgataaaaccatgattaattttcctgcagctatgcccttttctaaagctgaaattgatccaatggctgtgatgttatctaagtattcattacctattgtagaagaaccagaggattataaagaggcttcaattttttatcaaaataaaatagtgggtaagactcagttagttgatgattttttagatcttgatatggccattacaggggccccaggaattgatgctatcaacatggattcatctcctggatttccttatgtccaggagaagttgaccaaaagagatttaatttggttggatgaaaatggtttattgctgggagttcatccaagattggctcagagaatcttattcaatactgtcatgatggaaaattgttctgatttggatgttgtttttacaacctgtccaaaagatgaattgagaccattagagaaagtgttggaatcaaaaacaagagctattgatgcttgtcctctggattactcaattttgtgccgaatgtattggggtccagctattagttattttcatttgaatccaggtttccatacaggtgttgctattggcatagatcctgatagacagtgggatgaattatttaaaacaatgataagattcggagatgttggtcttgatttagatttctctgcttttgatgctagtcttagtccatttatgattagagaagcaggtagaatcatgagtgaactatctggaactccatcccattttggcacagctcttatcaatactatcatttattccaagcatttgctgtataactgttgttaccatgtctgtggttcaatgccctctgggtctccttgtacagctttgctaaattcaattattaataatgtcaatttgtattatgtgttttccaagatatttggaaagtctccagttttcttttgtcaggctttgaagattctctgttatggagatgatgttttaatagttttctctcgagatgttcagattgataatcttgatttgattggacaaaaaattgtagatgagtttaagaaacttggcatgacagctacttctgctgacaagaatgtacctcagctgaaaccagtttcggaattgacttttctcaaaagatctttcaatttggtagaggatagaattagacctgcaatttcggaaaaaacaatttggtctttaatagcatggcagagaagtaacgctgagtttgagcagaatttagaaaatgctcagtggtttgcttttatgcatggctatgagttttatcagaaattttattattttgttcagtcctgtttggagaaagagatgatagaatacagacttaaatcttatgattggtggagaatgagattttatgaccagtgtttcatttgtgacctttcatga

SEQ ID NO: 14541 - DNA, 102 bp, unidentified; identical to SEQ ID NO: 7148
  source 1..102: mol_type = other DNA
  misc_feature 1..102: note = Synthetic

SEQ ID NO: 14542 - DNA, 48 bp, unidentified; identical to SEQ ID NO: 7149
  source 1..48: mol_type = other DNA
  misc_feature 1..48: note = Synthetic

SEQ ID NO: 14543 - DNA, 36 bp, unidentified; identical to SEQ ID NO: 7150
  misc_feature 1..36: note = Synthetic
  source 1..36: mol_type = other DNA

SEQ ID NO: 14544 - DNA, 42 bp, unidentified; identical to SEQ ID NO: 7132
  source 1..42: mol_type = other DNA
  misc_feature 1..42: note = Synthetic

SEQ ID NO: 14545 - DNA, 18 bp, unidentified
  source 1..18: mol_type = other DNA
  misc_feature 1..18: note = Synthetic
atgccgattccttactag

SEQ ID NO: 14546 - DNA, 171 bp, unidentified
  misc_feature 1..171: note = Synthetic
  source 1..171: mol_type = other DNA
gtgtacctgattttcacatttgtgactgctacctgcgtctgcagtattattactctgctaatcacctcgctccaattttttgattactactacgtgagaattgtttaccgcagacaccacccccgttaccaaaaccctcaaattgcggctcttttgcagctccaaccatga

SEQ ID NO: 14547 - DNA, 48 bp, unidentified; identical to SEQ ID NO: 7156
  source 1..48: mol_type = other DNA
  misc_feature 1..48: note = Synthetic

SEQ ID NO: 14548 - DNA, 75 bp, unidentified; identical to SEQ ID NO: 7158
  misc_feature 1..75: note = Synthetic
  source 1..75: mol_type = other DNA

SEQ ID NO: 14549 - DNA, 75 bp, unidentified; identical to SEQ ID NO: 7159
  source 1..75: mol_type = other DNA
  misc_feature 1..75: note = Synthetic

SEQ ID NO: 14550 - DNA, 252 bp, unidentified
  source 1..252: mol_type = other DNA
  misc_feature 1..252: note = Synthetic
gtgggcgttacagcaccttgcctcttcacgatcaagacatttctcctccggggcgcaagcatggtcttcgcgctggtttgcgcgagctgcgggcgcgaccttagcgaggtgcgctatcgcttgctaattgaaaggcagaaactctccgacgtgctgcgcaacctcactcacatgtgctgccggctcaagctggcaacgcagatcgagccctatcgcaatctgacggtgcaaccgctgctcgacattaactga

SEQ ID NO: 14551 - DNA, 3585 bp, unidentified
  source 1..3585: mol_type = other DNA
  misc_feature 1..3585: note = Synthetic
atggcgatcagaacggggttttgtaatccctttttaacccaagcatcagggattaaatataacccaagaaccgggcgcggtagtaacagagaatttcttcatagttacaaaactaccatgtcatcgtttcaatttttggcccctaaatgtttagatgaagatgtgcccatggaagaacgaaagggggttcacgtcggtacacttagtcgaccgcctaaagtttactgtaatggaaaagaagttccgattctggattttcgttgttccagcccctggcctagacgcgtgaatatttggggggaaatcgactttcgtggggataagtttgacccccgctttaacacattccatgtatatgatattgtcgaaacaacagaagccgcgtctaatggagatgtatcccggtttgcaactgcaacacgaccgcttggtaccgttattactttacttggcatgtcccgatgtggaaaaagggtggcagttcatgtatacggcatctgtcaatatttttatataaacaaagccgaggtggataccgcttgtggcatacgttccggtagcgagttatctgtattacttgccgagtgtttacgcagttctatgataacacaaaatgatgcaacgttaaatggagacaagaacgcttttcatggtacctcgtttaaaagcgcatctccagaaagctttcgcgttgaggttattgagcgcacagatgtttattactacgatacacagccatgtgcgttttacagggtgtattctccctcatctaaatttacaaattatctttgtgataactttcacccggagttgaaaaagtatgaaggtcgggtagacgctaccactcgttttctaatggataatcccggctttgttagttttggttggtatcaactaaaacctggagttgatggggaacgtgttcgagttcgaccggcaagtcgccaattaacgttaagcgacgttgaaattgactgcatgtcggataatctgcaggctataccaaacgatgactcatggcctgactacaagttgttatgtttcgatattgaatgtaaatcaggaggatctaatgagctggcgtttcccgatgcaacacatctggaggatcttgtaatccaaatttcttgtctattatattcaatccctcgacagtctttagaacacattttactgttttcccttggctcttgtgacttaccacaaaggtatgtacaagaaatgaaggacgcggggttaccggagccgactgtgctggagtttgatagtgaattcgagctattaattgcatttatgaccctcgtaaaacagtacgctcccgagtttgccacaggttataacattgttaattttgattgggcgtttattatggagaaacttaattctatatacagtctcaagcttgatggttatggcagtataaaccgtgggggtctgtttaagatatgggatgttggcaaatccggatttcagcgacgaagcaaggtaaagatcaacggtctcatatctctggatatgtatgcaattgcaactgaaaaattaaaactctcgagttataaattagattcggttgcacgtgaagctctaaatgagtccaagagagatttgccctacaaagacattccgggatattacgctagtggaccgaatacacgaggaattattggtgaatattgtatacaagactcggctcttgtggggaaactgttttttaaatatttaccacaccttgagttatccgcggttgcaaggctagctagaattactttaaccaaggctatttacgacggacagcaggttaggatttacacctgtttattaggactggcttcgtctcgaggatttattttacccgatgggggatacccagctacttttgaatataaggatgttattcccgatgtcggggatgttgaggaagagatggatgaagacgagagcgtttctcccactggtacgtcaagtgggcgaaatgtaggatataaaggagccagggtttttgaccctgatacgggattttatatcgatccggtggtcgtattggattttgcaagtttatatccaagtataattcaggcccataacttatgttttaccacgctaacgttaaattttgagacggttaaacgtttgaatccatccgattatgccacctttacagttggaggaaaacgtcttttttttgtgcgctctaacgttcgagaaagtctgctgggtgttcttttaaaagactggttggctatgcgcaaggctattagagcgcgcatacccggaagttcttcagatgaagcagtgttattagacaaacaacaagccgcgataaaagtagtttgtaattccgtgtacggttttactggagttgcgcagggatttctgccatgtttatacgtagcggccactgtcactacaattggccgtcaaatgttattaagtaccagagattatattcataataactgggccgcatttgaacgttttattacagcgtttccagacattgaaagtagcgttctctcccaaaaagcgtacgaggtaaaggttatatatggagatacggattctgtgtttatccgattcaagggtgttagtgttgaggggatagctaaaatcggcgagaaaatggcacatataatttcaacggctctgttttgtcctcctataaagttggagtgtgaaaaaacttttataaaacttttgcttataacaaagaaaaagtacattggggtaatttacggcggaaaggttttaatgaagggagtcgacttggttagaaaaaacaactgtcaatttattaacgattatgcccgcaaacttgtagaactgttgttatatgacgacaccgtctcgcgtgctgcggcggaggcgtcgtgtgtttccattgctgaatggaatagacgggccatgccgtctgggatggccgggtttggacgcataattgcagatgcacatcgccagattacatcacccaaattggatattaataagtttgttatgacggccgagcttagtcgtccaccatccgcctacataaaccgtcgcttggctcacttaacagtatattataaattagtaatgagacagggtcaaatcccaaacgttcgagaacgcatcccttatgttattgtggcccccacagacgaagtggaggctgatgcaaaaagtgtagctttgctacgtggagatcctttacagaataccgcaggtaaacggtgtggggaagcaaagcgtaagttaataatatctgacttagcggaagatcccattcacgtaacatcacacgggctgtctttaaacattgactattatttttctcatctcattgggacggcgagtgtaacttttaaggcgttatttggaaacgacactaaactcacagaacggcttttaaaacgttttattccagagacacgagttgttaacgttaaaatgctaaaccgcttgcaggcggcaggctttgtttgtatacacgccccgtgctgggataataaaatgaacactgaagctgaaatcaccgaggaggaacaaagtcatcaaataatgcgtagagtcttttgtattccaaaagcaattctccatcaaagttaa

SEQ ID NO: 14552 - DNA, 108 bp, unidentified
  source 1..108: mol_type = other DNA
  misc_feature 1..108: note = Synthetic
atgatagaacgcgtaaatcttatgatggtagttaccaaagttttaatgccggcgaacgtgatttgcccacacctacccgggactggtgttctatttcccaacgcataa

SEQ ID NO: 14553 - DNA, 15 bp, unidentified
  source 1..15: mol_type = other DNA
  misc_feature 1..15: note = Synthetic
atcatactgacgtga

SEQ ID NO: 14554 - DNA, 237 bp, unidentified
  misc_feature 1..237: note = Synthetic
  source 1..237: mol_type = other DNA
atgacgtttccagaaatccaaggcataaatgtccgtacaccggcccttcccgacacggagtttgagattccaagcaggagagaagatcatggtgtggctgtggctcggcgtcgggctcctcggcggtaccggactggcttccctggtcctggccatttccttatttacccagcgccgaggccgcaagcgatccgacgagacttcgtcgcgaggccggctcccgggtgctgcttctga

SEQ ID NO: 14555 - DNA, 189 bp, unidentified
  misc_feature 1..189: note = Synthetic
  source 1..189: mol_type = other DNA
acggcggaagccatcgggcactccccgcacatcgcgcggcaggcctacatggcgctgacagtgctggagctggcgcgcgacgccagcgtcttcgagcacatccgcacgctcagccgcgacgagttcctggccttcatcgtggactacgtgaagcgccgcgcacgggcgcggtgccccgaaacggggtga

SEQ ID NO: 14556 - DNA, 1275 bp, unidentified; identical to SEQ ID NO: 14391
  misc_feature 1..1275: note = Synthetic
  source 1..1275: mol_type = other DNA

SEQ ID NO: 14557 - DNA, 195 bp, unidentified; identical to SEQ ID NO: 7181
  source 1..195: mol_type = other DNA
  misc_feature 1..195: note = Synthetic

SEQ ID NO: 14558 - DNA, 33 bp, unidentified; identical to SEQ ID NO: 7182
  source 1..33: mol_type = other DNA
  misc_feature 1..33: note = Synthetic

SEQ ID NO: 14559 - DNA, 339 bp, unidentified
  misc_feature 1..339: note = Synthetic
  source 1..339: mol_type = other DNA
atcaacagaagcaagataacgctcgaggtcttgtgcttcctgggtacaagtatcttggtcctgggaacggccttgataagggcgatcctgtcaattttgctgacgaggttgcccgagagcacgacctctcctaccagaaacagcttgaggcgggcgataacccttacctcaagtacaaccacgcggacgcagagtttcaggagaaactcgcttctgacacttcttttgggggaaaccttgggaaggctgttttccaggctaaaaagaggattctcgaacctcttggcctggttgagacgccggataaaacggcgcctgcggcaaaaaagaggcctctag

SEQ ID NO: 14560 - DNA, 159 bp, unidentified
  source 1..159: mol_type = other DNA
  misc_feature 1..159: note = Synthetic
aagattgtgggtcagggtaaaaaggtgaacaccgatataccctttaggacgtggagaaagtttgccgcccgttggcacatcccgtacgaaagttgggaggaagggcaggtggtgctgctggaaaaacttgacaaacaactgatatcaaatttaaggtaa

SEQ ID NO: 14561 - DNA, 183 bp, unidentified
  source 1..183: mol_type = other DNA
  misc_feature 1..183: note = Synthetic
atctacgggacggcgctcttcggcaaggtctgcatgatgcggctgcgcgtctcgctggctgagcagatcgccggcctcatgtgcccgtgcgccctgccgccggagatcgtgacctccatcctgtgcttcctgccgtacgagtcgctgctggacctgcgccgcgccatgctgacccgcccctga

SEQ ID NO: 14562 - DNA, 15 bp, unidentified
  source 1..15: mol_type = other DNA
  misc_feature 1..15: note = Synthetic
atggacgcttgctag

SEQ ID NO: 14563 - DNA, 114 bp, unidentified; identical to SEQ ID NO: 7195
  misc_feature 1..114: note = Synthetic
  source 1..114: mol_type = other DNA

SEQ ID NO: 14564 - DNA, 114 bp, unidentified; identical to SEQ ID NO: 7195
  source 1..114: mol_type = other DNA
  misc_feature 1..114: note = Synthetic

SEQ ID NO: 14565 - DNA, 2310 bp, unidentified
  source 1..2310: mol_type = other DNA
  misc_feature 1..2310: note = Synthetic
ttggcctccgtggcgaggtacgggaaaggtcgttgctccaaggtcgcctccatggcagcgctcgagggccccctactactgccaccgagcgcctccctgacgacgagtccgcagaccacgtgttatcaagcgacttgggaatcacagctggaaatattctgctgtctggccaccaactcgcacctgcaggcagagctgaccttagaaggtcttgataagatgatgcagcccgagcccacctttttcgcctgcagagcgatacgcagactactcctgggggaacgcctccacccttttatacatcaagaagggactcttttgggaaaagtgggtcgacggtacagcggcgaaggtttaataattgacggtggtggagtgtttacgcgcggacagatagacaccgacaactacctacctgcggtgggatcatgggaacttaccgatgattgtgataaaccctgcgaattcagggagctacgctcgctgtatcttcccgcgctactaacgtgcaccatatgttacaaagccatgttcaggatagtgtgcaggtacctggagttctgggagttcgaacagtgttttcatgcgtttctggcggtgttgccccatagtctacaacccacaatctatcaaaattattttgcactcctggagagcctgaagcatctctcgttttcaataatgccacccgcatccccagatgcacagctacattttttaaagtttaacatcagcagcttcatggccacgtgggggtggcacggagagctggtctcgctgcgccgtgccatcgctcacaacgtagagcgactgcccaccgtgctgaagaacctgtcgaaacagagtaagcaccaggacgtcaaggttaacggacgggatctggtgggctttcagctggctctaaaccagctcgtgtcccgtctgcacgtaaaaatccaacgcaaggaccccggaccaaagccatacagggtggtcgtcagtaccccagattgtacctactatctagtgtatccgggcacaccggccatctacagactcgtcatgtgtatggcagtggcagactgcatcggccactcgtgcagcggactgcacccctgcgcaaactttttaggcacccacgagacaccgcgtctcctggcggcgacgctttcaagaatccggtacgcgccgaaagaccggcgagcagccatgaaaggaaatttgcaggcgtgcttccaacgatacgcggccacggacgcgcggactctgggcagctccacagtgtcagacatgctggaacccacaaaacacgtcagtttggaaaacttcaagatcaccatattcaacaccaacatggtgattaacactaagataagctgccacgttcctaacaccctgcaaaagactattttaaacatccccagattgaccaacaattttgttatacgaaagtactccgtaaaggaaccttcttttaccataagcgtgtttttttccgacaacatgtgtcaaggcaccgcaataaacatcaacatcagtggggacatgctgcactttctcttcgcaatgggtacgctgaaatgctttctgccaatcaggcacatatttcctgtatcgatagcaaattggaactccacgttggacctgcacggactggaaaaccagtacatggtgagaatggggcgaaaaaacgtattttggaccacaaactttccatctgtggtctccagcaaggatgggctaaacgtgtcctggtttaaggccgcgacagccacgatttctaaagtgtacgggcagcctcttgtggaacagattcgccacgagctggcgcccattctcacggaccagcacgcgcgcatcgacggaaacaaaaatagaatattctccctacttgagcacagaaaccgttcccaaatacagacgctacacaaaaggttcctggagtgtctggtggaatgctgttcgtttctcaggcttgacgtggcttgcattaggcgagccgccgcccggggcctgtttgacttctcaaagaagataatcagtcacactaaaagcaaacacgagtgcgcagtactgggatataaaaagtgtaacctaatcccgaaaatctatgcccgaaacaagaagaccaggctagacgagttgggccgcaatgcaaacttcatttcgttcgtcgccaccacgggtcatcggttcgccgctctaaagccacaaattgtccgtcacgccattcgcaaactaggcctgcactggcgccaccgaacggccgcgtccaacgagcagacaccgccagccgatccccgcgtacgttgcgtccgtccgctggtctaa

SEQ ID NO: 14566 - DNA, 45 bp, unidentified; identical to SEQ ID NO: 7199
  misc_feature 1..45: note = Synthetic
  source 1..45: mol_type = other DNA

SEQ ID NO: 14567 - DNA, 1590 bp, unidentified
  source 1..1590: mol_type = other DNA
  misc_feature 1..1590: note = Synthetic
atggccagtcgggaagaggagcagcgcgaaaccacccccgagcgcggacgcggtgcggcgcgacgtccaccaaccatggaggacgtgtcgtccccgtcgccgtcgccgccgcctccccgcgcgcccccaaaaaagcggctgaggcggcgtctcgagtccgaggacgaagaagactcgtcacaagatgcgctggtgccgcgcacacccagcccgcggccatcgacctcgacggcggatttggccattgcgtccaaaaagaaaaagaagcgcccctctcccaagcccgagcgcccgccatccccagaggtgatcgtggacagcgaggaagaaagagaagatgtggcgctacaaatggtgggtttcagcaacccaccggtgctaatcaagcacggcaagggaggtaagcgcacggtgcggcggctgaatgaagacgacccagtggcgcggggtatgcggacgcaagaggaaaaggaagagtccagtgaagcggaaagtgaaagcacggtgataaacccgctgagcctgccgatcgtgtctgcgtgggagaagggcatggaggctgcgcgcgcgttgatggacaagtaccacgtggataacgatctaaaggcaaacttcaagctactgcctgaccaagtggaagctctggcggccgtatgcaagacctggctaaacgaggagcaccgcgggttgcagctgaccttcaccagcaacaagacctttgtgacgatgatggggcgattcctgcaggcgtacctgcagtcgtttgcagaggtaacctacaagcaccacgagcccacgggctgcgcgttgtggctgcaccgctgcgctgagatcgaaggcgagcttaagtgtctacacgggagcattatgataaataaggagcacgtgattgaaatggatgtgacgagcgaaaacgggcagcgcgcgctgaaggagcagtctagcaaggccaagatcgtgaagaaccggtggggccgaaatgtggtgcagatctccaacaccgacgcaaggtgctgcgtgcatgacgcggcctgtccggccaatcagttttccggcaagtcttgcggcatgttcttctctgaaggcgcaaaggctcaggtggcttttaagcagatcaaggctttcatgcaggcgctgtatcctaacgcccagaccgggcacggtcaccttctgatgccactacggtgcgagtgcaactcaaagcctgggcatgcaccctttttgggaaggcagctaccaaagttgactccgttcgccctgagcaacgcggaggacctggacgcggatctgatctccgacaagagcgtgctggccagcgtgcaccacccggcgctgatagtgttccagtgctgcaaccctgtgtatcgcaactcgcgcgcgcagggcggaggccccaactgcgacttcaagatatcggcgcccgacctgctaaacgcgttggtgatggtgcgcagcctgtggagtgaaaacttcaccgagctgccgcggatggttgtgcctgagtttaagtggagcactaaacaccagtatcgcaacgtgtccctgccagtggcgcatagcgatgcgcggcagaacccctttgatttttaa

SEQ ID NO: 14568 - DNA, 441 bp, unidentified
  source 1..441: mol_type = other DNA
  misc_feature 1..441: note = Synthetic
atggaaatggataagcgtatgaaatctctcgcaatgaccgctttctttggggagctaagcacattagatattatggcattgataatgtctatatttaaacgccatccaaacaataccattttttcagtggataaggatggtcagtttatgattgatttcgaatacgataattataaggcttctcaatatttggatctgaccctcactccgatatctggagatgaatgcaagactcacgcatcgagtatagccgaacaattggcgtgtgtggatattattaaagaggatattagcgaatatatcaaaactactccccgtcttaaacgatttataaaaaaataccgcaatagatcagatactcgcatcagtcgagatacagaaaagcttaaaatagctctagctaaaggcatagattacgaatatataaaagacgcttgttaa

SEQ ID NO: 14569 - DNA, 441 bp, unidentified
  source 1..441: mol_type = other DNA
  misc_feature 1..441: note = Synthetic
atggacatggataagcgtatgaaatctctcgcaatgaccgctttcttcggagagctaaacacattagatattatggcattgataatgtctatatttaaacgccatccaaacaataccattttttcagtggataaggatggtcagtttattattgatttcgaatacgataattataaggcttctcaatatttggatctgacccttactcagatatctggagatgaatgcaagactcacgcatcgagtatagccgaacaattggcgtgtgtggatattattaaagaggatattagcgaatatatcaaaactactccccgtcttaaacgatttataaaaaaataccgcaatagatcagatactcgtatcagtcgagatacagaaaagcttaaaatagctctagctaaaggcatagattacgaatatataaaagacgcttgttaa

SEQ ID NO: 14570 - DNA, 147 bp, unidentified
  misc_feature 1..147: note = Synthetic
  source 1..147: mol_type = other DNA
atagattccatgatgttcatacattgtgttgtttttccagatttgtccaatccttcaaaaacgattaatgccccacgagacatttttgtaaacctaacatattttttacaatttatgcgtataataaaactgaaaataaatatatag

SEQ ID NO: 14571 - DNA, 2310 bp, unidentified
  source 1..2310: mol_type = other DNA
  misc_feature 1..2310: note = Synthetic
ttggcctccgtggcgaggtacgggaaaggtcgttgctccaaggtcgcctccatggcagcgctcgagggccccctactactgccaccgagcgcctccctgacgacgagtccgcagaccacgtgtgatcaagcgacttgggaatcacagctggaaatattctgctgtctggccaccaactcgcacctgcaggcagagctgaccttagaaggtcttgataagatgatgcagcccgagcccacctttttcgcctgcagagcgatacgcagactactcctgggggaacgcctccacccttttatacatcaagaagggactcttttgggaaaagtgggtcgacggtacagcggcgaaggtttaataattgacggtggtggagtgtttacgcgcggacagatagacaccgacaactacctacctgcggtgggatcatgggaacttaccgatgattatgataaaccctgcgaattcagggagctacgctcgctgtatcttcccgcgctactaacgtgcaccatatgttacaaagccatgttcaggatagtgtgcaggtacctggagttctgggagttcgaacagtgttttcatgcgtttctggcggtgttgccccatagtctacaacccacaatctatcaaaattattttgcactcctggagagcctgaagcatctctcgttttcaataatgccacccgcatccccagacgcacagctacattttttaaagtttaacatcagcagcttcatggccacgtgggggtggcacggagagctggtctcgctgcgccgtgccatcgctcacaacgtagagcgactgcccaccgtgctgaagaacctgtcgaaacagagtaagcaccaggacgtcaaggttaacggacgggatctggtgggctttcagctggctctaaaccagctcgtgtcccgtctgcacgtaaaaatccaacgcaaggaccccggaccaaagccgtacagggtggtcgtcagtaccccagattgtacctactatctagtgtatccgggcacaccggccatctacagactcgtcatgtgtatggcagtggcagactgcatcggccactcgtgcagcggactgcacccctgcgcaaactttttaggcacccacgagacaccgcgtctcctggcggcgacgctttcaagaatccggtacgcgccgaaagaccggcgagcagccatgaaaggaaatttgcaggcgtgcttccaacgatacgcggccacggacgcgcggactctgggcagctccacagtgtcagacatgctggaacccacaaaacacgtcagtttggaaaacttcaagatcaccatattcaacaccaacatggtgattaacactaagataagctgccacgttcctaacaccctgcaaaagactattttaaacatccccagattgaccaacaattttgttatacgaaagtactccgtaaaggaaccttcttttaccataagcgtgtttttttccgacaacatgtgtcaaggcaccgcaataaacatcaacatcagtggggacatgctgcactttctcttcgcaatgggtacgctgaaatgctttctgccaatcaggcacatatttcctgtatcgatagcaaattggaactccacgttggacctgcacggactggaaaaccagtacatggtgagaatggggcgaaaaaacgtattttggaccacaaactttccatctgtggtctccagcaaggatgggctaaacgtgtcctggtttaaggccgcgacagccacgatttctaaagtgtacgggcagcctcttgtggaacagattcgccacgagctggcgcccattctcacggaccagcacgcgcgcatcgacggaaacaaaaatagaatattctccctacttgagcacagaaaccgttcccaaatacagacgctacacaaaaggttcctggagtgtctggtggaatgctgttcgtttctcaggcttgacgtggcttgcattaggcgagccgccgcccggggcctgtttgacttctcaaagaagataatcagtcacactaaaagcaaacacgagtgcgcagtactgggatataaaaagtgtaacctaatcccgaaaatctatgcccgaaacaagaagaccaggctagacgagttgggccgcaatgcaaacttcatttcgttcgtcgccaccacgggtcatcggttcgccgctctaaagccacaaattgtccgtcacgccattcgcaaactaggcctgcactggcgccaccgaacggccgcgtccaacgagcagacaccgccagccgatccccgcgtacgttgcgtccgtccgctggtctaa

SEQ ID NO: 14572 - DNA, 1989 bp, unidentified
  source 1..1989: mol_type = other DNA
  misc_feature 1..1989: note = Synthetic
atgcacagagcatcagcaaattcgccgttgaactcggtttcaggatccatgatgtggcgaaaccaatcttctggcagacgcccctccaagcgtctttctgataacgaagccaccttatctacaatcaactctattttgggagccgaagacatgttaagcaaaaacttattatcgtatctacctccgaacaacgaagagatagacatgatttatccctctgagcagataatgacttttattgaaatgctacacggacacaaaaattttttcaaaggtcaaacaatccacaacgctctccgagattctgccgtactgaaaaaacaaatagcctatggagtagctcaagcccttttaaacagcgtttctattcaacaaatccacgatgaatggaaacgtcatgtgaggtcatttccgttccacaacaaaaaattgtcatttcaagattattttagtgtctgggctcacgcgattaaacaggtgatcttgggagatatatctaatataattaattttatccttcagagcatagacaacagtcactataacagatatgtagactggatctgtaccgtaggaatcgttccgttcatgagaaccacccctacggccccgaacttatacaatcttctacaacaagtgtcatctaaactaatccacgacatagtgcggcataaacaaaacattgtcactcccattttactgggtctatcttccgtgatcattccggattttcataatattaagattttccgagatcggaattcggagcaaatttcttgctttaaaaacaagaaggctatagcgtttttcacgtacagcaccccatatgttattagaaatcgcctaatgctgactacacccctcgcccacctttctccagaactaaaaaaacacaatagtctgcggcgtcatcaaaaaatgtgccaattattgaatacatttcccataaaggtgctaaccgcagcaaagacagatgtaaccaacaaaaagataatggacatgatagaaaaagaagaaaaaaacagcgacgcgaaaaaaagtttaatcaaatttttactgaacttgtcggacagcaaatctaaaataggcattagggacagcgttgaaggatttattcaagaaatcaccccctctataatagaccaaaataaacttatgctgaaccgaggacagttccgaaaacgctctgcgatcgacacaggagagagagacgttcgagacctgttcaaaaaacaaattatcaagtgcatggaggagcagatacaaacacagatggatgaaatcgaaacactgaaaacaacaaaccaaatgttcgaaaggaaaatcaaagatctacactctttgctcgagacgaataacgattgtgatcgctataacccggatctggaccatgacctcgagaatctctctttatcgcgagcgctgaacatagttcaaaggctcccattcactagcgtctccatagatgacaccagatcagtcgcaaacagttttttttcacagtatatcccggacacacaatatgccgacaaacgaatagaccaactatgggaaatggaatacatgcgaacctttcggttaagaaaaaacgttaataatcaaggacaggaagaaagtatcacatactctaactatagcatcgagctgctcatcgtgcctttcctaaggcgactcttaaatatttacaacctcgaatcaattcccgaggaatttctctttctatccctcggtgaaatcttattagccatctacgaaagcagcaaaatcaagcattatttaagactcgtatacgtccgagagctaaatcagatctcagaagtgtataatttaacccaaacgcaccccgaaaacaacgagccgattttcgattcgaacattttctccccaaacccggagaatgaaatccttgaaaaaattaaaagaattagaaacctcagacgtattcaacaccttacacgtccgaactatcctaaaggtgatcaagattga

SEQ ID NO: 14573 - DNA, 21 bp, unidentified
  source 1..21: mol_type = other DNA
  misc_feature 1..21: note = Synthetic
atgccagaagtaagcctataa

SEQ ID NO: 14574 - DNA, 21 bp, unidentified
  source 1..21: mol_type = other DNA
  misc_feature 1..21: note = Synthetic
atgccagaagtaagcctataa

SEQ ID NO: 14575 - DNA, 1470 bp, unidentified
  misc_feature 1..1470: note = Synthetic
  source 1..1470: mol_type = other DNA
atggccggcggcagtcaggacgtgcgccggttcatggagcgagaggccactccgccccggggccacgggtcggcgcgctatccgccggagcaggagaggagcccctcgcctccacctcctctgcccaccaagcgccgaaagtatcagcgggtgggctccgggtcttccgaggaggacgtggtccccgtggacagccctccaaaaaagaagcaagccagaaagaccaagcatgtgaccaaggtagaccccgacgaagagatgccccaggaagatgccgtgatcgtgggagtgggattcagccagccgccggttctgttgaaggaaggcaaggacggaaaacgcatcgtcgagcccgcgacccccggtattctgaacgtgcgcaaccccctgagtctgcctctggtctcgtcctgggagaagggcatggataccatgaacgtgcttatggaacgctaccgcgtcgacagcggcctgcgcgatgcttacaagctcatgcccgagcagaccgagatcttccaaaagatgtgccagacctggatgaacgaggaggcccgcggtctgcaactgaccttcagcaccagtaaatcatttagcaccgtcatgggtcgcctgttgcaaggttacatcttcagccacagcgggatcgcacacaagaattgggagtgcaccggctgcgccctgtgggatcacggctgcaccgaggtggaaggccagctcaagtgtttgcacgggacggtgatgatccacaaggaccacgtggtggagatggatgtgaccagcgagaacggccagcgcgcgttgaaggagcagcctagcaaggccaaggtgacccagaaccgctggggacggagcgtggtgcaactgaccagccatgacgcgcgctgctgcgtgcatgatgccgggtgcgggaataaccagttcagcgggaagagctgcggcctgtttttcagcgagggggccaaggcccagcaagctttcaagcagatctcggcctttgtcaaggccctctacccgaatatgcagcgcggcgcggggatgatgctgatgcccgtgcactgcgagtgtaaccacaagcctcagagcgtgcccttcctgggccgccagctgtgcaagatgaccccgttcggcctgagcaacgccgaggacctggacaaggatcagatcagcgacaagagcgtgctggccagtgtgaagtaccccagtctgatggtgttccagtgctgcaaccccgtgtaccgcaactcgcgcgcgcagagcaccggccccaactgcgatttcaagatctccgccccggacatactgggcgccctgcagatgagccggcgcatgtggagcgagaccttccccgagaccccagtgcccaaactggtgatccccgagttcaagtggcagcccaagttccagtaccgcaacgtggccctccccagcgcggcgcacaacgacgagcgcgagaaccccttcgacttttaa

SEQ ID NO: 14576 - DNA, 12 bp, unidentified
  source 1..12: mol_type = other DNA
  misc_feature 1..12: note = Synthetic
atgtgcaaataa

SEQ ID NO: 14577 - DNA, 732 bp, unidentified
  source 1..732: mol_type = other DNA
  misc_feature 1..732: note = Synthetic
ctgacacacctggtcctgtatatttttagaatggaagacatcaattttgcgtccctggctccgcggcacggcacgcggccgttcatgggcacctggaacgagatcggcaccagccagctgaacgggggcgccttcaattggagcagtgtctggagcgggcttaaaaattttggctcaacgctccggacctatgggaacaaggcctggaatagtagcacagggcaaatgttaagggaaaagctcgcagaccagaacttccagcaaaaggtggtggacggcctggcctcaggcattaacggggtagtggacattgcaaaccaggccgtgcagcgcgagataaacagccgcctgaacccgcggccgcccacggtggtggagatggaagatgcaactcctccgcccaggggcgagaagcggccgcggcctgacgcggaggagacgaccctgcaggtagacgagccgccctcgtacgaggaggcccttaaggccggcatgcccaccacacgcatcattgcgccaatggccacgggtgtcatgaaacccgccacccttgacctgccttcaccacccgtgcccgctccaccaaaggcagctccggtcgtgcaggcccccccggtggcaaccgccgtgcgccgcgtccccgcccgccgccaggcccagaactggcagagcacgctgcacagtatcgtgggcctgggagtgaaaagtctgaagcgccgccgatgctattaa

SEQ ID NO: 14578 - DNA, 102 bp, unidentified; identical to SEQ ID NO: 7218
  source 1..102: mol_type = other DNA
  misc_feature 1..102: note = Synthetic

SEQ ID NO: 14579 - DNA, 177 bp, unidentified; identical to SEQ ID NO: 7220
  misc_feature 1..177: note = Synthetic
  source 1..177: mol_type = other DNA

SEQ ID NO: 14580 - DNA, 3669 bp, unidentified
  misc_feature 1..3669: note = Synthetic
  source 1..3669: mol_type = other DNA
atggacacaatggattacgatggcaagttcgcagaatatatggaaactgaatttctaaattacaaagctgttgttgaattacagaaatccaaactaaataaattatttccaggaaaacgacaaatcttgattgtaaacgatccaacacatgagttcgacatccacgaaacaggctggttaactgacatctatcacagaacaccaacgcagaggttaatatggcttggtctgctcatcaatcgaaaactacgtcctgaggacaatctatcactgttgacagatccagatcttaaagctttggtcgagtactcaccagcatggtatccgtttgccttgcgaataaatcaagctttgaatgatggtctaaatctgaacggtaatgttgaggagtgttcttttgacagtaggttcatcaataacatcaagtttcccagacctgagaatgactttctaggtttcaagtttataattgaagccgacacctttgtattattgaaagacgatcttgggattgagaaacctgacgttataagatgttggctgattgatactataccagaagaggttgagattagtggtgagacattcaagttaagggaagagatggtgaggcgggtcgcagacgaggctcccttgtatgcgttttgtgatatagtaaagtactgtcttactgaggttgatttcacaaacattgcaatcaagcagtggttgaattacttcgtacgaaagcgtgatttcttccggttcaatggtaaagatatggtctgttccagttcgctcatagctcataaacggttcgaggtggcccttagtcatcaacgatgtagctcgaagttctcaaggttagatgaagagggatttgaatgtctcactgaaggtgctctctatatcatgccggatccaatatttcggtcacacatgttgaggtcaccatttggtgatcttaatcagcacgtatttgctagaactgtgggtcctagtatagtatggagccgttctgacattgaatcaactaacttcagtctgagtatagaacctgttccagtcgactattcccaaaataggtttaattatgttgataacgaaaacacgaaagaagtcgttgagagcttacgcacaatgggaatgcccaagaacgctcgtttattgtacaatctacagaccgccgtcatcaacccaactaatatgttgaagggtaaggtcaaccgtatgatattagctatgtgtggatacacaggtactcatgctgctactgctttagtcaaccagtttaaaggtacttcggacatgggtgaagctgttactgacagttttgccgttagagtggctgataatatgttcgattacataaacataggatttgcaaaggatggtatcaaggacatatcagctactccggacatactgttcaaaggaggaacttcttcagctagtagtactaacacgtttaagagtatatctggcccggtaaagtattactcacccttcttgacggatgaagacgttgatgataagacagtttttggtacgagtggttctaagaagttggttctgacgaggatatcacacaagttacggagtaagaacgccaatataataactaaccctgagaattttctaaacttcagtgctgacgcattggatgaggttgtgaatgcaggctctcgattagttagaggaactagggctaaacgtataatcactcctaattatggttcgatatatgctaattctctgtgcaccgttctacccgctgttcgactcttaagtaatagaccgaagaacgttctagctaatactctcgaaggtatagttggtactacttatactggtgccctaccacatgacgtcatggccccattcatgtgcgctactactaatgacccgagttacttcgctgcggcttttgattttgcccaattcgattctagtcagtatggtcgtatttcagacgcccacgctgatggagtacgacgtttcgccgataaattcacaggtgacgaggtaaatgatgttaaagggcggttagaccttatgtcgttaaagagcaagttcataattcagtccgagtcgtaccgtagaccactgaagtataagtctaaagggatcgtggctgaagcttcaggggtcaaatcgggtgagttaactacccaattacgtaacacagctacgaataaaggtcatacagacgaagtattgaatagatttaatcaattaagtagacgtaagataagaatcaaatctgagaatataatcggtgacgataagaatattgtattctcactcgaggatggtcgacctttagattcaagtactgctaaattattaattgaagtagctcgtgatgtagctcaagagaaccacatggaattgtcagctaaaaggactgtagttggaaactgtgtcactgaacacattaagatatttgttgctcgagggttcattatgcaagacgtcttcctagatagtttcgcttcggaaaagaatagcttcaggtcaatgtcttacgctgatcgtctcaatacgatttatgacatattcatgacgatgttaatccgcttcgcacaggccaaaccgttaatggacttgatgattaatgacatgtgtttgatggatggacttaagtcaggtagggttacattcattccaactctgggaaatctgtttgctataggtgggcctgagatgttggttggagctccagaaataagaggcatggccaggtttatgcatagatttgatagtgagtattttagcgtaatgaatgatctatatgctacacttcgagataattctggtggtaagaagttcattgatgatttgaccaattcagccactgatgatctggtcaaccagttctggataaaccactttaagaggaagaacaactatgatgttagtcttgatactcgtatagctaataaacgtcaactgcagaatctaatccccgagaattgtaaggtacgactgcttaaaatggttctggatacggttaaagaacctgtaatacaaataatgaacgatactatgtctctggttaacataatacaaagaggtaagttgactaagtattccaagccaaagtatcattatgtaagttggttcatacggtcgtacaatggtgttaaatatatatcaccttatttagccgctgacgatggagttaagaacgtacataccatcgtgggtttagctgaaaggaatacatcaataccggaatctgtagaaccgattaataggttgttacgtaagtatcctcatatgcatccgagctatattggtggcatggacattcttagtgttttgagtgaagtggattcaggtatgtggagggattgtctcttggctcttgactttagagaagatatcattcaaccgttattggtactggttgacaacgtgatgttcaggtatctgcatgaacgtaatgtcacatcaacctctctgtatgataatacctcaaggacttatgacgtatctgactctaacttaaataagttggttcacgtagcaccgagtaatagtaataaacagtctcttggatggagatttgaaggaatgaaagtcgttttatacatggcaagatatggacatatggttagtgtgtctcacgagccactcgtggttgacggagatactgtaaactcgtcttatataacagctctataa

SEQ ID NO: 14581 - DNA, 423 bp, unidentified
  misc_feature 1..423: note = Synthetic
  source 1..423: mol_type = other DNA
acgacaaggtacgcaagagaatccactacaatgcaaaccgagattcaatccagctcgctccgccatcatccatatcgcagggcccgtttaccacgatctgatgaggaaaccagggcttcactgactgaacaacatcccctgttgcccgattgtgatcatgcagattatcataatactgtgaccttggactgtgaggctcgcttggatgacttttcagaggacggcttcatctcaatcaccgacccccgtttggctcgccaggaaactgtgtggattatagaccccaagtccagttcccgcactaatgagaacatttccctatttaaggccacccgtgctgagagaacagtgtacactgtgaaatgggctggtggtgggagactgactacccgtgctggtgtaaaaatcaataaagatacatga

SEQ ID NO: 14582 - DNA, 909 bp, unidentified
  misc_feature 1..909: note = Synthetic
  source 1..909: mol_type = other DNA
acgacaaggtacgcaagagaatccactacaatgcaaaccgagattcaatccagctcgctccgccatcatccatatcgcagggcccgtttaccacgatctgatgaggaaaccagggcttcactgactgaacaacatcccctgttgcccgattgtgatcatgcagattatcataatgtaagttctgtccgtggattaccatgtgctgctggctttaccctgctccaagagtttccagtcccctgggatatgatcctgaccccagaggaaataaaaattttaaaaagatgtatgtcagtgtgcctgtgccctgctaccctggacttggtgagagctcagatggtgagcgggtacgagcgctggatcctgcattgccactgttcatccccgggctccctgcagtgtcgggcgggaggcaccctgctggccgtgtggttcaggagagtcatttacgggtgcatgttcaaccagcgcttcccctggtaccgtcagattgtgaacagaaacatgcccaaagagatcatgtatatgggcagtgtgtttatgaggggcaggcacctgatatactgccgcatctggtacgatggtcacgtgggttccatcatccccaacatgagctttggctggagcgccctgaattatgggctgctgaataacatggtgattatgtgctgcacttactgtgagaacatggcagagatcaggatgcggtgctgtgcccgacgcaccaggagactgatgctgaaggctgtggggattatagtcagagagacttgcgatcccgatccaatctgcagcagccgcaccgagccccggcggcagagactgctgagggcgctgatggagaggcacagacccatcctgttttccgagtatgaatctgtgcgttcttctcattccaccagactgtga

SEQ ID NO: 14583 - DNA, 30 bp, unidentified; identical to SEQ ID NO: 7236
  misc_feature 1..30: note = Synthetic
  source 1..30: mol_type = other DNA

SEQ ID NO: 14584 - DNA, 1011 bp, unidentified
  misc_feature 1..1011: note = Synthetic
  source 1..1011: mol_type = other DNA
atggatatcctgtcacccaattgtggttcggttcagaaaaattgttttcaagtctacaaatctcaagatgtgtacagagtgcgattctgtgtggaaggaaaggttcacgacatacccttgcctggtgttagtacccgtcgggatattattggcactgtcaagtatttttgtgagcttatgggccttaacatcgtagataattcattgagattgaactggcttaacttgtcggaaatggaaaaccatggcaacaacgtaactttagcgaaagtcaaaagtgagtatggtgatctattcgtcaagaaattgcctgctctaccaatcaatgtccattctaccaattacgtatttggaaagtattcagtcttcgctcgtgttttcggtgttgtaaagttgctcaatgatgataactatgaagtcggaattatacttgagaagtgtaatgaaatcagagttatgacggttaacatcatagtcatgggacttaaatcattgatggactcacatcgtgaaagcggaggtacattacatggtgactgtacagtgcaaaatcttatgtgtgataaatatggtatgttaaaactcgttgatccgggtaatcttatgtctcagacggtcgtatggaaaaacgatacacaatattttggcaatacggttgatgatgaagtgtgttctttcgtcatggcctgtcttcagacaacagctaacctacgtaatatagaaaagagtaaattgacaataccattcattactgatctatacctacttgacaccgttctttcggatcctaatgtgatacatggaactagagaaagcggatggctcgaggtaggaagtgattttgttagtatagtacagatgttcgtggctcttgctaacatggttcgtccttacaacataaacgacattttagcgactttgaaaaccgaggtcactggagagaatgaaactttcagtaacgtcataaacaagtacgaagacgaagagcatcctgactctgactttgactaa

SEQ ID NO: 14585 - DNA, 129 bp, unidentified
  misc_feature 1..129: note = Synthetic
  source 1..129: mol_type = other DNA
atgtgtacagagtgcgattctgtgtggaaggaaaggttcacgacatacccttgcctggtgttagtacccgtcgggatattattggcactgtcaagtatttttgtgagcttatgggccttaacatcgtag

SEQ ID NO: 14586 - DNA, 597 bp, unidentified
  misc_feature 1..597: note = Synthetic
  source 1..597: mol_type = other DNA
atggctgaaaagaaaagaataaacaacgcagtcggattaatgcaggaatacgcaattaaactcagtgaatcggcaccttcatatgaagacgtcggctttgagggcccgcctcacaaccgaagcttcacgatctcagctacatttagggacaagaagtatgaaggtatcggcccgtcgaagaaagtagcccgtagcgttgccgccaataagatacttgacgatgtggctgaggaaattgcgaatattgatctggacgatccgtctacgcgtaaaagtgttttcgcgcttgcgtgcgaattagcatcgcataaaatagccagaggtctgctgtctggagtgatttcccaggtcggtggatcggttgatctgattagactttgtcgcaacacaacgtatgatgatagcgctgacttattactggaactgtgggatatgagaaaatttgacaagaatggagttgatacgatggttaaacacatggaaagatggtttaccgctgctggactttatctcatcgttgaaaacgataccctaattgttgaagaaatggattatgatgataaagatcatccccgtcgcgatttgggagacatttag

SEQ ID NO: 14587 - DNA, 132 bp, unidentified; identical to SEQ ID NO: 7240
  misc_feature 1..132: note = Synthetic
  source 1..132: mol_type = other DNA

SEQ ID NO: 14588 - DNA, 27 bp, unidentified
  misc_feature 1..27: note = Synthetic
  source 1..27: mol_type = other DNA
ttgaccgtattgaacatgaactcgtaa

SEQ ID NO: 14589 - DNA, 789 bp, unidentified
  source 1..789: mol_type = other DNA
  misc_feature 1..789: note = Synthetic
atgtcgacaattggcgttctactaagattgagttctctaaacgaattcatcacattttgcaaagagacggaattagatggtatgcttcaagatgctcttactcatcgggtgaatggtggacggatgcttatctcacgaccagctctgggttcagggctgttcaaagtacaagatgtatttactcaaggcacacctcgtgttgttagaaaggatctgatcggattgattcactcaatagccacttatctcatgtccggagttggtagttattgtggatcagtcgatgcttggacacgttcgttaactatctgggatctaattgctagtaaggatatgcgtttcaacctaagtggtatgaacatgatcaaacttgttgagtcattccaaattggatatctaacactagagcaagtacgacgacttggaattatcattaaattgctatgctacaagattgataggccggaaaacttcagcatcgtttgtaacacatatccgacacttaagctaactgatgatacctggaatccatacgacgtaaattcgtacgttagcaaccgagatgacttatcacttattgcaactaacggtataaaaggtaatccttctgaagccatccacctgaatactatttggcttgaagcttgtcagaccgagtttgggatgacggagcccattgattataatgcgattaaacttgcaaacagttattcactcaagaatcaacgtaatagtacatataatcacatcgttcaattcaatggactacatcctccgaacatcacttaa

SEQ ID NO: 14590 - DNA, 906 bp, unidentified
  misc_feature 1..906: note = Synthetic
  source 1..906: mol_type = other DNA
acgaggtacgcaagagggtgcactacaatgagcaccgaggaacaatcgaccttgctccgccatcatccatatcgcagggcccgtttatcacgatatgataaggagaccagggcctctttgactgaacaacaccctctattgcccgattgtgatcatgcagattatcataatgtaagttctgtccgtggattaccatgtgctgctggttttaccctgctgcaagagtttccagtcccctgggatatgatcctgaccacaaaggaagtaaaaattttaaaaagatgtatgtcagtgtgcctgtgtcccgctaccctggatctggtgagagcccagatggtaagcgggtacgagcgctggatcctgcattgccactgttcatccccgggctccctgcagtgccgggcgggaggcaccctgctggccgtgtggtttaggagagtcatttacgggtgcatgtttaaccagcgcttcccctggtaccggcagattgtgaacagaaatatgcccaaagagattatgtatatgggcagtgtgtttataaggggcaggcacctgatatactgccgcatttggtacgatggtcacgtgggttccatcattcccaacataagctttggctggagcaccctaaattatgggctgctgaataacataatgattatgtgctgcacttactgtgaaaacatgagcgaaattagaatgcggtgctgtgcccgacgcaccagaagactgatgctgagggctgtggggattatagtcaaagagacttgcgatcccgatcccatttgtagcagccgcaccgagccccggcggcaaagactgttaagggcgctgatggagaggcacagacccatcctgttttccgagtatgagtctgtgcgttcttctcattccaccagactgtga

SEQ ID NO: 14591 - DNA, 54 bp, unidentified; identical to SEQ ID NO: 7248
  source 1..54: mol_type = other DNA
  misc_feature 1..54: note = Synthetic

SEQ ID NO: 14592 - DNA, 108 bp, unidentified; identical to SEQ ID NO: 7249
  source 1..108: mol_type = other DNA
  misc_feature 1..108: note = Synthetic

SEQ ID NO: 14593 - DNA, 18 bp, unidentified
  source 1..18: mol_type = other DNA
  misc_feature 1..18: note = Synthetic
atgtgcagtaccccttaa

SEQ ID NO: 14594 - DNA, 18 bp, unidentified
  misc_feature 1..18: note = Synthetic
  source 1..18: mol_type = other DNA
atgtgcagtaccccttaa

SEQ ID NO: 14595 - DNA, 21 bp, unidentified
  misc_feature 1..21: note = Synthetic
  source 1..21: mol_type = other DNA
ctggcgtgtgacgtggtgtaa

SEQ ID NO: 14596 - DNA, 54 bp, unidentified; identical to SEQ ID NO: 7265
  misc_feature 1..54: note = Synthetic
  source 1..54: mol_type = other DNA

SEQ ID NO: 14597 - DNA, 279 bp, unidentified
  source 1..279: mol_type = other DNA
  misc_feature 1..279: note = Synthetic
atgattctcaaggagccgttcatcgtggacaccgtgcagggccgcttcttggtgctcaagtacgtgaagctgtgcggagtgaagacggtcgagtgcaagggcgcgaccgcgtcctgcgtcctgaaggtggagaagccagagtcgccgtgcgagcggcgctcgccgtcgccgccgccgtcgcccggcaagtgcgagccgcaggtgcctttcatgcgcacgaacctgctggcgagcatgttctccgagaacaagaacaacgcggccaagatgctggcctga

SEQ ID NO: 14598 - DNA, 12 bp, unidentified
  source 1..12: mol_type = other DNA
  misc_feature 1..12: note = Synthetic
atgatgctgtag

SEQ ID NO: 14599 - DNA, 12 bp, unidentified
  source 1..12: mol_type = other DNA
  misc_feature 1..12: note = Synthetic
atgatgctgtag

SEQ ID NO: 14600 - DNA, 12 bp, unidentified
  misc_feature 1..12: note = Synthetic
  source 1..12: mol_type = other DNA
atgatgctgtag

SEQ ID NO: 14601 - DNA, 1539 bp, unidentified
  source 1..1539: mol_type = other DNA
  misc_feature 1..1539: note = Synthetic
acgcatgagagagctatggatgtccacattgacaaccaagtgttgagtggcctcgggacccccctcctcgtgcacctatttgttcccgacacggttatggcagagctttgccccaatcgcgtgccaaactgcgagggggcctggtgccagactctcttcagtgaccggacgggtctcacgagggtctgccgcgtgtttgctgctcggggcatgctgcccggacggcctagccatcggggcacgtttaccagtgtgccagtgtactgcgatgagggccttccagagctctacaaccccttccacgtggccgcccttcgattttacgatgaaggagggctggttggggagctacagatttattacctgtctctctttgagggggccaaaagggctctgaccgacgggcatcttatcagagaggcctctggggtccaggagtctgctgcggctatgcagcccatacctatagatcctgggccccccggaggggcgggtatagagcatatgccggtggccgcggcccaggtcgagcaccctaaaacgtatgacctcaagcaaattctattggagataacgcaagaggagaatagaggggagcagaggttgggccacgctgggagtccggccctttgcctggggctcagacttagggccggggccgagaccaaggcggctgctgagacctctgtgtccaagcaccacccagccctcgagaaccccagcaacatccggggcagcgccggtggggaaggcggcggaggccgagcagggactggcggcactgtgggggtcgggtcgggggcactctcgagggtgcctgtttctttctctaagacccgtcgggccattcgtgagtccagggccctggtcaggggaattgctcatatttttagcccccacgctctctatgttgtcacatatccagagctgagtgcccagggcagactgcacaggatgacagctgtcacccatgcctccccagcaacagatcttgctgaggtttcaattttgggagctccagagagggagtttcgcttcctcatttcagtggccctcagaatttctgctagcttcagggaaaaactggccatgcaggcctggacagcacaacaagaaatcccagttgttattcccacctcctactcccgtatctataaaaattcagacctgatcagggaagcgttcttcactgtccagacacgggttagttgggaaagttgttgggtgaaagctactatctccaatgcaccaaagacgccggatgcctgcctatggatagatagccacccgctgtatgaggaaggggcctcggcctggggtaaggtgatcgactccaggcccccgggtgggctggttggggctgcttcccagctagtagcccttggaactgacgggcactgcgtccacctggccaccacatcggacgggcaggcatttttggtgctgcctgggggctttgttattaaaggccaattggcactcacccccgaggagaggggatatattctggcacgtcatggcatccgccgcgaacagtag

SEQ ID NO: 14602 - DNA, 1536 bp, unidentified
  source 1..1536: mol_type = other DNA
  misc_feature 1..1536: note = Synthetic
acgcatgagagagctatggatgtccacattgacaaccaagtgttgagtggcctcgggacccccctcctcgtgcacctatttgttcccgacacggttatggcagagctttgccccaatcgcgtgccaaactgcgagggggcctggtgccagactctcttcagtgaccggacgggtctcacgagggtctgccgcgtgtttgctgctcggggcatgctgcccggacggcctagccatcggggcacgtttaccagtgtgccagtgtactgcgaggagggccttccagagctctacaaccccttccacgtggccgcccttcgattttacgatgaaggagggctggttggggagctacagatttattacctgtctctctttgagggggccaaaagggctctgaccgacgggcatctgatcagagaggcctctggggtccaggagtctgctgcggctatgcagcccatacctatagatcctgggccccccggaggggcgggtatagagcatatgccgatggccgcggcccaggtcgagcaccctaaaacgtatgacctcaagcaaattctattggagataacgcaagaggagaatagaggggagcagaggttgggccacgctgggagtccggccctttgcctggggctcagacttagggccggggccgagaccaaggcggctgctgagacctctgtgtccaagcaccacccagccctcgagaaccccagcaacatccggggcagcgccggtggggaaggcggcggaggccgagcagggactggcggcactgtgggggtcgggtcgggggcactctcgagggtgcctgtttctttctctaagacccgtcgggccattcgtgagtccagggccctggtcaggggaattgctcatatttttagcccccacgctctctatgttgtcacatatccagagctgagtgcccagggcagactgcacaggatgacagctgtcacccatgcctccccagcaacagatcttgctgaggtttcaattttgggagctccagagagggagtttcgcttcctcatttcagtggccctcagaatttctgctagcttcagggaaaaactggccatgcaggcctggacagcacaacaagaaatcccagttgttattcccacctcctactcccgtatctataaaaattcagacctgatcagggaagcgttcttcactgtccagacacgggttagttgggaaagttgttgggtgaaagctatctccaatgcaccaaagacgccggatgcctgcctatggatagatagccacccgctgtatgaggaaggggcctcggcctggggtaaggtgatcgactccaggccccccggtgggctggttggggctgcttcccagctagtagcccttggaactgacgggcactgcgtccacctggccaccacatcggacgggcaggcatttttggtgctgcctgggggctttgttattaaaggccaattggcactcacccccgaggagaggggatatattctggcacgtcatggcatccgccgcgaacagtag

SEQ ID NO: 14603 - DNA, 1536 bp, unidentified
  source 1..1536: mol_type = other DNA
  misc_feature 1..1536: note = Synthetic
acgcatgagagagctatggatgtccacattgacaaccaagtgttgagtggcctcgggacccccctcctcgtgcacctatttgttcccgacacggttatggcagagctttgccccaatcgcgtgccaaactgcgagggggcctggtgccagactctcttcagtgaccggacgggtctcacgagggtctgccgcgtgtttgctgctcggggcatgctgcccggacggcctagccatcggggcacgtttaccagtgtgccagtgtactgcgaggagggccttccagagctctacaaccccttccacgtggccgcccttcgattttacgatgaaggagggctggttggggagctacagatttattacctgtctctctttgagggggccaaaagcgctctgaccgacgggcatctgatcagagaggcctctggggtccaggagtctgctgcggctatgcagcccatacctatagatcctgggccccccggaggggcgggtatagagcatatgccggtggccgcggcccaggtcgagcaccctaaaacgtatgacctcaagcaaattctattggagataacgcaagaggagaatagaggggagcagaggttgggccacgctgggagtccggccctttgcctgggactcagacttagggccggggccgagaccaaggcggctgctgagacctctgtgcccaagcaccacccagccctcgagaaccccagcaacatccggggcagcgccggtggggaaggcggcggaggccgagcagggactggcggcactgtgggtgtcgggtcgggggcaccctcgagggtgcctgtttctttctctaagacccgtcgggccattcgtgagtccagggccctggtcaggggaattgctcatatttttagcccccacgctctctatgttgtcacatatccagagctgagtgcccagggcagactgcacaggatgacagctgtcacccatgcctccccagcaacagatcttgctgaggtttcaattttgggagctccagagagggagtttcgcttcctcatttcagtggccctcagaatttctgctagcttcagggaaaaactggccatgcaggcctggacagcacaacaagaaatcccagttgttattcccacctcctactcccgtatctataaaaattcagacctgatcagggaagcgttcttcactgtccagacacgggttagttgggaaagttgttgggtgaaagctatctccaatgcaccaaagacgccggatgcctgcctatggatagatagccacccgctgtatgaggaaggggcctcggcctggggtaaggtgatcgactccaggtcccccggtgggctggttggggctgcttcccagctagtagcccttggaactgacgggcactgcgtccacctggccaccacatcggacgggcaggcatttttggtgctgcctgggggctttgttattaaaggccaattggcactcacccccgaggagaggggatatattctggcacgtcatggcatccgccgcgaacagtag

SEQ ID NO: 14604 - DNA, 1566 bp, unidentified
  misc_feature 1..1566: note = Synthetic
  source 1..1566: mol_type = other DNA
atgtcgaagcctcaaactattccgagaacgcgatcgcaggtcgttggattgacctccaagatcaaggatttcaccaagagtgtagagaagacaaccctcctgactcaagctgagttgaagaaacaacatcgtcatctgctttctcaacaacccgaactgtttagtggattggtcaaattgtatgttgataatgtagctaagtttgaaaggatcgtccgtttgtatggtggtcaaggtagcagacattcgatttcaagtgttggtttcagtcatctgattgaatactgtaataactatgaattaccagatgatgactcaacgcttaaatcgatttgtttcgctatcttccagattcactcgaatgatcttagaaatggtggagcgaatgctttgttcacaattgcagctgagtattttaataagccagaagtcaagactatcgttggcgagcacatcaaaattaaatcatgtaataaggtacccgttgcaattgttaacttaaaggcattgactcaggttattccgtatcgtggagtgaaagcattaaggactaagctgcttgaaacacaagatgatgtagcactggaacacatcggctctttctataatacatgcaaaattaacggtgagttcgacgccgttagtttctgtggactgaagttgagacagagctgtgttataacagtagctggacacgccatcgacgttggcccggactattaccgccaaatgttagctgaagtcacagcattgcttaaactcaagaggaaggtagggtcagtcgttatgcatggaaataatcaatttggattcgtcaagccattggatgcttcacagacacaaagcgttacccaaatccgtaaaatactgaatgatgctagtagggctagttttatcaatatcaagaatgccgcaaacagagatgagatggtatacgcttatgagaactgtttactctactacatcaccatacctaatactggtaacaaatcacactgtatacaggcactaaatctgtctggacttcttgaacacagacttttacactacggatctttaggtacaaagtgtagagatccgagttgtggagtcatcggtatagatagacctgaactgtactctgagctgaaccgtatcgttgagaacaccacaattaaagatagagctgacgctatgcttgagatcaatgctgacgaagtttcgtcagttaaatcatccaactcgaataaatcatcgaataagagtaaatacgtcaggaactctattgataagggtcacaaccttactgatttgagtgatgccaatggtgatcgatactctcactattcacaaatgggaaaaccaagtggtagtgaaatcggcaagttcatcacagctgaagcggttaagggtatatctgattcaactttaaacacaactgaactgaatcttaaattggcgatgctccaagcgtctcctgccacatctagcagatctaaagttgaaacggataatcagcctaatcccattcagcccaaggacattaagccggttcagaagtcatctgatgaattagaagagatatag

SEQ ID NO: 14605 - DNA, 2892 bp, unidentified
  source 1..2892: mol_type = other DNA
  misc_feature 1..2892: note = Synthetic
atgagctcgcgtaaccgtagatctaacatgaagaagaacaagcaaaacgcagcaaagaaagaagagaatgtcgttgaagattcaggctctgtcagccattcccgactcatgtcggttatggggaaagaggcttttgattcattgatggcagcgctagctatcagagaagttccacgtaatacagatccaattctgggaagcatcgcaacgtcgagtatacagtataaagatgtagctggtccacagcccgcagatagagataacgccgttaaggagggtaatcttccaccagccgaacttaaaattcctgctgacactactgttgtagcggggcgtttggctacgatggttactgatccaatgacgactaagaatcaaactgaagtagttgacaagctcagagccgcaatgtctgatggcatggctaaagacatgccgacgcgtgaggttcaagttgatatttctcgaggtgttgatcaggctagtattgatgcgcaacatcaggttctgatggctatgacaaggcagactccaaatgtaatcaaagagcttaagaaggatactcgtaaaatcagaaagcttgaaataggtcctaccaacctggagatcatcacatctagtctgggtcgtgaatcaattattctagaaagattcccattcatagagatacttaattcagtagaactcactgttcagttagctatgttggcctccagattgataagaacttatcagctagacgatcctgtcgttcttgactcacagggaaactatgtcactcagccttttgaaccgggaaccaagttcacgaaggacggtcttagctactctcagatagtcgacgctctaaatgccaagcgtaattacagtaatgaagcgcgtcttatgccggctgaagttatggctataatgagatcagctcttatcgttgataatcgtgatggacgtagtgtcacttcttgctttgatggacgtatcaagaatagtattatacaattgggagctagagtgtggggccgaaacatcattaagttgactgattacatggaattgcttagagctgagattccagccaactaccgattgaaagaatattccggactagaattgcatcgtggatatgtttattatcaacctaggcatggatcactccgtgtactgatcgaactacttaagcgtgaatgttcggaatattttcttcctctgataactcgggaacttgctatcgttaagtctgaaatcgtaacaactggtagtattcaacaacttataagttctgacaacaacgtatcaatcagccgttcctcttatgccaatcaacttctagcttcacttgatctgagtagcaatgagaaggtacgtacgtacatcatcatggctagtatgttcaagaattttaagcttgatgttgaatatggtcaaattccgaacattattgattgtatggcggcaacattttacctgctatttataggtgaggacaatattaccgactccagctacacatcctctctgctgacgatagccagtttcattaagaacagaccgattgacgcattaccatggactgatcccgctcaactgagaaatgaactacgtatggcttcttggcccttcgtcgaacgtaacacacctgttcaatttcgagttaggtattcaccgatcatgtctgatggagaacctggtctttacaacggagctttcaattgtaattccgatcgtcaacacaccatgagggatttgtcaaacatcatcagtaatatgtccaataatagatggcgtgtcggcaacagtaatcaacttggtactttgatgtcaaccacaatcagttcggcttatactctaatcatgaaatcagtaagttcatacaatgatgtcatcagtcgtgtccgtggtggactgcctaatgctttggctaccggacttgactattcaagaggtggttataaagtatcatcgattcaagttgtttcctatttcttgtctctgagtcccttgagtatgacacctagtctgtacgatagcattgataccatggcttgggaaaacctcaaacagtatgaagacttggctaatgatatagaccgtactctgatcatggcccgttccataatgagggttgaaaggccagaagaagcaccgatcatgtcatatgtcaatgggatgtcccgagttatcgatgagtgttggaatgactcaagcaagtacaattacatcagtcgtactatggaatcattacttgcagctgctcaactcagtggtaaagaaggctataaacacctcttgtacgagatgatacgtaaacaacagcatgacgtaattaatgaacccctggctgagatcactgatggtgtcattaacatattgaggaataacttgggtgcttttggaattacttacagtattctgatttatccaagtaatgctggtattgttcgtgatgctagattcgataacgtgttcagacggtctccattcgtagccactatgcccgtcgaaacttacccaagtatcacctaccacgagttgatgttgtcaagagatttcgctcggcaaataagcaggggagtgattgttaccggagttccttttcagtatacacttgaatttaagaacggtaacttcaattcttatttgaagaatgaagtcatatcagtcactaagtcaggaccagtcatcaataagatcgaatttgtcatcggatttaatgatgaaccacagattgaggctgaatatgctgatatacttgatcgtaattacgggattgctattccgactccaccaaatatagatttaatcgtggattataaccgtagtcttgttagatacgataatgctgatagaaacgctttgtacattgaggatcacaccttggtttatactagaccataa

SEQ ID NO: 14606 - DNA, 564 bp, unidentified
  misc_feature 1..564: note = Synthetic
  source 1..564: mol_type = other DNA
gtgtttgtttttgaagagcttcgaagtttaaacccgaaaatgaagggaggaagaatcaatgccgtagccactttcactggctccggctgtagtaacagacatcctttttgtttgcataggattgtagcgataacagtagtaatcataaccgtatcgattggtttagtcgaccagttgtcagaaaagttagcatcaacggaccaaaagcatagcatttcattgatatgtgacggactaaatagtatgataataatgattatggccataattggtatgactagtccaggaaagaagacgtacgcgcatgaacatcatgaagctacagctccgatgctcggagacacagagtatgtatacgttaagaacaacaattccgacctaccaaatacaggtgacatcgttaagcctaatcaacttaacggtgaagccaaattcggagtaaatcaaacgtacccacaagtagttagcggagagtacataattactcaaattccagatgatccgaacagaattaagattataaacataaacactggttcagagaagatcgtcactaaggattga

SEQ ID NO: 14607 - DNA, 321 bp, unidentified
  source 1..321: mol_type = other DNA
  misc_feature 1..321: note = Synthetic
attggaaaggtgtctgccgcgaatgcttctaagatgcaaggtaaacaagcaacaatcaaagatattacattagatatgaaaaaaattgctttgccctgtaacctattgtgtggagaagagagtttgtcaccagattcagaggaggagcatccagtatataaagttgacagctgttgcgacaactgttgccgagtaattcgtgtcgttgttgttgctactgaaactggcattagagcatttcagcaactattgaccgaagaaatttcgtttctttgccccaactgttccaggagtcatttgcaacatggcagattccactaa

SEQ ID NO: 14608 - DNA, 138 bp, unidentified; identical to SEQ ID NO: 7284
  misc_feature 1..138: note = Synthetic
  source 1..138: mol_type = other DNA

SEQ ID NO: 14609 - DNA, 2094 bp, unidentified
  misc_feature 1..2094: note = Synthetic
  source 1..2094: mol_type = other DNA
atggagcgaaaccactggaacgaaaaatcctcgggcgcaaagcgctcgcgcgagagggacttgaccttgtcgacgatccgttcgatcttggcggccgacgagaggttgaggatcaaggcgtcgtcgtacttgggcgtgggccgcggcgtggatgacgaggccgtcatcgacattttccccacgggccagacgatgagcttcctgcggttgctgcacggctttctggggacgtgtcgcggccagagcatgcaccaggtgctgcgcgacccgtgcgtgctgcgcaagcagctgctctacggagtgtgcaagacgctctttgacaccatcacggtgcggcgcgtggccgaggagtggaagttacacgcggcgttgtttccctaccgcgcgctggacgaagaggacctggagcagtatctgttggtgtggagcgcctcgttgcgccagagcgtgcaaacgggcgtgctgggcgcgctccgcgacattttatatcagtacgccgataacgacgactatggtctctacgtggattggtgcgtaacggtgggactggtaccgctgctggacgtgaagaccaagccgagcgaggcggccgagcgggcgcaatttgtacgcgcggccgtgcagcgggccaccgagacacacccgctggcgcaggacctgctgcaggctaacctggcgctactgctgcaggtggccgagcgcctgggcgccgtgcgcatagccaacgcgcccgaggtacgcgtcttcaagaaggtgcgctcggagcggctggaggcgcagctgcgcggcaagcacatccgcttgtacgtggcggccgaaccgctggcttatgagcgcgacaagctgctgttcaccacgccggtggcacacctgcacgaggagattctgcgctacgacgggctctgccgccaccaaaagatctgccagttgctcaatacctttcctgtgaaagtggtgaccgccagccgccacgagctcaactgcaagaagctggtggagatgatggagcagcacgaccggggcagcgacgccaaaaagtccattatgaagtttttgcttaacgtctcggacagcaaatcgcgcatcggcatcgaggacagcgtcgagtcctttctgcaggacctgaccccctcgctggtggaccaaaaccgtctactacccgcgcgtggtccgggtggacccggcgtggtgggacccggcggcgccgtggtgggaggacccgcgggccacgtcgggctgctgccgccgccacccggcccggcggcgcccgagcgggacatccgcgacctgtttaagaagcaggtcatcaagtgcctggaggagcagatccagtcgcaggtggacgagatccaggacctgcgcacgctcaaccagacctgggagaatcgcgtgcgcgagctgcgcgacctgctcacgcgctacgcctcgcggcgcgaggactccatgagcctgggcgcgcgcgacgccgaactgtaccacctgcccgtgttggaggccgtgcgcaaggcgcgcgacgcggcgcccttccgtccgctggcggtggaggacaaccgcctggtggccaacagcttcttctcgcagttcgtgcccggcaccgagtcgctggaacgcttcctcacgcagctgtgggaaaacgagtatttccgcacctttcgcctgcggcgtctggtcacgcatcagggggccgaagaggccatcgtatactccaattacacggtagagcgcgtgaccctgccctatctgtgtcacatcctggcgctgggcacgctggaccccgtacccgaggcctacctgcagctctccttcggcgagatcgtagccgccgcctacgacgacagcaagttttgccgatacgtggagttgatttgcagccgcgagaaggcgcgccggcgccaaatgagccgcgaagcggcgggcggagtgccagaaaggggaactgcctcgagcggcggcccaggaacgcttgaaaggtccgcgccgcgccgcttgatcacggcagacgaggagcggcgcggcccagagcgtgtcggccgatttcgaaatggaggccctgatgatccgcggcgtgctggaggtccatacggatttcactag

SEQ ID NO: 14610 - DNA, 54 bp, unidentified; identical to SEQ ID NO: 7287
  misc_feature 1..54: note = Synthetic
  source 1..54: mol_type = other DNA

SEQ ID NO: 14611 - DNA, 222 bp, unidentified; identical to SEQ ID NO: 10283
  misc_feature 1..222: note = Synthetic
  source 1..222: mol_type = other DNA

SEQ ID NO: 14612 - DNA, 33 bp, unidentified; identical to SEQ ID NO: 7290
  source 1..33: mol_type = other DNA
  misc_feature 1..33: note = Synthetic

SEQ ID NO: 14613 - DNA, 2136 bp, unidentified
  misc_feature 1..2136: note = Synthetic
  source 1..2136: mol_type = other DNA
gtgacgacaatgacgatggacgagcagcagtcgcaggctgtggcgccggtctacgtgggcggctttctcgcccgctacgaccagtctccggacgaggccgaattgctgttgccgcgggacgtagtggagcactggttgcacgcgcagggccagggacagccttcgttgtcggtcgcgctcccgctcaacatcaaccacgacgacacggccgttgtaggacacgttgcggcgatgcagagcgtccgcgacggtcttttttgcctgggctgcgtcacttcgcccaggtttctggagattgtacgccgcgcttcggaaaagtccgagctggtttcgcgcgggcccgtcagtccgctgcagccagacaaggtggtggagtttctcagcggcagctacgccggcctctcgctctccagccggcgctgcgacgacgtggaggccgcgacgtcgctttcgggctcggaaaccacgccgttcaaacacgtggctttgtgcagcgtgggtcggcgtcgcggtacgttggccgtgtacgggcgcgatcccgagtgggtcacacagcggtttccagacctcacggcggccgaccgtgacgggctacgtgcacagtggcagcgctgcggcagcactgctgtcgacgcgtcgggcgatccctttcgctcagacagctacggcctgttgggcaacagcgtggacgcgctctacatccgtgagcgactgcccaagctgcgctacgacaagcaactagtcggcgtgacggagcgcgagtcgtacgtcaaggcgagcgtttcgcctgaggcggcgtgcgttattaaagcggcgtccgccgagcgttcgggcgacagccgcagtcaggccgccacgccggcggctggggcgcgcgttccctcttcgtccccgtcgcctccagtcgaaccgccatctcctgtacagccgcctgcgcttccagcgtcgccgtccgttcttcccgcggaatcaccgccgtcgctttctccctcggagccggcagaggcggcgtccatgtcgcaccctctgagtgctgcggttcccgccgctacggctcctccaggtgctaccgtggcaggtgcgtcgccggctgtgtcgtctctagcgtggcctcacgacggagtttatttacccaaagacgcttttttctcgctacttggggccagtcgctcggcagcgcccgtcatgtatcccggcgccgtagcggcccctccttctgcttcgccagcaccgctgcctttgccgtcttatcccgcgtcctacggcgcccccgtcgtgggttacgaccagttggcggcacgtcactttgcggactacgtggatccccattatcccgggtggggtcggcgttacgagcccgcgccgtctttgcatccgtcttatcccgtgccgccgccaccatcaccggcctattaccgtcggcgcgactctccgggcggtatggatgaaccaccgtccggatgggagcgttacgacggtggtcaccgtggtcagtcgcagaagcagcaccgtcacgggggcagcggcggacacaacaaacgccgtaaggaaaccgcggcggcgtcgtcgtcgtcctcggacgaagacttgagtttcccaggcgaggccgagcacggccgggcacgaaagcgtctaaaaagtcacgtcaatagcgacggtggaagtggcgggcacgcgggttccaatcagcagcagcaacaacgttacgatgaactgcgggatgccattcacgagctgaaacgcgatctgtttgccgcgcggcagagttctacgttactttcggcggctctcccctctgcggcctcttcctccccaactactactaccgtgtgtactcccaccagcgagctgacgagtggcggaggagaaacacccacggcacttctatccggaggtgccaaggtagctgagcgcgctcaggccggcgtggtgaacgccagttgccgcctcgctaccgcgtcgggttctgaggcggcaacggccgggccctcgacggcaggttcttcttcctgcccggctagtgtcgtgttagccgccgctgctgcccaagccgccgcagcttcccagagcccgcccaaagacatggtagatctgaatcggcggatttttgtggctgcgctcaataagctcgagtaa

SEQ ID NO: 14614 - DNA, 462 bp, unidentified
  misc_feature 1..462: note = Synthetic
  source 1..462: mol_type = other DNA
ctgcagttgctggggggagaattccacagacatcgtcgatttatgtgtcggaagatggcgcgcgatgctctgcacggacagcgtccgcggatgcgtctggaggcggcgatagcttccagcaaactcccgcgttcctcgccgcggacgcgcgccactgcttttgttgtgttggcaacggtggcgcgcgctcctctcgctcctcgctcctcgtctccgagctcctcttcagcgctcctcgtttccgcactcttaaatccatggacgtgtatgtggtacgcgacggcgcgtacccgcgagttgccgcgcgcggagacgccaccgccttcgtgctgctgggcgagcatgtgccgttcgtgcaagcgcgcctgcgcgagatgcgcgagcgcgacgagcgcgtcttcctggccgagtatgcgctcacgcccgacgcgcgaacgctcgcgctgcgcgcgcgcgttgtga

SEQ ID NO: 14615 - DNA, 108 bp, unidentified; identical to SEQ ID NO: 5257
  misc_feature 1..108: note = Synthetic
  source 1..108: mol_type = other DNA

SEQ ID NO: 14616 - DNA, 1122 bp, unidentified
  source 1..1122: mol_type = other DNA
  misc_feature 1..1122: note = Synthetic
atgtcgcaccctctgagtgctgcggttcccgccgctacggctcctccaggtgctaccgtggcaggtgcgtcgccggctgtgtcgtctctagcgtggcctcacgacggagtttatttacccaaagacgcttttttctcgctacttggggccagtcgctcggcagcgcccgtcatgtatcccggcgccgtagcggcccctccttctgcttcgccagcaccgctgcctttgccgtcttatcccgcgtcctacggcgcccccgtcgtgggttacgaccagttggcggcacgtcactttgcggactacgtggatccccattatcccgggtggggtcggcgttacgagcccgcgccgtctttgcatccgtcttatcccgtgccgccgccaccatcaccggcctattaccgtcggcgcgactctccgggcggtatggatgaaccaccgtccggatgggagcgttacgacggtggtcaccgtggtcagtcgcagaagcagcaccgtcacgggggcagcggcggacacaacaaacgccgtaaggaaaccgcggcggcgtcgtcgtcgtcctcggacgaagacttgagtttcccaggcgaggccgagcacggccgggcacgaaagcgtctaaaaagtcacgtcaatagcgacggtggaagtggcgggcacgcgggttccaatcagcagcagcaacaacgttacgatgaactgcgggatgccattcacgagctgaaacgcgatctgtttgccgcgcggcagagttctacgttactttcggcggctctcccctctgcggcctcttcctccccaactactactaccgtgtgtactcccaccagcgagctgacgagtggcggaggagaaacacccacggcacttctatccggaggtgccaaggtagctgagcgcgctcaggccggcgtggtgaacgccagttgccgcctcgctaccgcgtcgggttctgaggcggcaacggccgggccctcgacggcaggttcttcttcctgcccggctagtgtcgtgttagccgccgctgctgcccaagccgccgcagcttcccagagcccgcccaaagacatggtagatctgaatcggcggatttttgtggctgcgctcaataagctcgagtaa

SEQ ID NO: 14617 - DNA, 90 bp, unidentified
  misc_feature 1..90: note = Synthetic
  source 1..90: mol_type = other DNA
acgacggagtttatttacccaaagacgcttttttctcgctacttggggccagtcgctcggcagcgcccgtcatgtatcccggcgccgtag

SEQ ID NO: 14618 - DNA, 27 bp, unidentified
  misc_feature 1..27: note = Synthetic
  source 1..27: mol_type = other DNA
ataattcagccaggcctaagacagtag

SEQ ID NO: 14619 - DNA, 27 bp, unidentified
  source 1..27: mol_type = other DNA
  misc_feature 1..27: note = Synthetic
ataattcagccaggcctaagacagtag

SEQ ID NO: 14620 - DNA, 27 bp, unidentified
  misc_feature 1..27: note = Synthetic
  source 1..27: mol_type = other DNA
ataattcagccaggcctaagacagtag

SEQ ID NO: 14621 - DNA, 114 bp, unidentified; identical to SEQ ID NO: 7297
  misc_feature 1..114: note = Synthetic
  source 1..114: mol_type = other DNA

SEQ ID NO: 14622 - DNA, 531 bp, unidentified
  misc_feature 1..531: note = Synthetic
  source 1..531: mol_type = other DNA
atcgaagctttactagatacaggagcagacatgacagtccttccaatagccttgttctcaagtaatactcccctcaaagacacatccgtattaggggcaggaggccaaacccaagatcactttaagctcacctcccttcctgtgctaatacgcctccctttccggacaacgcctattgttttaacatcttgcctagttgataccgaaaacaactgggccatcataggtcgtgatgccttacaacaatgccaaggcgtcctgtacctccctgaggcaaaagggccgccagtaatcctgcctatacaggtgccagccgtccttgggctagaacacctcccaaggccacctgaaatcagccagttccctttaaaccagaacgcctccaggccttgcaacacttggtccggacggccctggaggcaggccatatcgaaccctacaccgggccaggaaataacccagtattcccagttaaaaaagccaatggaacctggcgattcatccacgacctgcgggccactaactctctaa

SEQ ID NO: 14623 - DNA, 291 bp, unidentified; identical to SEQ ID NO: 10837
  source 1..291: mol_type = other DNA
  misc_feature 1..291: note = Synthetic

SEQ ID NO: 14624 - DNA, 1701 bp, unidentified
  misc_feature 1..1701: note = Synthetic
  source 1..1701: mol_type = other DNA
atgagaccattaaacacgcttttgaccgtgattcttatcatactcatcagctatttggtgattgttcattctagtgatgcggttgagaggccaaggactgagggaattaggggcgacctcattccaggtgcgggtatcttcgtgactcaagtccgacaactgcaaatctatcagcagtcagggtaccacgaccttgtcataagattattaccccttttaccaacggaactcaatgattgccaaaaagaagtagtcacagaatacaataatacagtatcacaattgttgcagcctatcaaaaccaacttggataccctattagcagatggtaatacgagggaagcggatatacagccgcggtttattggagcaataatagccacaggtgccttggcggtagcaacagtggcagaagtaactgcagctcaggcactctcccagtccaaaacaaatgctcaaaatattctcaagctaagagatagtatccaggccaccaaccaagcggtctttgaaatttcacaagggcttgaggcaactgcaactgtgctatcgaaactacagacagagctcaatgagaatattatcccaagcctgaacaatttatcctgtgctgccatggggaatcgtcttggtgtatcactctcactctatttaactctaatgactaccctctttggggaccaaattacgaacccagtgctgacaccaatttcttacagcacactatcggcaatggcaggtggtcatattggcccagtgatgagtaaaatattagccggatcggtcacgagccagttgggggcagaacaattgattgctagtggcttaatacaatcacaggtggtaggctatgattcccagtatcaattattggtaatcagggttaaccttgttcggattcaggaagtccagaataccagggttgtatcattaagaacgctagctgtcaatagagatggtggactttatagagcccaagttccacctgaggtagtcgaacgatccggcattgcagagcggttttacgcagatgattgtgttctcaccacgaccgactatatttgctcatcaatcagatcctctcggcttaatccagaattagtcaagtgtctcagtggggcacttgattcatgtacattcgagagggagagtgccctgttatcaactcctttctttgtgtacaataaggctgtcgtagcaaattgcaaagcggcaacatgcagatgcaacaaaccaccgtcaattattgctcaatattctgcatcagctctagtaaccatcaccactgacacctgtgccgatctcgaaattgagggttaccgtttcaacatacagactgaatctaactcgtgggttgcacctaactttactgtctcaacctcacagatagtgtcagttgatccaatagacatatcctctgacatcgcaaaaatcaacaattcgattgaggccgcacgagagcagctagaactgagcaaccagatcctatcccggattaacccccgaatcgtgaatgacgaatcactgatagctattatcgtgacaattgttgtgcttagtctccttgtagtcggtcttatcattgttctcggcgtgatgtataaaaatctcaagaaggtccaacgagctcaggctgctatgatgatgcagcaaatgagttcatcgcagcctgtaaccacaaaactggggacacccttctag

SEQ ID NO: 14625 - DNA, 10308 bp, unidentified
  source 1..10308: mol_type = other DNA
  misc_feature 1..10308: note = Synthetic
atggcgaataaacccaagaagcccggaagacgggctatcgatatagtgagacgtgcgttgcctcgcgtctcgggaccgaaaaaggtcttaaagaaggcaacacaaacagtcatggaaagcttggctggcatacgggcaaccgttgcctacctgctctacatgacattcctcggcaacaaggtcagcaaggccacgagagctaagtttcgcagtgcgaaaaagagtgatctgataaagatcctcagtagcttcaagagaacggttacaaaccttctggctagtgtgcaaaagaggaagagaaaggcgaagagatcggtcacgacgcccagcatggctttgattctattgacaatgagttgtatggcttatggagccaccaggttcaccagaaatgggtttgtgtacatgaacgtcactgggagtgatgttgggacctggttatccattaagacagcagtcgggaacggatcatgcatcgttatggctacagatgtggggacttggtgtgaagacactgttacgtatctttgtcccaaattggacggtgctgctgagcctgacgacattgattgttggtgtaaagttgtatcagtttatgttacctatggtaggtgtagacgagatggggtgagtagacgcagcagacgatctgttgctctcgcaccgcatgggacaggaaaccttcacacaggagaggcaccaatgtggaaatcacacactgacgctagtaaatacttgcagcgagtcgaacggtgggctctgagaaatccaggatatcttggaatattagtggctatcggatggctattgggcaggactacagcgcagcgtgtcatctacatcaccctccttgtgttgatcggaccagcatacagtctgcaatgcatagatgtggctaagcgcgattttatccagggagtcagtggtggcacatgggtggacgtcgttttggacgtgcacgggtgtgtgactattgcagcagaaggtaaaccaacagtggatttcaagttgacgaagttggagatgacgaaacttgcaaaggtgcgagcgtactgcctcactgcctccgtatcagacatcacagtcgaaagtggatgtccaggaacaggcgaaattcataacaccaaggcaaaggacacctcctacatgtgcaaggtgagctaccctgacagaggttggggaaatggatgtggactgtttggaaaagggtcaatggaaacgtgtgctaaatttgcttgcaccaagcaactgcatggacatgtaattagccgcgagaacatcgaagcggaagtggatatttctatccatggacaatcggctcctgattctgacgatgcatccaagcgcaagaaccggaaggaattagccacggccaccatcactcctcaagctagctcaatagaggcggatatgggtgattttggtaaagtgggtatggactgttctctggacattggaattgactttgagcaagtcttgatcgtagacacagcctcacgctggtggatggtcaagagagactggttccaggacttagcacttccatggacatcaccgtcagcagacttctggcatgatcgtgaccggttagttgaatttggagttccgcatgctacgcgacaatctgtatactccattggagatcaagaaggagcatttttcactgccgtggcaaaagccccgtcagtcgagtggaactctgacaaagtcaagttagcgaccggattcctgaaatgcagaatcaagcttggcaacatgaagctgaaagggtcaacatacgtcacgtgtgcgcaagcgttcacctttgcgaagcggccagtggacacaggtcatgggacagtcgtgttccaagtatcatatgctggaacagatgcgccatgtaaaataccagtggccgtgactgacaaaccaaacggcgagcatgtcgggagattggtgacagcacacccattcatagcgaaacagaatgagaaggcagtcgttgaagttgaaccaccatttggagacagctatatagagattggagcaggaaccacaaaaatctctgaagcctggcacaaacccggaagctccattggtaatgcgttggccttgtcatacaaaggaatgaaacggataacagcaatgggcgaacacgcatgggactttgggtccatcggaggattcttcagcagcatgggaaaagcggtacatcacgtttttggcagtttgttcaggactctatttggaggcattggatggatggcaaaaattttgattggagcgctgctcatttggctaggaataagcaccagagatcgcatgcttgccacatctttcattctgactggatcaatcctgctctatttggcaaccacaacagttggagtgtctgaaattggatgcagccttgacataacacacagagaaatcaagtgtggagatggcattttcatcttcagggatgcagggggctggagagacaaatatgtctttcatcctggctctccaaaaaccctagctgcagctatttggaaaggatggaatgatggaatctgtggagttaggtcagccacccgcatggaacatgaaatgtggaaacaaattgaaaatgagctcaatgggattctagaagaaaatgacatcaaattgagtgtcgttgtgaagaatgccaatggcacatatccacgaggaaccaagtcattaacccgaaacacaacaggactgcagtacggatggaagtcgtggggcaagacaatgtttgtttcagtgccaatagccgagaacactttcataatcgatggaaatgatgaaggagagtgtgcctcggacaaacgcgcttggaatacatttaagatagaggagtttggcacaggaataatgaaaaccaaagtcttcctggatttggctgacgcacaaacagaatactgcgacacggaactgttgggagctgctgtgaaaggcaacaagtctgttcatggcgaccccggattgtggatgactgcttctaaggaatcaggcgactggaaactggaatcattgtcaatgacggagagcaggcggtgcctgtggcccgattcgcacaccatttggggaagaggagtgctggagtcaaaactcatcttaccatcaatgttcggaggaccagtttctcacatgaacaccagacctggatatgccacgcaattgtcaggaccctggaacaatgtcccactggatgttgtgtttgaggagtgtcctggtactaaagttgtggtggaaaacaattgcacgaacagaggagaatccatcagatctaccacagatagtggcaaaatcattccagaatggtgctgccggaaatgcaccatgccacccctcacttaccgcacgccagatggatgctggtatgccatggaaatcagaccaaaaaaggcaagcgaagaaagtctgttgcgatcaaaggtttcagctggaacatttcaaggaattgatgatttttccttagggctcctagtgctaatcattttcgtgcaggaaggtcttaaaagaagaatgaccagccggtacataatgttggctgcactaggactattgctggcagcagtgttgggtgacctcacatacaatgacatagcaaggtacgtgatcatggttggtgtagcatttgcagaaatgaacaacgggggagacttgattcatttagccctgattgccacattcaaagtgcaacctggttatctgcttttcttccttcttcgcaaacaatggtcaccacgggaaagtaccattttggcttcagcagcagtcgttctgcaaatttgtgcggctgcatggcaatcaacaaagtctatgcaagtgctgaatgctcttgctatgggatggctgtacatcagagccattgtggtacccggagctctttccaaagcaatgcccctcatttgcatgtgcgtcccaggcgtgttgagcctgacgccacatgctataagagtcagcatggttacaatagcggcaggcactctcatcaaaggcacgaagggaacatcagttcggaagcacatgccctattttttaggactagtaggagccgtggccggactggatccattaggtatgcttggatactccttattaacgtacagcagcggaaagaggtcatggccagcaggagagattatgacggcagtcggtctaacatgcgctatgatcggggcattaagcggaaacgcgatgaatgatattgctgggcctgcggcagctgcctctctgatttttgtggcttacgcaataagtgggagatctgcagacgtgttcttggaaaaggctggtgaaatttcatggattgacgacgcagcagtttctggatcaagtccaagggtggacgtgcaagttaccgacgggggggattttcggcttcgccacgaagccgaggcttcgtggctaaagaatggagtgatggctttctgtctcgttctggctggagtacacccgttagcgattccggtagcggggttgatctggttcggtttcgtaaaaagtgggaggcgtggcacggttctctgggatataccacatccgattgcatcatctgccccaagtgtggaggacggatgttacagagtgatgtcaagaaggctcattggttctacgcaagtaggagtgggagtgatgaaagactcagtgtttcacacaatgtggcacgtcacccgtggcgcctctctaacgagtggtaacggtagaatggatccatattgggcggatgttcgagaagatctcatcagctacggtgggccatggaagctcaacagcacttgggatggatcttctgaagtgcagttaatagcagtgcaaccccagaaaatacccgagaacgttcaaacaactccaggaaggttcgtcatgtcagacggaactgaggttggggctgtggtgcttgactacccgtcaggcacttcaggttccccaatcgtggacaaagatggaaatgtggttggactgtatgggaatggtgtcatgcttaacgacagcacctacgctagtgcgatcgcgcagtcagcaggttgtgagaacattacccctgtagtattccacccggacatgttgaaaaagggaaagctgagcgttatggacctacatccaggagcgggaaaaacccgcaaggtgttgccacaggttctcaaagaagcagtggccaagaagttgaaaacccttgtactggccccgacgcgtgttgtagctaaggaaatgcacggagctctagctggattgccggtgagataccaaacctcggccgttgaaaccaaagggagtggaaatgagctgatagacgtcatgtgtcatgcgacatttacgtacagacaattgacaccaggaagaatggttaattaccaattgtatgtaatggatgaggcacatttcactgacccagcttcaattgcggcaagaggaataatcgcaacacgggtcaagctaggagaagcagctgcgattttcatgacggcaacacctccaggaactcttgatgcattcccagaatccaatagccatattgaagatgaggaaagggaaattccagacaaggcatggagcaccggattcgaatggattacagattacacaggcaaaactgtgtggtttgttccatcaattcgaactgggaacatcatagcgagctgcctcgcgaggacagggaagaaatgcgttgtgttgaatagcaaaacattcaatgacgagtttccaaagaccaagagtggaacgtgggactttgtgatcacaacggacatatctgaaatgggagcaaatttcaaagcctcacgagtcattgactgtagaacgtcaatcaaaccaacattggcctatgtcccttctgagagagtagtgttgggatctccaaaacccataagcccagctagtgcagcacagcgtagagggagagtgggtcgagaccccactcagcttggtgaccagtacatttacggaggcgaggttggtgacgacttctccaacatggtgcactggacagaagcgaagatcttaatggacaacatcatggtaccaggcggtctgtacccacagttctacgagccggaggctgacatgctaagtgaaacggatggacacttcaggctggatatgaccaaacgtgacgtattcaaggatttggtgcgcaaggcagacttacccatatggctggcttatcaggtggccaagcatggtcatgaatacaaagacagaagctggtgccatagtgggccatctggacatctcatctacgatgattacggacagacagttgaatacaagcttgtgaatggcgagaggaagatactgcaaccaagatggattgaccaacgcacataccaggagaaaacagcactcaaggctttcatcgaatttgctgagggacgccgaagttatgttcctataatagaagtgctcggcaaacttccacagcatttcgccgacaaaactattgatgcggctgacaccttcaagactgtgcttacagccactccaggaagtagagcatacaggcttgcagttgacaacctacccgatgcagcagagacggcaatattcgtgacgatggtagggttcatgaccatgggaatactaattttcctgatggcacccaaaggcatgacacgcatgtcgctgggattcatgaccatcatggcagctacgtattttctgtgggcttcaggcatggctggatatcaaatagcggcaatgcaattagtggctttcattctcttcgtagtcttggttccagaaccaggatcgcagagatcagtacaagacaatacgattgccatggtcctaattggaatactaagcattgcagcattgattgcggcaaatgagacaggactgctggagaagacaaaaaatgatttcgtgtctttgttaccggttaaagccccgaacaacaatccctggaagtttgattttagcgtggacttgagaccggcgacatcatgggctttgtatgtagtgattgctacaatgcttgggcccattttggagcatgcgattgtgactcacttcacaagtatatcaattgcagccatcacgaatcaagcaggaatactgctatcaatggataaaggaacgccatttttcaacttggactggggcgtcattctgttgggagtggggtgttggtctagcataacggggacaaccttgttgtgtgcgatcggactctcctgcgttcacttctcaatgactctacctggagtcagggctaaagcagcgagagaagctcaaaacagaaccgcagctggagtatcaaagaaccctattgtggatggagtcaacactataaacgtcacagcgcccccaggaatggaccccatgtatgagcgcaaacttggactgtggatgctcctgatcatggcggtcatatccacagcggtaaacagagacttgactcacttgatggaactaggcatactgggaagcgcagcacttggcccactcatagaagggaactcttccacaatctggaacacctcagtggcatcttcactgtgcaacttgatgagaggacagtatctagctggaatacctctgacatacacgctggtcagaaacctctcgctaaaaggggttccccgtagaggagtcaccataagcaacacccgagggatggaatggaaacgcaaactaaacgcaatgaacaaggaaacctttcagagatacagacgagatgggatagttgaggtggacagaacagcagcgcgggaagctttaaagagtggaaatgtaacaggaggtcacgctgtatcccggggttcagcaaagctcagatggctggtagataaaggatatttacgcctgatgggggatgtcacagacttgggatgcgggcgaggtggatggtgttattacgcagcagctcaaagaaacgttgtatctgtacgaggcttcaccaaaggaggtgacggacacgaagaacccattccggtgcagacttatggatggaacattgtcactctgcgtagcaaagtggacgttttctacatgcctacacacatgacagacactctattgtgtgacattggagagtcatcgtctaacatgctagtagaagaagagaggaccctacgcgtgctgaatctggttgaagagtggatcagaaagagtaagccaactcacttttgttgcaaggttcttgctccatacatgccaaatgtattggagaagatagacaagctaatgaaagttcatggaggtgctttagtgagagtgccactctcccgcaacagcacacatgagatgtattgggtatctgatgcaagaggtaatgccatgaatgcagtggcatctctgagtagaacacttttggacaggatgatacacttgacaggaaaagtgcactgggaagatgatgtcaacctgggaactgggactagagcagtgaacagtgtcgctgatccaccaaactgggacaaaattggactccgagtgagaaaacttgaacaagaatacaaagcttcatggatgtatgatgcagaacacccctacaagacgtggacctaccatggatcatatgagacttccacatctggaagtgcttcatcaatgataaatggagtggtcaaggagctaacacacccatgggacacaaactccggagtgacaaacgtttgcatgacagacacaaccccttttgggcaacagcgcgttttcaaagaaaaggtcgacaccaaagcaatggaacctccaactggaaccagagaagtgatgaggattgtgaacagatggttgacaaactacctgtctagaacaaagaagcctagactgtgtactccagatgagtttattgctaaggtgaactctgatgcggctctgggaacaatgttcaatgaccaagggaactggccaagcgcaaaagatgcagtgagagaccatggattctggaggcaagtcgacattgagcgacaacaccacttagagggaagatgcgtctcatgtgtctacaacatgatgggaaagcgtgaaaagaaattgacggaatttggaagggccaagggcagcagagcaatctggtacatgtggctaggagcaaggtacttggaatttgaagccctaggattcctgaacgaagatcattggctctcgagagagaattccaaaggtggggtcgaagggattggattacaatacctaggctacatccttgaggatatgggaggaatgacaggaggccaaatgtatgcagatgacacagccggctgggacaccaagataacgaatgctgacctagaggatgagatggagatcacaaagctgatggcacacacccacaaaaaattggccacggccattatggatctcacgtacatgaacaaggttgtgagagtgatgaggccaggcaagggaggaaagacgctaatggacatcattagcaggaaggaccagagaggtagcggacaggtcgtgacttaccccctcaacacgtggacaaacctcaaggtgcagttgattaggatggctgaaggcgaaggagtgatcctacctgaagacactctgtcactcaccggctgcagtagacgcaatttagaaatgtggctggtgaggaacggagaagaacgattaacccggatcgctgctagcggagatgatgtggtggttaagcccattgatgaccgatttgcagaagctctgcactttctcaacagcatggccaagatcagaaaagatatcaatgaatggaagccctcaacaggctggaacagttgggagggtgtgccgttttgttcacaccatttccacaagctcagcttaaaggatggaagaacactcacagttccatgcagagatcaggacgaacttattggaagagctagagtgtctcctggagcagggtggacgttgcgagaaaccgcaggactcagtaaggcgtatgcgcaaatgtggatgctgatccacttccacagaagggatctacgaaccatcgcgttcgcaatttgcagtgcagtgcctaaagactgggttcccacaggaaggacatcgtggtccatccatgctcgaggtgaatggatgacgaatgaagacatgttggcggtgtggaatcgagtgtggatcactgagaatccatacatgttcaacaaagaaacaattcacgactggcgagatgttccatacctgcggaaacaactggacaaaaattgcggatcaatgataggagtgaggtccagagccacgtgggctgaaaacattcgtgtttcagtgaaccaggtacgtggttacattggtaaacatgagaactacctcgattacctccaagcccagaatagattcagcattcctgccgaattcaccatgggcaacatattgatctaa

SEQ ID NO: 14626 - DNA, 4692 bp, unidentified
  misc_feature 1..4692: note = Synthetic
  source 1..4692: mol_type = other DNA
atggcgaataaacccaagaagcccggaagacgggctatcgatatagtgagacgtgcgttgcctcgcgtctcgggaccgaaaaaggtcttaaagaaggcaacacaaacagtcatggaaagcttggctggcatacgggcaaccgttgcctacctgctctacatgacattcctcggcaacaaggtcagcaaggccacgagagctaagtttcgcagtgcgaaaaagagtgatctgataaagatcctcagtagcttcaagagaacggttacaaaccttctggctagtgtgcaaaagaggaagagaaaggcgaagagatcggtcacgacgcccagcatggctttgattctattgacaatgagttgtatggcttatggagccaccaggttcaccagaaatgggtttgtgtacatgaacgtcactgggagtgatgttgggacctggttatccattaagacagcagtcgggaacggatcatgcatcgttatggctacagatgtggggacttggtgtgaagacactgttacgtatctttgtcccaaattggacggtgctgctgagcctgacgacattgattgttggtgtaaagttgtatcagtttatgttacctatggtaggtgtagacgagatggggtgagtagacgcagcagacgatctgttgctctcgcaccgcatgggacaggaaaccttcacacaggagaggcaccaatgtggaaatcacacactgacgctagtaaatacttgcagcgagtcgaacggtgggctctgagaaatccaggatatcttggaatattagtggctatcggatggctattgggcaggactacagcgcagcgtgtcatctacatcaccctccttgtgttgatcggaccagcatacagtctgcaatgcatagatgtggctaagcgcgattttatccagggagtcagtggtggcacatgggtggacgtcgttttggacgtgcacgggtgtgtgactattgcagcagaaggtaaaccaacagtggatttcaagttgacgaagttggagatgacgaaacttgcaaaggtgcgagcgtactgcctcactgcctccgtatcagacatcacagtcgaaagtggatgtccaggaacaggcgaaattcataacaccaaggcaaaggacacctcctacatgtgcaaggtgagctaccctgacagaggttggggaaatggatgtggactgtttggaaaagggtcaatggaaacgtgtgctaaatttgcttgcaccaagcaactgcatggacatgtaattagccgcgagaacatcgaagcggaagtggatatttctatccatggacaatcggctcctgattctgacgatgcatccaagcgcaagaaccggaaggaattagccacggccaccatcactcctcaagctagctcaatagaggcggatatgggtgattttggtaaagtgggtatggactgttctctggacattggaattgactttgagcaagtcttgatcgtagacacagcctcacgctggtggatggtcaagagagactggttccaggacttagcacttccatggacatcaccgtcagcagacttctggcatgatcgtgaccggttagttgaatttggagttccgcatgctacgcgacaatctgtatactccattggagatcaagaaggagcatttttcactgccgtggcaaaagccccgtcagtcgagtggaactctgacaaagtcaagttagcgaccggattcctgaaatgcagaatcaagcttggcaacatgaagctgaaagggtcaacatacgtcacgtgtgcgcaagcgttcacctttgcgaagcggccagtggacacaggtcatgggacagtcgtgttccaagtatcatatgctggaacagatgcgccatgtaaaataccagtggccgtgactgacaaaccaaacggcgagcatgtcgggagattggtgacagcacacccattcatagcgaaacagaatgagaaggcagtcgttgaagttgaaccaccatttggagacagctatatagagattggagcaggaaccacaaaaatctctgaagcctggcacaaacccggaagctccattggtaatgcgttggccttgtcatacaaaggaatgaaacggataacagcaatgggcgaacacgcatgggactttgggtccatcggaggattcttcagcagcatgggaaaagcggtacatcacgtttttggcagtttgttcaggactctatttggaggcattggatggatggcaaaaattttgattggagcgctgctcatttggctaggaataagcaccagagatcgcatgcttgccacatctttcattctgactggatcaatcctgctctatttggcaaccacaacagttggagtgtctgaaattggatgcagccttgacataacacacagagaaatcaagtgtggagatggcattttcatcttcagggatgcagggggctggagagacaaatatgtctttcatcctggctctccaaaaaccctagctgcagctatttggaaaggatggaatgatggaatctgtggagttaggtcagccacccgcatggaacatgaaatgtggaaacaaattgaaaatgagctcaatgggattctagaagaaaatgacatcaaattgagtgtcgttgtgaagaatgccaatggcacatatccacgaggaaccaagtcattaacccgaaacacaacaggactgcagtacggatggaagtcgtggggcaagacaatgtttgtttcagtgccaatagccgagaacactttcataatcgatggaaatgatgaaggagagtgtgcctcggacaaacgcgcttggaatacatttaagatagaggagtttggcacaggaataatgaaaaccaaagtcttcctggatttggctgacgcacaaacagaatactgcgacacggaactgttgggagctgctgtgaaaggcaacaagtctgttcatggcgaccccggattgtggatgactgcttctaaggaatcaggcgactggaaactggaatcattgtcaatgacggagagcaggcggtgcctgtggcccgattcgcacaccatttggggaagaggagtgctggagtcaaaactcatcttaccatcaatgttcggaggaccagtttctcacatgaacaccagacctggatatgccacgcaattgtcaggaccctggaacaatgtcccactggatgttgtgtttgaggagtgtcctggtactaaagttgtggtggaaaacaattgcacgaacagaggagaatccatcagatctaccacagatagtggcaaaatcattccagaatggtgctgccggaaatgcaccatgccacccctcacttaccgcacgccagatggatgctggtatgccatggaaatcagaccaaaaaaggcaagcgaagaaagtctgttgcgatcaaaggtttcagctggaacatttcaaggaattgatgatttttccttagggctcctagtgctaatcattttcgtgcaggaaggtcttaaaagaagaatgaccagccggtacataatgttggctgcactaggactattgctggcagcagtgttgggtgacctcacatacaatgacatagcaaggtacgtgatcatggttggtgtagcatttgcagaaatgaacaacgggggagacttgattcatttagccctgattgccacattcaaagtgcaacctggttatctgcttttcttccttcttcgcaaacaatggtcaccacgggaaagtaccattttggcttcagcagcagtcgttctgcaaatttgtgcggctgcatggcaatcaacaaagtctatgcaagtgctgaatgctcttgctatgggatggctgtacatcagagccattgtggtacccggagctctttccaaagcaatgcccctcatttgcatgtgcgtcccaggcgtgttgagcctgacgccacatgctataagagtcagcatggttacaatagcggcaggcactctcatcaaaggcacgaagggaacatcagttcggaagcacatgccctattttttaggactagtaggagccgtggccggactggatccattaggtatgcttggatactccttattaacgtacagcagcggaaagaggtcatggccagcaggagagattatgacggcagtcggtctaacatgcgctatgatcggggcattaagcggaaacgcgatgaatgatattgctgggcctgcggcagctgcctctctgatttttgtggcttacgcaataagtgggagatctgcagacgtgttcttggaaaaggctggtgaaatttcatggattgacgacgcagcagtttctggatcaagtccaagggtggacgtgcaagttaccgacgggggggatttttcggcttcgccacgaagccgaggcttcgtggctaaagaatggagtgatggctttctgtctcgttctggctggagtacacccgttagcgattccggtagcggggttgatctggttcggtttcgtaaaaagtgggaggcgtggcacggttctctgggatataccacatccgattgcatcatctgccccaagtgtggaggacggatgttacagagtgatgtcaagaaggctcattggttctacgcaagtaggagtgggagtgatgaaagactcagtgtttcacacaatgtggcacgtcacccgtggcgcctctctaacgagtggtaa

SEQ ID NO: 14627 - DNA, 378 bp, unidentified
  misc_feature 1..378: note = Synthetic
  source 1..378: mol_type = other DNA
atggctgatgaggctttgtatgtgtatttagagggaccgggggcgacgttgcctgaacagcagcagagaaataattatattttttattctcctgtgccttttactttgtatccgcgaggggtggctttgctatacttacgattaagcataattatacccaaaggctatgttggctgttttttctcgttaactgatgctaacatgtctggattgtatgcttcatcaagaattattcatgctggtcaccgcgaggaactttcggtgctgttgtttaatcatgatgacaggttttacgagggtcgagctggagaccctgtggcttgtcttgtgatggaaagactgatttatccatctgttcgtcaggctactatgatatga

SEQ ID NO: 14628 - DNA, 4293 bp, unidentified
  misc_feature 1..4293: note = Synthetic
  source 1..4293: mol_type = other DNA
atggcaatcgttattcttctagccctggtggcattaacagcccaagcaccattgtcaaataggtgctttgaaggcggtgtcttggtcgaagaaagaaatatggatcatggaatagctgaattatgcgttaaagatgacataagtatgatcaaaacgacttccctccaaaagcggaacgagagcatttttacaaatataattatgagaaaaatgttgattcccaattatcaagagtgcaacccagtcgaagttgccaatggccccatcatgatcttcaaaccggatagagatttaatgttgattcctaaaacatacgcatgcagagtagattgctccatttctctagatagggatgaagcatctattatactacactcagacaagctaaacaattttgaggttatgggaactacaacagccactagatggtttcaaggtagcactacatattcattagagcatacttgtgaacacatccaagttacttgtggatcaaagagtcttagtttccatgcatgttttaagtaccatatggcatgtatcaggttattgaatagaagctatatgccagctttcatgattcaatctgtctgccaaaataaagagatcatcttgatgacatgtctagttttaataatatttggtttgttgtatataatgacgatgtcatacatatgctatatcttaatgccaatatttatacctattgcttatctatgggggtggctgtataacaaatcttgcaaaaaatgtgcttactgcggccttgcatatcatccttttacaaaatgtggaaaaaactgtgtctgcggatcaatgtttgaaaattcagaaagaatgaaaatgcacagagtatcaggtctatgtaagggatacaaatctctaagagctgctagaatcttatgtaagagcagagggtcagcttttatactagctgtaatacttgcaacattgctgttatctttcattcaaccattagaggctgtccagttgaattacaataatgaagtgatagaaatcactgaattgtcccaagaactggatataatattccaagggttaaagactacacaatcaattattatagcacaaattacaatctgcacttgcataatactaatactagcattgtatttgatattgcataagagaatagaagatagacttattaatagaattctatatttttgccctgaatgtcaaatgacacacccgaaaaatggtctaaagaaatacttcgctggagaattcacaaacatgtgtaatagttgtatgtgtggatgcacttacaatcaagaagaattaaatgacggttatacaattcctatgactcatcaacttacagttggatgttatgctccaggaagatattatacgcatagaaggatgtcaaatgggctaatctatattgtacttgcagttttaatgattttagcgtcattatcaatagcagctgcatcaaccgatgataattgtgttaagagttcaacatataagactcaagagccagtatcatgctctgcttgggtcaaagtaacaacatgctcaagcagctccggtattcagggtgtctttaaccacttaaaattaccgaaacaggaaagtgacattctaactaccatgaagggaagcttggattctatcttgaaaaaatctgaagatagtactgtgccattgcaggcatacattttggaatctttagcagtaagtttacattgctcgtatatagcaagtgcagccacagaaggggggaatataaatacaatgattgtttcgcaatacacggataagcccttagaaatatgcacagccaagaaagcatcaaaactatgtggatgtttaatgaggaaaacaacatgtgatacaacaagtactgaagatgtggctacctattataagcaacatccagaaatatacaaagttgattatgctaggatgattcaaactttaactaagtattttcctggagtattttctaaagaactgttaattgcagttaagaatgctaatcacacaagggttaaatctataattaaattactagatgctaaaataacaaatgctcgaggcataaaatcaatatttaaaataatcgatgcagcattatcagatacaacagtggcaggtgctgcgcccccttcttctgctgttaaagatgttaaagcatttgacacaaactggttagctgagagcatattcaaagatatagtaacctcaagtgcaatgaaaatttgcacaagtggcaagatatatagatgcttttaccctatgagtctaagattcactttctattatagctgcaatgaggctaacaagttctaccaaacaggtgaatatccaatttcgaaacatcacagcaataatgctaatctttgtgtagcagatgcttactgtgaaaaggatttcacaccggtcgatgcttcaaataaggatatgttattaactctgagatgtgaagagatcacaataaacattaatgagctccccagcgcgcttcctgtaaacaaatgcagagtgatatcaatccaacattgcacggtatctgggaatagcaacaagacagtagcagaatgtgcaaatgggtttttctatgagtacaatggcgaccttcatcaaagtccaaaagatgatgtggggatctattgttttgataaaacctgcaagacaactaggttcccacatcatccttcgaacttacagggttgcacatcgcataacgcagaaatgttgaataggaaacttaaagagataaattatacaaatttagaacaacttaagcatagcttacaagaatcgattaagacagatttaatagagcataattacatactcacaaagaatttaccaaaattaaatccaacattcaaagcaatatccatccaaggtgtagagacagatagtggaatacagagctcatatatagaaaccaatctaatggtcaagactggtctatcattaggattgcatttgactacaaagtctggtgatcctttatttgacataataattttcgtcaagacagcacattatgaggcagtttatgatgaaatttaccaaactgggccaactgtgggaataaatgttcaacatgatgaaaaatgcacaggtagatgccctgaaaatttaatgaagacaggttggctatcttttgctagggaacacacaagtcagtggggatgtgaagaatttggatgcctggctataaacgaaggttgcctcttcggtcattgcaaagatataattaaaccagaaatgacagtcctcagaaagaatcaagaggaaactccagtcataagaatatgtatctctctgcctcaggagacattctgtcaaccaattaatgcattcactgctattataactgataaaattgaaactcaatttatctcaaatgaggctggaagaatccctaaattactagggtataagtcaaatcgcatatatacaggaatgatcaatgacttgggaacattttctaaaatgtgtggtagtgttcagtcagtaactgggaacgttctaggagctggtagcccgagatttgattatatatgtcatgctgcgcaaagaaaagatgtcacagttagcagatgttttgataatttttacgactcatgtcaaagattggaacctactgataatattgtttatgataataatgtgaaaaaagtgtcactgttaaataaaaacatgggcgaactcaggttgaagattaaattaggagatataaattacaaattatatgagaaaatgccatctttcgatttcaaagggagctgcgtaggatgcattaaatgtatcaaaggagtagattgcgaatttgacatacatgccacaggggaatctgtttgtcttttaacatcaaactgtaacttttaccataataacctaaagatagatccaaatgttcaaaaatatggcatgaaaggcaagtgtactgatgaaaagatatggatagacttgtgtggtaataagatagagatacaaatatcgctggttcaatcccatgaaactattgaagtaggaaatagtgatcagacatattttgtgaaggaaaaagacaatagatgcggaacatggttatgcaaggttagcgagcagggtatctcatctattttcgccccattttttgctgtctttggtgattatgcaaagattgcattctattgtgtgctagggataatatgtcttgccttattaatatatctgctacttcctgtatgtgggaaaatgagggatgttctaaagaagaatgaaatagaatatatgaaagagcttaggggcaagagaatataa

SEQ ID NO: 14629 - DNA, 183 bp, unidentified
  misc_feature 1..183: note = Synthetic
  source 1..183: mol_type = other DNA
attcttcaactattgttacgggtttattgccaactcattggttttgtgctaatcagagtacatctgtttactcagccaatggtttcttttatattgatgttggtaatcaccgtagtgcttttgcgctccatactggttattatgatgctaatcagtattatatttatgttactaatgaaatag

SEQ ID NO: 14630 - DNA, 630 bp, unidentified
  misc_feature 1..630: note = Synthetic
  source 1..630: mol_type = other DNA
acgtataacaccactgacaagatgaacattatccgcaagatagtaaagagctgcaaggacgaggaagaacataagcctaatccggtgtcagctcctccagacgatgacgatctgtggctcccccctccggagtatgttcctctggcggagataaccggcaagaagaacatgagaaacttctgcattaatggggaagtcaaggtctgcagccccaatggatactcattcaggatcctacgacatatcctgaagtcattcgagggtgtttattcaggaaatagaagaatgataggtcttgtcaaagtggtgatagggttagcacaatctggggcccctgttcctgaggggatgaactgggtctataaaataaggcgcacccttgtgtttcagtgggctgaatcttctggacctctggatggggaggaactggagtactctcaggagatcacctgggacgatgactcagagtttgtaggactgcagatccgggtaagcgcaaggcagtgtcacatccaagggagactatggtgtattaacatgaactcaagggcgtgtcagctttgggcagacatgtcactgaaaactcaacagtctaatgaagacaagaacacctccctgcttcttgaatga

SEQ ID NO: 14631 - DNA, 153 bp, unidentified; identical to SEQ ID NO: 7314
  misc_feature 1..153: note = Synthetic
  source 1..153: mol_type = other DNA
